United States Patent Application Publication US 2007/0020625 A1 - sequence listing, part 8

SEQ ID NO: 7022 - DNA, 711 bp, Photorhabdus luminescens
atggagaatgtcatgttaataactccttttgtctttcatttattatcggctatgtgctttggtgcattaattggtgctgagcgccaatggcgtcaacgtatggcaggtttaagaaccaatgcattagttgcgactggtgcagcagtttttatccttagttcaataacaacttcacccgatagtgcgggtcgtattgctgcacaagttgtttcaggcattggtttccttggtgcgggtgtcattatgcgggaaggtatgaacattcgtggattaaataccgcagcaaccttatggtgttctgctggaattggtgtgctgtgtggccttggccaatattggctagctgcgatagcaactgccattattctttgcgcaaatatattgttacgtgaagcagctcaacgtattaatttacaacccaggcagcaggccattgatcaagtacagtgttataaaattcacgtagtgtgtgacagtgatgacgaaattctggtgagaacgttagtattacaggcgctcaatggagtagcagtgaggttaaaatcattgagtttcgctgataaagttcaacctggaaaatttgaagtgtgcgttgaagtgttagcaacactggatgagcaaaaagagatagaagcaattgtttgtcgtataagtctggaaaagagcgttagctcaataaactggaaaatggcttctgaactaccgatctga

SEQ ID NO: 7023 - DNA, 234 bp, Photorhabdus luminescens
ctggccttctgccaaagttttgaaaccgttaccctgaatggcagagaagtgaacgaatacgtctttgctaccgtcagctggggtgatgaaaccgaagcctttagactcgttgaaccacttcacttgacctttcattttgtcagacattgtgactttcctatatatcaaaaaaattttgccaccattgggcatgtattggccagttatatcagctattacttatggaggcactaa

SEQ ID NO: 7024 - DNA, 507 bp, Photorhabdus luminescens
atgaatatcattaaacagatactgattcaggatcttgaacgaatcaacatcgaagaacaacgtgatggtaaaccccgttttaacagccaattcatcagtaaccatccttatctctgcctggctatgcttgtatcctatctgtttctcgctgcacttatctggtacgccccctattttagtttactttcactgctagcttttacagtactcttcattattatgtcggcggttttattactcgaaatcaaacctgtgtatcggtttgatgatatcggcgtacttgatctacgggtatgttacaacggcgaatggttcgtcagcgaaaaaatctcagactgtgcaatcaaagagctttgttcccaccctcatgttccattgacaataaaagatgaaatcaagcgcattatacaaatgaaaggtgaaattcatttttatgatgtttatatcatggcatttcctgaacaatcacatatagcaacatcgttaccgatgatgcatagccgataa

SEQ ID NO: 7025 - DNA, 1077 bp, Photorhabdus luminescens
atgaagtttttaattaatactgatgtaactaactgggtttcacataaagactggtttaacgttccattacgattgtttgtagttctacaagatgatgatggttctgcatcattagaaaattacaaaagtaaaatcgtggtgaatggcttgaatgagggcgaatatgaaatcgtaaataacaataacatatttgatcccattagtagagcatctgaaatattagtaaaaatcaagacagatcagagggttaatgctacaatcggttttgatgctgaagtaacggatgcgagtggtggtgtggtagcgaaagccgctctgagtcgatttaaactaaagtcagtaggattggcagcacctgtatatccggcacattatgataatgttattagcggtgatgatataaaagcaggagttagagtactttttactgattccaatattttagataaatatgaactgaaatttgtttttgataatgataatgttgaagttgttcctggtgtacaaaatagcggtgatattcgtagtttgccggtgaaaaatgatcttcttactgaaggcaagcatgatagcctttattatactattagcgaaagcggtactgctagattttctgctattcaacgtgtacttgtagagcttgataaagattctgcaacagtccaggtgcgtcgtgatttagaagtgccttatattgaagagtatgatgaaaataggggtcgaccgattggtgagagtattattgattatgatatcaatattttggtcaacgatgtaaaacttaaagataaggagttgaaaaaaggtacagtacatataagagggtattctgctgacaatcgagatacaggggaattagtattaaagatagattctttacaaggtagtgaagataatatcttccggttagctgtaattaagcctgaagaaaatgctgatggtcaaccgggtggagttgatttctttaattatataggtaatggtcaggtaaaaattcactacgaaatatcatttgttggtgaagtgaatgtattgcataaatctaaagagaaggtttataaggtagttctggactga

SEQ ID NO: 7026 - DNA, 258 bp, Photorhabdus luminescens
atgtcactgactgatattaaagcaaaaaatgcaaaacccctcgagaaggaatacaagttaactgatggctttggtatgttccttcgcgttaccccgaagggttccaaatactggcaaatggcttaccgcttcgaagggaagcaaaaaatcctctctataggtgtttaccctgctgtttcacttgctgatgcaagacaacgccgtgatgaggccagaaggcttcttgctcagggtattgaccctacaggcagaggttaa

SEQ ID NO: 7027 - DNA, 1104 bp, Photorhabdus luminescens
gtgtttaccctgctgtttcacttgctgatgcaagacaacgccgtgatgaggccagaaggcttcttgctcagggtattgaccctacaggcagaggttaaagagctaaaggccaagcgtgataagacacgttgcttcgctatggtggctaaggcttggtttgccacaaaaacaaaatggtcaaaagattatggtgattccgtatggaagcgccttgaaacctatgtcttcccggcgattggagacaaagatgttgccgagctggatacaggcgatctgctggttcctgtgaaaaaggttgaggcacttggttatcttgaagttgccatgcgcattcaacaatacattacagcgatcctgcgtcatgccgtacagcaaaaactgatactccataaccccgcctatgatatggaaggtgctgttcagaaaccacagactgaacaccgcccggcactggagctggaagaaatccctcaactactgaaaaaaattgccgaatacagaggtcgcaggttaaccatactggctattcagctcaatctgatgattttcattcgttccagtgaacttcgtttcgcccgttggtctgaaattgatttcaaaagtaagttgtgggtgatccccgaacagcgggaagcgattgaaaacgtcaaacattccactcgtggggccaaaatgaagcgtaagcatttcgttcccttgtgtaagcaagccatgaggatactgaaagagatccgacaactgacttataaagaaggccatgatgatggattaatctttactggctgttatgactcgtttaagcccatgagcgaaaacaccatcaacaaagcccttcgcaatatgggctatgacacgaagcaggacatctgtggacacggttttcgcacgctggcctgtagtgccttaattgagtcaggtttgtggtcagaagacgctgtggagcttcaaatgagccataaggaaagcaacagcgtccgtgctgcttatacccacaaggcaaaacacctcgaacagcgccgcctgatgctccaatggtgggctgatttccttgatgcaaaccataacggtatggtcaggccatttgagtttactcaaagaagatag

SEQ ID NO: 7028 - DNA, 1734 bp, Photorhabdus luminescens
atgagaagcttgaaatttcaacgattagttctgatatcagattcgaaaagacttgcgaatcagttctcgttccagaaaagattgaatttaattaccggaaaagataacagtattggcaagtccactctagcaaaaagtttactgtggtctttaggatgcgatcctgttttcgatgaagaatggaaatcaaatgacattaaatctattttatattttactttaaataacaaagagtatttttcatgtcgaggaagtcactcaataattttgggagctatcggtgatgaagctcaaagatatataaatataactggtgatttttcgaaaggcttctcggatctcgtcaatttcaaaatgaagcttcctaatcgtggtgatggaaacttggagacacctcctccagcatattattttttaccattctatattgaccagataaaaagctggagttcaccttggaattcattcgagaacttagggcaatattccaactggaaaggtccattaatcaaatactttactggttatcttaagcctgagcattttgatattgaggaaaacatttatgaatatagtgaaatcaaaaaagaatcagcacataaaatagaaaaatttcaaagcgccgttgaagttatagttgataacacggttgattcccctataactttagataataatgacttcattaagattcagaatgaaataaaaaatgaactttacgacttgattgattaccaaacaagactttatgatgctcaggctacgatcacttcaaatatttatgatctcgaaagtcagtatgcgttagccattacttctgcaaacgaactcgaggcagattataaatttgcggtagaatccatacctactgattatttagagtgtccattgtgtgggactcttcacgataactcactacctaacagagcgttgcttctttcagaaaaggactcattgcttaatgaggcaaattcaatagcatctaaaatagtggaactcaaatcttcattgaactcattaaatgaggacgctcagtttattactaacgaaatcgaaagaataaataataaatacattacagacgacgatgcggttaaaaaaggtctcattgctcaagtaatcgatactctatctactgaaaacgtctcaaaaaatattcaaattaaaatcgataatgaagaccttaacatcagcaaggccaacagttccatcaaggaattaaaaaaggaccagaaaaaacttctttctaccaaagaaaaggaagaattgaactcgtcctttatgtcaaaactgctggcaaatattgaagcactgggttcgacaggaataaaccttagcaaagttaaatcacccactgattacaaacagttgcttggtggtggtgctgctgaggctgctagaggattacttgcttatcaactctctgtactgcaacaaattcatggtgctaaaacttgcgtagtgcctcctttcgtcatcgatacgcccaaccagcaggaacaggcgggataccgttatgaaactgtcattaaagaattaatgcgtagcgttcctcaggattatcagataatactgtgtgcaatggagaatgatgcattaaatgaatttaaacatgatgctaatgttattgtgttaaattcaaatagacttctaactgcttcacaatacgattctttgaggtctgaatataaatctattcaggcaatagttacagatcaaagtgataaggaataa

SEQ ID NO: 7029 - DNA, 1086 bp, Photorhabdus luminescens
atggaacgtaatgttttgggtcatgctcaaagagaaatttcaggagcaaccacattcggaaaatatgattttcaatatcattgggccttatgcagaataattgaaaagcataaatcaaattctgactatgcattattaatcgaatatcatgaggatgtcgttatcgcagactcattgtatggaagttcggcaaaatttgaattttttcaagtaaagaatactggaaaacctttcacttctgacgccttaaccaaacgagagcaaggtgctgagggagctaagagttccattctaggtaagctattaagctcatgtattggtacagactatgaagcacgcattacggaaatcggtcttgtgtcctcaagtggtttctcatttgaacaaagagataagaagttaaaattagacattataacttcaggtgatcttagtgtagattgcttatcggggttaactgaaaaattaaaggatgagcttggaatagctctcttgccagaaaatctaaaattcattgttccaaaaataaaattagagaaccaagaagagtttgtcattggtagatttgctgaattagtaaatgaaatatttccaaatagtcattgtaatgccgttaatatttatagagcaataatcgatgaaattcatcgcaaaggacagaatacttacgattttactgtttgggagaaaatggtagaggataaatctctcacatctcataaggtaaaggatgttatagctgttaacacaacaagcccaaaatttgaagactttgagaaagactttgagtacttagctaaaaatgatatgaaatggaacaccttaacttatcggaagattaataaaaaaataaaacaacttttcttgcgccgaatcggacatttgtcggcttttgatatgaatataatgagaatagtccagcaggcgctaagtagtgtcccagaagaagactttacagaaacccgtgattacattgagtcagttattgtaaaagctcaagaacttaatattgaagatcaagtaccagaacatgacgatatattatgcgagatagtttatagctttttaaaggtgatgcatgaataa

SEQ ID NO: 7030 - DNA, 114 bp, Photorhabdus luminescens
ttggtgctgttttctctgtctaccacgctgtatcaggtctacgatgtatgcctttacgcaacatgttacatgccagtcagcgtaagtgtagcggtattagatacagctatttag

SEQ ID NO: 7031 - DNA, 1596 bp, Photorhabdus luminescens
atggagtttgtgttgatcattgaatatgctgtggaaaaagaaacaaaacagatcatgcatattgatgatgttcctaacggggctaagtgtaattgcatatgtaagtcatgcaatgatgaattaatagctcgcaatggaggaaaattaaaaaaacatcatttcgctcatagaaaccttattgagaatcgtgcttgccgaatgacacagctgcatttagcaatgcaacattttttccttcgcttagatgtattaacaatacctcaattgacttttgcgtataagaaccacacgctaaaaacaccactaataaaaaccaaaattttatccgcaactttagaacaccgaattggaaactatgtatcagatgtctgccttaacacagacactggattatacatcgtggagatctgcgtaacacataaatgcgaacctgaaaaggtacgttactttaaaaataacaaaataaattcagtagagttagtgttcgaatactctgaagatatcgagatagaagaatggcatcaacgtattaaaaacaatcaagtccccaatgaatggttttattactctgagagtattaaagcgattgaatgtcatgagttagctgtcgaaaaagaaataaatgagaggcgctcaagaagattaaaaaacacaataaattcaataaataaaaccatgaaaaataaaaccgtattcctgccaagtattcacgacagtatatcttatgaagaatctaatgaggtttttactgaaaacttctgtctgtacgcaaagaggaatcgtaccgttgataagctatcgcttatacaaaaaaccgatggtggttttatcgtgcgtggagacatcttgcataaagggaaagaatttcatatatggataatatatttactaagttattttaatttgaatctaatggatgaatttgatggaagtgtaattattagattctatcctgaagatagtaacaaaccgcaatggcgctggttgaaacatccgtctattgaaaaagaaaaatcacgagtacggtctcaatttattaaaacctgtaaagaaaatatacatataaaatccctaacaatttatatgagcaatagattaaaaaatcgctcatatgagtatttagacatgacagatgaactcttcaatagagactataacacatggagtaaatggcttataagcaatgatctatttacaccaagcatacagaggaagtggccaaaattacctaaaatgctcaaagaaatgaaagaatcacccagcctttggatgttccagagatggtcaattttagtaataagcatcatgcttaatataatagataatgtatcaactggaagcagcattacagtttataacatatttgatgaaatgagtgacatcctacctctcgatcctgaatttatatctttagaagcagaagcaattgccaataagaaaaccattcaattacctcatcgccatcttatttttagaaggcatataatccttgaggttctacgaccattaatcgaaagaagtattttgacggtgaaaggtgatattgtcattaaagaaacaccactgctacaattgtttcttcaaagcatagtttaa

SEQ ID NO: 7032 - DNA, 981 bp, Photorhabdus luminescens
gtgttaaacaaaataaaacaacaatccatcttgggattaaaaaacatagaaaaaatcataactctaataatttttatgtgtacgttttcaggagcatggttcctctttagctatgcacgcacccacggtgtgaagtttattgatctgatacaatcaaatttactcatcagtacaggtgcattatctttttttataatactttttattgttggatgttttttaatatcattcaacttatctccagcaattgcccgatgcctctattatgatatattagtcaaagaaaagataaaggggataaaaagaagaaaattaatatatttattatacttcacatcatgtggagtagcttcttcattcgcattttaccatttttatgtcggagtttcattagttgttataattgtacttactcttcattttttagcgataacaaaaccctttcattataagaaaatagccgtcacattaaagttatttttatatacggtattattattagcaataagcattgctatgtttgggtttctttccattacactgaactttgatatagaaacaaatttttcttttattagtattattcaagctctttcaatatttgttattatcgttacattggcgattattggattagcagacatacatcaacgtaatcgagatcaaaagaataggatatggtgttacgtttttttctccttgcttattgttttttatattgcaacagcattttcaacaggtgtatcagaaaaaatagcgaatatgatcgggttaggttatgttaatcaatgttatcacgaaaaggatctggtgaaatactccatacctgaaaggttagttataatacagaaagacaaaagcaagataaaactattcattattgctgatgtagacggaaagatatacatatctaaagataaaaatcatcgtgcagagtttatgttcatagccaaagaactaagtgaagtaagttgtgattaa

SEQ ID NO: 7033 - DNA, 138 bp, Photorhabdus luminescens
atggggagtggtttacagcccaatgggctgattgagttgccccaagtgtgggggtatgtattctgcccaatgggtagttcccttaaagggaaaacaaagggccgtatggcccttttgcttgtgtatttgtctaattaa

SEQ ID NO: 7034 - DNA, 321 bp, Photorhabdus luminescens
ctgatgagtaaacagggagatattaaaagcagaaaaccacgaatagaaaaaacaattaaacaaaaaatagcttcggcacagatgcatctgaatcgacttaagagcaaagaaaaatctctgaccaagagtgctgaaacacgtctgaagattattttaggggcagaagtggctaaagctgttggctgtaaagtagaagatgtcgataaggagtttgtattgggaatgttattacaggcttcgaatattaatgtggaggctaaagcaagaattaagttacgaggaaaaagatttcctgaggatatggtgggaaggcaggaataa

SEQ ID NO: 7035 - DNA, 390 bp, Photorhabdus luminescens
atgacatataaatacattaacttcatggggctggatttcaataagatagcggagatgaaaaaatcgttcactggatttgaaaaacgaatacaaatcaacaatgatgactttgacgatgagctattctatttttgttgctttatggattactttcttgaacgccatgacagcgtatctttccctgcttattataaattttgcgtgtctctggatgcttacctgtattcactcatgtatctcggagaaaacatctcaatgatgaacttaatcggtttctttcccggcaaactgttctggcataccgttgataatggaaatgatgatgttttttgtatacttctttcattttacatgaatgaatggaaaaaagggaagaattctgatgagtaa

SEQ ID NO: 7036 - DNA, 201 bp, Photorhabdus luminescens
ttgccctcgcgggcgctctcagagacccaatataactacgctacctctgccgttcgtccgattcctaccctattaatttcacagacattaaaactagcgttattatttaagcatagaaaaactttttacattgtcgttatttttagcttctttaggagatataaaaataaagcaatgcccacctatacactcacttcgtga

SEQ ID NO: 7037 - DNA, 1515 bp, Photorhabdus luminescens
atggctatttttcatcttgattttaaaattgtgaaacgctctgaaggcaagtcttccgttgctaaagctgcctatcatgcccgttgcagaatcacagatgaaagaacaggtgatacctatgattatagccgccgtactgatttatgcgggcatttcatattagcccccgttaatgctcctcaacatatcgtaaaggactccacggcattgtggaatgaagttgaaagagttgaacgtcaaaataacggacaaacagctcgttatttcgatgttgctattcctaccgagttaaacaatgatgataagaaaaaacttgtccttgagtattgtcagaaaaatttcgttgataaaagcatgattgctgatatcgctttccatgatcttgatagtgataacccccacgctcacgttatgttgacattaaaaaccattggcccggaaggttttggtaaaaaagaaagaagctggaacgacagaaaaatgtctgtgttgtggcgtgaatcatgggcatcgatggcgaacagcttccttgctgctgctggttcatcagaacgtattgatcatcgttcccttcaggcccagcacgaggaagcattggaaaaagcagcagtagctttagataatgaagaaaaagcgctgtggcttgctaaatccgccgaaacaaaccgcccttctatgaagcgtatccacagtgctaaatggcgtagtaaagcagctcaggaacaaagagccgcagaacaggctgttcgtgatgctgccaagcaagaagccgttgaagtctacaaaacattcagtgaacttgatcttgaaatcgtcgttgacgtcagaagctttactgtagctgttcttgctgaaccagaagaaattgtattacctgaatcccgtacctgttcattgaacgctgaagaactgaaacctgttctggtcgctccggctcctcatacaagagccagaggtgttaaatcttaccgtgataaaacaaaaatcagtaaggtcgttgctgctaagaagccatatgtaagtatttctgactctggaacaaatactcttctgaaaacaacctcttctaaaaccccaaaaaggccatccagaatcgcccctgaacatgttaaaaggatacaggctactccacgtcaggataatatctttaaacgcttcactgctcttttagttgattttatcagagataaatttatatgggctaaaacgaacaaaactaaagttgatattatcagtgaagaacatgataaacgtattgctgaaaactatgtctttgatgaggtattaggccgtcgtgtttcacgtagtgaatatgagaaacaagctaagtttaaccacgatgactataagccaacaccggatgagatcagccgtttcccaagtcgtattaatagcgttaaatccgttagtgattacgataatgggacgtcaccttcattaccactcgaactaattaagggggtaaactttcttaaactcaagccatcaagctctaatatcattaagaacaaatga

SEQ ID NO: 7038 - DNA, 1875 bp, Photorhabdus luminescens
atggaacttaataaacatataattgacaatctaaattattatttaaatacaagtgctccagagtatgctttcatgattactggcgggtggggagcgggaaaaacccattttatagaaagttttataaaggaatataatgaaaacgccgttgataatcagtctggaaataaaataataaaaataagtttattcggatttaaaaccacatccagtattgatgaaatgatttttcaatcattacacccactattaggccacagatatactaagttagctggtaatattctaaagggagcattaaaactcggttgtaagatagatataaacggcgatagcaaaccagatatagatattaatgcaagtttagataaaataaaattcagcgacatattctctactaatacggatagcggagagatcatcatagctttagatgatcttgagcgtactgatatcccgttaaaggaaattctgggatatgttaattaccttgtcgaaatttcaaaggttaaagtcattctcatagctaacgaaaaaattctatatgaaaaggataaatcacacgaggataaaactaaggatgtttattcaaaatttaaagaaaaagttatcggtaagacatttcaaatcaagcataatattgatagggttttgaaaggtttccttgatcaatcaaaatgtgagtcattaaaaagacatagagatgtcattaaaaatatttatatacgctcagaggatacaaatctcagaaaactcaagcaaagtattttagattttggatacattgcaaattatatcgatgaagaacaactcaaaaatgaagagtattcatcgctgttgattcgtgttttctttgctttatcattagaaatgaaaagtggtgagctaagcgaggaaaaattaagacataatgagccattccaatgtgaaaaagccaatagcgatggttctaagaatgtatttcataaatatgacattagttatagaaacttgtataccggtgatttatgggctgatattttgttcaaaggtgatgcaagtaatttaaagtcagccactgatgaacttgtatattttaaacaaccaaaaaacaatgagcatcccctctggttcaaattatggaattttaacacacttaatgaggagcagtttatctctcttaccaatcagcttcttttggagttcgactctcttcaggaggaagagcatcaggtttacttacataaattagccttaattatttacttctcaaaaaacgctctaattagtaaggaaatcgatgaaataaatgatacagtttataaatacattaaaacctataaagatcactgggctattttggacaatcactctattgaagatatagtatttggaaacaatactggctatagctactacaatgattcagatgaagactttagaaaactatttaatttactcaagtctgaacgtaaatctatctctgacaaattaaaataccaagcagaaatcatcagagcaaatgaaatatttacataccttgcgcaaggaaacaaggatgagctgatcaatattttatatactgaaaatcagtttaagccatttttcaataaattaaatgctaaagacttagtaaaatgcttattacaatcaagcaatcatataacatcttacttcacttatatcataaaagaacgttatacatcaggagatacacttaacggtctaaaagcatgtaactatctgaaagttgaagaggggttttggattgagttacaaaataaaatctcgaaagaaatacctcgaatgccgcccctaaaaaaacatttcatggaacagcttgatacaaccattaaggagataataacaatcctatcttcagtgccaaatgtgtaa

SEQ ID NO: 7039 - DNA, 174 bp, Photorhabdus luminescens
atgcacacctcgctggctttctcgcaggcagaaaggacacttgatggtattgttttccatgatagccccttagttcgctttccaaccattgctggttttaacaagattcatggcaccatcagcaggttcattcatccctttcacaccagagaacgcgcttttgtccacccatga

SEQ ID NO: 7040 - DNA, 348 bp, Photorhabdus luminescens
cagaacgacttgtacgtaatgatagtgctgctggcctttattgcggtacgaatacaccagctgcgttttatgggtctgaacaaagaagaggcagagaaagagagctgtgagacagtattaagccccctggcgtggaaattactgtggtcaaaacaagaaaaacgccgtgtgccgaaaaaagccccgagtttgcattgggccttcatcaatctgggaaaactggccggctggtacgattccaaacgcacgggtcgagtcggatgggaacgactttgggaaggctggtttcggctgcaaaccctgatagacggctatttgctggctaaatcaattgatttggagatctga

SEQ ID NO: 7041 - DNA, 969 bp, Photorhabdus luminescens; identical to SEQ ID NO: 6582

SEQ ID NO: 7042 - DNA, 312 bp, Photorhabdus luminescens
atgaataaagaacttaagaccgaatcgaatagatgttttttccatttgatgacgatattttatgatctaagaatgcgcactgccatgaacgagcgtcctgatgagattgaagcactatgtaatgatgaagctttcatgggagttgtttttaaagaatgtatcaaaaaagctaaatcacatttaccattggtcgagcggcatcaccccggcgctgaaggtgtatcagtaaaactggttgatcttgcttatgtgatggaaaggctgaaagcatatcatcaggataaaggttttatgaaagagtctcaaaagtag

SEQ ID NO: 7043 - DNA, 330 bp, Photorhabdus luminescens
atgaatatgaatatgaataatacaataactgaaactcatgtgataacagtcaccaatgaatcaaccagactgtttattgttaaagcatttgaaggttatgagctttatatcaataatatgcaggaatacatggggagccgattctttaaaaatattgcggacatgaaatatatggatgatgtttttgataaagtaatagaaaacagtaaggagggatttagtcagttcctgaaaaaaaacaaaagcgcaggatctctaaaagaggtgtttttcgatgaggtcaaagtcaatctgaggtttatgcataatgtgatgttaaactcagactaa

SEQ ID NO: 7044 - DNA, 849 bp, Photorhabdus luminescens
atgactactcaaaaggaaatggacgatatcaggacagccttatcttggtttgatgtacgccgatatgatgccctgaaagatcttactttagagcaaatctatgctgaacttgaaagacggatgtttgcttacaaaacaaggcagcaatgggatacagcaggcaaaaataatcaaatgcaagctatataccatgaggcaacaatccgatgcggtgatgtgatacttgaatcgaaatggatttcagataatcagagactctcacatagctatgctgtcagaccaatgaccagaggtgcattgtttaactatggacgggcgatgtatcgactggagacttctgagcaaacagatcctgttgcagtgagttctgactacatctctgagtatctgaaacaaggaggcatgaaccctactaacaagatgctgatcgaaattgacttggaacaagccagcagtgacgatctcgcagaacacctgaaagtgctgattgctctatggcaaaagcaccttaaaacggcaaaaccacctaaacgatcttttcgttttggtcataagacctttcaaagaatacttgattacaaagtcatccctttaatggatttgatctcatgggaacagacctacaacgaaggtaagaacataccgttcaacattttagctgacatcctgcatggtactggcggggttcggagccgtgatcacatcaaagatactgattatgattacgcgaaaagctatctcgataaggatgagtatttcaaggttttgaatgatttctatataaaaaacatcctgttaaaggactggaagatcactgaagtcataaaaatcaacgataaagccccctga

SEQ ID NO: 7045 - DNA, 885 bp, Photorhabdus luminescens
atggacaacttagttgaaattttctgtgatgtcgatgatttttgccgttttttcatccctcaatgggaacaattttgtctcgatagcgggcatcgtttacgccgccgacaaggtcatatgtatcccagtgaaatcatgaccattttgatcctttttcatatgtcgcattaccgtgattttaaacatttttatctagaacatatttggaaatatcaccataaggattttccaaccttgcttagctatcctcgttttgtcagtgtggctccttccgttttggtgccattatgcagctatctgactcaattaaaagggaaacccacaggcattgcttttattgattccacccgtttgagtgtctgccataacattcgcatccctcgacataaggtctttgcggggatagcaaagcgcggaaaaaattcaatgggctggttttacggtttcaaattacacctggttgtcaatcatcagggtgaaattctcgcgcttaaagtgactccgggtaatgtggatgatcgggaacctgttcgtgaattatcaaaagaattaacgggttctctttacggtgacaaaggttacctcagccaggaattggcggacgatttagctaaaaccgatgtcactttcatcacgaaaaaacggcgtaacatgaaagcgagtatgcaagctgagtgggataagataatgttaaaaaagcgttttatcattgaaacgattaatgggcaattaaaaactctttctcaaatagagcattcccgccaccgaagtataaaaggctttctgttgtgcgttttaggtggattgattgcttactgccttaaattgaagaagccatcactgaaagttttctactcagaagacgatttttcaatgacggattaa

SEQ ID NO: 7046 - DNA, 1053 bp, Photorhabdus luminescens
atgaccactgaatcatacacaataaaaatccgccgccctgatgactggcacatccattttcgtgatggtgaaatgctaagaactgtcgttccctacaccagtcattactttggccgagctatcgtcatgcctaatctgcttacgccgattacagaagtggtcagtgccaaggcttatagaggcagaatactggcagctattcccgaaggagataatttccagcctcttatgacttgttatcttactgacacgactgaaagctctcagatagaaattggttataaagaaggcatttttaccgcttgcaagctctaccctgccaatgccacaaccaattcaagtcacggcgtctctgatataaagaatatttatccactattagccgtgatggaaaaactggggatgcctctgctcgtccacggtgaggttactgcttctcatattgatattttcgatcgagaagcccgttttattgaacaagtcatggaaccactacgtaatcaattcccagcactgaaagttgtgtttgaacacataactaccaaagaagccgcacaatatgtgctggaaggcaataacaatctggcagcaacattaactccacagcatctcatgttcaatcgcaaccatatgctagttggtgggattcggccacacctatactgtctgcctgtgctaaaacgcaatgtgcatcaagaggctttacgggcagccgtcgccagtggctgtgatcgcttctttctaggtacagactcagcaccacatgcacaacaaaagaaagaatcctcttgtggttgtgccggcgtctttaacgcaccatcagcgctacctgcttatgcaacagtgtttgaggagatgaatgcattaccgcattttgaagctttctgttcacttaatggccctaaattttacgggctacctgtcaatgaaggctttattgaactaactcgcaaaccttctaccgtcattgaacacattgattgcaataatgaaaaacttattccatttttggctggcgaagatgcccgctgggatgtgaaagtaacagactga

SEQ ID NO: 7047 - DNA, 255 bp, Photorhabdus luminescens
atgggcagtaaagatgaagttattcaaacgcatcctgttgtaggctgggatgtcagtaccgtcgatacatatgatgcagtgatgctacgccttcactatttgtcctcccaagatcaaacaccagaacatgtcatggtagatcgaaccttatggttgacaactgacattgcaaagcaattgatatacatcctccaggcaggaattgaaaagatcgaatcttcagaatacagcgatctaaaccatacaaaacattaa

SEQ ID NO: 7048 - DNA, 603 bp, Photorhabdus luminescens
atgaaaatcttaattgttgaagagtgctattatacccgttcaggtatcagagagtttttaaagaaaaatgataatgtcgaagatcttgaaattgttgactcaccttcaattaatgaggcgataaatattgtaactcattttgctcctgatatcgttttagctaacttgacacattattgtcatcatgccagttactgttccgatttacagaaatttataactcttacagataacactcgtatttatatataccttaatagcgcctatccttattgtgacaattatattacattgaaagataatgctgttattctggcaaagagaaatcttacctatctgcttaataaaattagcaaaaccacattgcaagaaattcagagacacagagcaacaatcgaccagtattgctctattttcagccctcaagagcataaagttatcgattactggatgaaagaaatccctaattaccagatatcccaaaagttaaaaatcagtaatagcacagtctattctcataaaagacacattactgaaaaaatcaatgtgcgtaatagaattgaactctgctttatttacaatgtatttaaatatctctattaa

SEQ ID NO: 7049 - DNA, 1059 bp, Photorhabdus luminescens
atgccagtgttacacaaccgcatttctaataaagagctgaaagcacgtatgttggcggagacccaacctcgtacgaccatctctttttacaaatattttaacatcttaaatcctctggattttcgtaacagcttgtatcaacaatttaccgacctctcagtatttggccgggtttatattgctaaagaggggattaatgctcagataagtttaccaactcataatttggaagcattcaaggcgttattgtatagcgttgatcctgcattggataatttgaggctgaatattgcgcttgatgatgatgggaaatctttctgggttttgcgtatgaaagtacgtgatcgtgtagtggctgatgggattgatgatgaaacttttgatccatcaaaaaccggcgagtaccttaaagcagagcaggtcaaccagatgctggataatcctgatacgctatttgtcgatatgcgcaatcactatgaatatgaagttgggcattttgaaaatgcaattgaagttccttctgatacattccgtgaacagttgccaatggttgcggaaatgttgcaggataataaggataaaaatattgtaatgtactgcactggtggtattcgctgtgaaaaagccagtgcttatatgctgcacaatggctttaaaaacgtctatcacgtagagggcggtattatcgaatatgctcgtaaagcgagagaacagggattaccggtacgttttgttggtaaaaactttgtctttgatgagcggatgggagagcgtatttcagacgatgtgattgctcattgccatcaatgtggcgtgtcttgcgacagtcatactaattgtaaaaatgaaggttgccacttgctatttattcagtgtccagagtgtgcaactaaatttgaaggctgttgtagtgaaatgtgcagagaagaagtcaggttaccggaaaccgagcagcgtgctcgccgtgctggtcgtgaaaatggagcaaaaatatttaataaatcccggcaccgtctacaggatgggttgaacagtacttcactacagtctgttgaataa

SEQ ID NO: 7050 - DNA, 261 bp, Photorhabdus luminescens
atgcatgtaattatgcatgtaattatgcatgtagaagttacgatcgataaatctaaaaaactgccaaaaggtgctgtccctgcgcttgctgtagaactagataaccgtcttaaacgtcgctggcctgatattaaaaccaatgtgaagttggcaagtcatgatgggctgtctgttcgtggtggcactcctgatgacaggaaagctgttgaagagattctacaagagacatgggaaagcgctgatgattggttccagccttga

SEQ ID NO: 7051 - DNA, 942 bp, Photorhabdus luminescens
atgatacaagcgccttcttttcaacgttcactactgcatccccgttattggcctacttggtttggtatcagtctgctttacttactggtgctgctcccctatcccattatttaccggataggcactcgtctgggccgattttctatgcactttctgaaaaaacgtgccaaagttgccgaaagaaatcttgagctatgttttcctgatatgccacaagaggagcgcaacgcgctattaataaaaaactttgaatccgtcggaatgggaatatttgaaacgggcatggcttggttttggcctgactggcggatagaacgctggtttaaagtgactgggcaagaaaacattcagaaaattcaaactactgggcaaggaattattgttattggtatccatttcctgacactggaactcggtgcccgcattctcggtttgctcaatcctggcattggcgtctaccgaccaaatgataatccagttatggattggctacaaacatggggacgactgcgctccaacaaatatatgctggatagaaaagatgtcaaaggcatgatccgctgtctgaaaaatggcgaaattgtctggtacgcccccgatcatgattacggcccacgaaaaagtgtatttgcaccactatttgctgtagaacacgctgcaaccaccaccggcacgtcgatacttgtgcgcctcgctgatccggcaatgatcccctttactccccgtcgtctgcctgatggaaagggttatgaactgattattcaaccaacagtggcaggatttccaaaagatgatgaagtgaaagcggctgctttcatgaatagagttgtcgaacaggaaattttacaggcacctgatcaatatatgtggttgcatcgtcgctttaaaacccggcctaaggggatgccttctctctacgggcaagctgataaaatccattaa

SEQ ID NO: 7052 - DNA, 1539 bp, Photorhabdus luminescens
atgcaatcctccattaacaatacgaaaaccagaactttctttggacatccttatccattaagttctttgttcttcacagaaatgtgggaacgtttctcttactacggcattcgtccactgctgatcttattcatggctgcaaccatctatgatggtggtatgggtattcctcgtgaacaggccgctgccattgtcggtatctttgcaggtagtgtgtatctgaccgcactacccggtggttggctggcggataactggttaggccaacgtcaagcagtctggtatggctcaatcattattgcactagggcacttgtctatcgctctttccgctttcttcagtcattatttgttctttattggcttattactgatcgtattaggtacaggactgtttaaaacctgtgtcaccgtgatggtcggaactctgtataaaaaagatgatccacgtcgtgatggtggtttttccctattttatatgggaattaatatcggttccttcattgctcctctgactacaggcttgctggttcgtgactatggctggcactggggttttggtatcggagggttggggatgctagttgccctattgatattccgtttctacacgatccctttgatgcgtcagtatgataaagaaggtggtttggattcaagctgggaccaccctacagtgaagcgtgaaaacgtcggcaaatgggtctttaccactgttatcgctatcattgctattattgctctgctaatccttggtgtaattccattcaatccggtagccgtagccagcgcaatggtctatgtgatctcatcctgtgtaacactttactttgcctatttgttcctgtttgccggcttaagcagtagtgaccgttcgcgcctgctggtctgttttatcctgctggtatctgctgcattcttctggtctgcatacgagcaaacaccaacgtcattcaacctgttcgccaatgattatactaaccgtatagtgatggggtttgagatcccgacagtatggttccagtcaattaatgcactgtttattatcctgctggcccccgtattcagttggttctggcccagattagcaaaaaacaacatcaacccgagcagcattagtaaattcattattggtattctgttcgctgccggtggttttggcgtgatgattctggctgcgcaaaatgtgctggcaaccggtgaaaccgtttctcctttctggctgatatcaagttctctgtttctgacactcggtgagctgtgccttagccccattgggctcgcaacgatgacaatactggccccatctcgaatgcgcggtcaggtcatgggcttgtggttttgtgcaagtgctttgggcaatctagctgctggcttaattggtggacatgtgcgcgctgaccaactggacaacctacctgatctgttctcccgtgtatctttggcactggttatttgtgcagccgtattaatggtattaattgtccctattcgccgcctgcttaacagtgctgataaatcagaagcgaaagctcaataa

SEQ ID NO: 7053 - DNA, 327 bp, Photorhabdus luminescens
atgatgaggaatacaaaacgtcgccctgcaacagtgggtgaaatattggtgagtgagtttctggtgcctttgaatatcgaaattaatgtgcttgcggaagctatgggtgttcaccgcaatacattaagtagaattgtgcatgataaaggttcgctaaccgttcctatggcgatcaaattggcagcggctttgggcaatacagcggagttttggcttaatattcaacattcagttgaactgtgggatgtgcgtaatcatgcctatcaagcggaatcactgaatgtaaaacagatagttaagctatcagttacagcggcaatgcactaa

SEQ ID NO: 7054 - DNA, 708 bp, Photorhabdus luminescens
atggctgttcaattaccttcattacatttacgccggtattctgccgaaactattagccatagccaccaagggttatggcagttcgtttttggctataacgggcaacttgagttaaacgtagaaggacaacaacgtaccgttagttttggaaatgttgtgatgatcccaccggatgcgaaacacagctttttcgctagtggtgaaaatcagcaattggtgctggagttgccttcggcactgtttaatccattacatagtgatgctttctggcaaccattacctgattctgtgcttgctcttattaagtggttacatgattacccgcaaccaccggctaatcacgctgatgctgcccgtttgctgctcgctcagctaccacaagtaggttcatcttcagcgttgatagttaaactacatcgggggcttgttgggcgtctgcatgagaaagtgacggtgatggatatggctaatatttgcgcagtatctgccagtaccttgcatcgtaaactttttaatgcaacagggatgagtccaatggcttatttaaaaacgtgccggatggaatttgcctataatttgttggcttacagtgataggactttggctgacattgcttttctgtctggttatgcctcccagtcagcttttacttttgcatttagtcaacattatggttgtactccagccaggttgcgtaaaggcaaatga

SEQ ID NO: 7055 - DNA, 336 bp, Photorhabdus luminescens
atggaaaagatcgaatggactgactttgagaaagtcgacatgcgggttggcacaattatttcagtagaattgaatcctcaagccagcaaacctgcctataaattacaaattgatcttggcgaattgggcgttaaaagctcaagtgcccagataacggtgcattatacacctgaacaattaattggccgtcaggttctttgtgtgtgcaattttccaccaaagcggattgctggtgtcaaatcggaagtattgctgaccggcagtgtggatgaaaatggtgcggtggtgatcgcagaatttactcttcctgtcccaaatggtcataagttattgtaa

SEQ ID NO: 7056 - DNA, 360 bp, Photorhabdus luminescens
atgatgagtaaaggatcgcgttacatttttgtcattttatctgcaatttctttccaggcatttgcctcaaattttgactacaaaagtgatattcctgctgataataagccatctgcggactatttgaagaaacgggaaaatcttcaacctaagcattgggatgtggataaactcattacggataataatgcggtggagaagcgggaactggcaagacaggtgaaagaagatgaacttaatcggaagagccgagagtttaatgatcgtgtcaatgagaaaatccgtcaggatcttgagcgtactgcgcgtattaaagagaataacggtatgaccagaagtaacttttttgatcgggaataa

SEQ ID NO: 7057 - DNA, 834 bp, Photorhabdus luminescens
atgtctgtcgcatcgaatctaaatgaatttcaagaacaagtccgttcacgttatagtgggttgagtaaacgcctgcaacaagtagctcgatatgtgctggataataccaatagtgtcgcttttgatactgttgcggtgattgccagagaagctgatgttcctccatcaacattaattcgttttgctaatgcgtttgatttcagtggttttaatgaaatgaaacagctatttcgtatgcatatggtggaagaaaccgccagttatgcagaccgggccagattatttagagaactggatggcgaacaggaaccgcctgaagaccctcagcatattttgcaggaatttgctcgttcaaatgtgcaggctatgcaacagttagctgccagaacagcccctgaagatttaaggaacgcggtagacttattggctcaagctaagaatatttacattattgggctgcgtcgttcttttagtgtggcggcttatctttcttatgcattgaatcatctggaatgtcgtcctttactcgtggatggtttggggggaatgttcagggaacagattaatttaattggggaagaagatgttgttgtttcaatcagttttaccccttatgcagaagagacgctgatggtcagtgaacgggcggcaaaagccggggcaaaacagattgtgattacagatagccagattagcccgcttgccagctttagtgatgtttgttttgtggttaaagaagcacaggtggaggcattccgttctcagtctgctactttgtgtttagtgcaatctttggctgtttctctggcttatcggcaaggaaacacgatttaa

SEQ ID NO: 7058 - DNA, 1512 bp, Photorhabdus luminescens
atggaacaggtacagaattatgttaatgggcaacttattcccagttatagcacccgtttttcgccggttttcaatccagcaacaggaaaacagatacgtcaggtagcactaagcacagcccatgaagttgaacaggcaattgaaatcgctcatcaagcttacagagaatggtctaaaatatcaccactgaaacgtgctcgtgtcatgttccagttcaaaacattactggaagctaatatagacaaactggcacgattgatttcagaagaacacggaaaaatctattcagatgctatcggtgaattaactcgtggtctggaagtcgttgagtttgcctgtggcatccctcatctacaaaaaggtgaacattccgcgaataccgggacaggagtggacagccattcattaatgcagcctttaggcgtttgtgttggcattacccctttcaacttcccggcaatggttcctatgtggatgtttcctatcgcattagcgacagggaatactttcgtattgaaaccttcagaaaaagatccctctctcgcgcttgaattagcatcactacttaaacaatccggtttacccaatggcgtatttaatgttatcaacggcgataaagaagccgtcgatatactactaacagatccacacgtgcaagctgtcagctttgtgggttcaacgcctgtcgctgaatatatctacactaccgcctcagctcacgggaaacgctgtcaggcgttgggaggcgcaaaaaatcactgtattctgatgccagatgccgatctcgatatggctagcagtgctattgcaggtgcagcatttggtgcagcaggtgaacgttgcatggcactgtctgttgtattagcgattggggatgaaacggcagatgcattaattgaaaaattacgtcaacagatcaacaaaatatctgtcggtcccggtattgtcgcaactacagaaaacgatatgggtcccgttatctccgcccaacaccaagctaaaatctgtgattacatcgatagtggcgaaaaacagggggccagcttgttaattgatggccgtcaactcaaggttcccggttatgaaaatggctattttattggcccgacgctgttcgataatgtcacgccggagatgaaaatctatcaagaagagatcttcggtcctgttctgtcaattgtccgtgtacccgattatgccaccgcgctaacattaattaactgccatcaatatggtaatggtaccgcgatattcacccgcgacggagaaacagctcgccagtttagcgaagatgtacaagcgggtatggtaggcatcaatattcccattccggtaccaatggccttccacagcttcgggggctggaaacgctcaatttttggcccacttaacgttcacggtaatgatggcgttcgcttctacacccgcatgaaaactgttaccagccgctggccagcaagtatcaggctagaacatcattccagcaattttgtgatgccaacaatggaataa

SEQ ID NO: 7059 - DNA, 1935 bp, Photorhabdus luminescens
atgaacaaatcaacaatgacagcagctcaagcattggtgaaattcctgaaccagcaatatgtggaagcagacggagagcaatacccattcatcagaggaatctttaccatttttggtcacggtaatgttgttggattggggcaagcactggagcaagatcctggtcacttgaccgtttaccaaggatgcaatgagcaaggtatggcccatatcgccacaggttttgctaaacagaaaaagcgcaaacagatttttgccgtaacctcctctgttggccctggctccgccaatatggtaaccgctgcggcaactgccacagctaatcgcattcctctgctgttattacccggtgatctcttcgcctgccgtcaacctgatccagtcttacaacaggttgaacagttccacgaccatactatcagcaccaatgactgtttccgccctgtttctcgttattgggatcgtatctccagaccagaacagctaatgagcgctatgattaatgcgatgcgagttctgaccgatccagccgatactggtgccgtcacaatttgcctaccacaagacgttcaaggcgagatttgggattttcctgactatttcttccaaaaacgaattcaccgcattgaacgccgtcctgcttctgtcgccatgattaacgatgcggtggcactcataaaccgcaagaaaaaacctttacttatctgtggtggtggagtgcgctattcagaagctcataacgcttttcgtcagttcgcagaacacttcaatattccttttgctgaaacacaagcaggtaaaagcaccgtaattgccgaccatccccttaattgtggtggcttaggcacaacaggctgtcttgcggccaacctgatcgccaaagaggccgatttgattattggcgttggcacccggtttactgatttcaccactgcatccaaatcgctatttcagcacccagaagttgaatttctcactatcaatgtagcggaattcgacgcctgcaaactggatgcaatacccgttgtatcagacgcccaagcagggttaaacgctattgcagaacaacttattaaattgaattatcgcagtggttatcaagatgagattcatcaggcacgggaaacatggagaaaagagttaaatcgtctgttcaacattgagtatcaggcagatttcacaccagaaattcccggtcatctcgatgataaattggaagagtacagccaaacattacaaacccgcctgacacaaactagcgtattgggattattagacaaatatcttgagcccgaagcgattattgttggcgcatcaggttccctccctggcgatttacagcgattatggcaacccaaacaaccggatacctatcatcttgagtatggctattcctgtatgggctatgaaatagccgctgctattggcgctaaactagcctgccccaaccaaccggtttatgccatagtcggtgatggcgcttatatgatgcttcattcagagctgcaaaccgcagtacaggaaaatatcaaaatcaccgtgttgctatttgataacgcgggatttggctgcatcaataatctgcaaatgagccaagggatgggcagtttcggaacagaaaatcgttatcgtaacccagaaagcggcaacatggatggcaaactgattaaagtcgacttcgccaaaaatgcagaaagctacggctgcaaaagttaccgagtccacgatgagcaacaactgctttgtgcgttacaggaagcccaaaaacagacggtaccagtactcatagatatcaaagtgttacctaaaacaatgacgcatgattatgaatcatgctggcgagtaggcacagcacaagtagcagaaaacccagcgatagaatctgccgcaaaaaaaataaaggagatggttgcaaccaaagtgcgtcagtactag

SEQ ID NO: 7060 - DNA, 987 bp, Photorhabdus luminescens
atgttcaacattgcattatttggcgctggacgaattgggcaagtacacgcagcaaatatctctcatcataaagaaacttctctttattcggttgtcgatccccatcagaaaagtgctgaacttttagtacagcaataccaaacaaaaagacaaactattgaacaggcaatgtctgaccctcaaatagatggtgttcttattgcctcagcaacagatactcatgcagacctgatcgaactcgcagcaaaacatcataaaaaaatcttctgtgaaaaaccggttcatcttgatattgaacgtgttcgtcagtgccttgcaacgattaaacagtatcaggttcccttatttgttggctttaaccgccgttatgatccgcaattccgccgagtaaaaaccctgtttgacgccggcgcgataggaaaagccgaatctctgctgattatttcccgtgatccctctcctccttctgctgaatatgtcaaaggttctggtggtatgttccgggatatgacaatacatgacttcgatatggcacgtttcattattggtgaggaaccctgctcgatctacgcccaaggcagtaatctggttgatccagcaattgggcaagcgggtgatattgacaccgcctttatcgttatgaaattcccatcaggggcaatggcaaccattaccaatagccgtcgctccgggtacggctatgaccaacggattgaattgcatggtgaaaaagggctgcttagcgccggcaacatcaaagaaaacagcgttgaactctgggaaaacagcggttgtttaacagccaagccagagcatttcttcctgcaacgttaccgggaagcctacattgctgaatgggaccattttgtcgatgtcatggcgggtcgtgccacaccagaatgtaatggcactgatggcgaacaggcactttatctggctgataaagctctcgaatccttacattcaggtaaagaaatcagattataa

SEQ ID NO: 7061 - DNA, 1716 bp, Photorhabdus luminescens
ttggaggatagtatgttagcttttctctcatttattggttttaccttattagtggctggcttcgcttattacaaaacccataatgctcgtctgacagaatccactgaaggctattttcttggcggacgatctctcacaggtgtttatattggtagctctatgttattgatgaacctgtccacagagcatttaatcggtttaaatggattagcattccgaactggctttatcgttatggcttgggaagtgatagccgcggtgacaatcgttctattcgctatctatttcctgcctaaatatctgaaactcggtatttcaaccatcccggaatatcttgaacgccgatttgataaaaatacgctgcttattacctcaattcttttcctggctatgtatatcatttcactactccccattgtgctgtataccggcgcgattgcattggaaagtctatttcaggtttccaatgtattcaggattgataaaactacggcattatggattatggtttggggcgttggtggattaggtgcggtctatgccatctttggcggtattaaagccattgccgccgcggataccattaacggcattggcttaatcgttggtgggttaatggtaaccatttttgctctgctctatgtcggcaatggcaatgcctggcaaggattagttgaagtttatcaatctaatcctgataaatttaactccatcggtagtgaagattctctggttcctttctctacattatttaccggcttaattgtttccaatatgtttttttggtgtaccaatcaatccattgttcagaaggctcttggtgcaaaaaatctcgccgaaggacaaaaaggcgtcatgttgtgtgctttacttaaactcatcatgccgtctattattattttgccaggcattattgctttccatattttcaaaggacaaatagataatccagataacgcttatccagaattagtccatttaattctaccggaaatattggttggtttcttcgccgcggtggtggtcggtgcggtattttccacattcagcggcggacttaattcatctgtaacactgtttatcgtcaatatttacaaaccgcgaatcaaccaaaatgccaccgaaactcaaacagtcgctatgagtaaatatctagggatcgggctagcgttaatcactatgatcgtcgcaccattagtcgctaatgcaccggatggtctgttctatctcattcaacaattacaaggaatttttaacgcgccaattctcagcgtggtattagttggtctgatgaccaaacgagtgccgcctattgccgctaaacttggcctattattcgggatgtctgcctatattatctgtaattttattttaaaaattgacctgcacttttttcatctggttggcattttatttgttctcaatgttattttcatgttggctattggctacttttttccagctaaaccatttgcagatgtttataccgaacaggtaaatattacaccttggtctatggtgaaacccgttgcatggttaattacactatgttcaatctctatatacgtatttcttgcacataacgttcccaaagtaatcatgattatttattacctttctgctgcattaatactatcttatgcgctataccagataggtaaaacgctattcagcaagcttgcaataaatagtacaccaaaaagaacaggtagataa

SEQ ID NO: 7062 - DNA, 1134 bp, Photorhabdus luminescens
atggaagagattcgtatcggcctaatcggtactggttacatcggacggacgcatgccattgcttacgcacaagcgccgactgttttccctctggcaggcaaactagtttgtgaaatggtagcggaagtttctgctgaactcgccgcaaaacggtctgagcaattaggtttccggcgttttactgataattggcgcaaattagtatcagatcccgatattcatgttgttgatatctgctcaccaaatttccttcataaagagatggctctcgaagcgatcaaacatggcaagcatgtttattgtgaaaaaccactggcactaaactcacatgatgcaaaattaatggtcgaagccgccaaaaaagccagagtgaaaacattagtcggttttaactatatgaaaaaccctaccgcacaactggctaaagagatcatttcgaatggtgaaataggtgaggttattcacttctacggcactcataacgaagattatatggccgatccattcactcctatccactggcactgtttcaaagataaagctggattaggtgcattaggcgatcttgctgctcatatcatcaatatggcgcagtacctggttggggatatccaaactgtttgcgcagacatgaccactgttatcaaacaacgcccggaaaaaaccggctctagcattatggttgcggtagaaaacgaagatcaagcacatgctatggtacgtttcaacagcggagcaaggggtattattgaaacctcccgtattgcttgcggtcgcaaaatgggtttgagctacaccattacaggaacaaaaggtgctttgagctttacacaagaaagaatggccgaactaaaactttaccgtcacgatgaaccagcaaaccgccaaggctttaaaactattcttattggaccagaacatcctgactatgcgccattctgtctcggtgcaggtcacggcatcggcttcaatgatcaaaaaacagtggaaatcagagacttgatcaatggcatcgccagcaataaagcgatatggccagatttcaccgaaggttggaaagtctcacgtattctggatgccattgctcattcttatcaagagcaacgttgggtgaatgtcactgaaattaattaa

SEQ ID NO: 7063 - DNA, 1905 bp, Photorhabdus luminescens
atggagcagcaaaaaaaatttgatgtcatctgcatgggacgaatcgccgttgacctttacggccaacaaatcggagcacgtctggaagacatgggaagttttgcaaaatatcttgggggttcttccggtaatgtcgcctatggtaccgctcgtcaggggcttaaatcctccatgctagccagagtcggtgatgagcatatgggacgtttccttagggaagagttgcaaagtgttggctgtgataccagccatctaaccacggataaagaacgccttacggcactggtgctgctaggaatcaaagataaaaccacttttcccctgatcttctatcgtgataactgcgccgatatggcaattaccggtgatgatttcagtgaagaatacattgcatccgctcgttgtctggctatcaccggaacacatctttctcatcctaacactcgcgatgcggtgctgacggccctcaactacgcccgccgtaaccgtgtgaaaacggtcatggatattgattatcgcccggtactttgggggttaacttctttgggagatggtgaaacacgttatatcacatcggaacaggtaacagctcagctacaggaagtattatcgctatttgacctcattgttggcacagaagaagagttccatattgctggtggttccacagatactatcgaagcactacgcaacattcgtaaactcacatctgctgcattggtttgcaaacggggatcactgggatgctctatttttaccgctgaaatccctaatgatctgaatgacagcatcactatacagggcgtttctgtcgatgtgcttaacgttctcggcgccggggatgcttttatgtccggcctgctacgcggctatctaaataacgaaggttgggaaaaagcctgtacttacgctaatgcctgtggcgcattagttgtttctcgtcatggctgcgcaccggcaatgccagataaaacagagcttgataactatctatcacgcgccaatcaaatactacgccctgatttggatgaaacacttaatcaccttcaccgtatcagcgcccgtaaaaatcaatgggacgaactgtgcgtcatggcatttgatcatcgtattcaatttatcgaattagcccgacaagcaaatgccagtatcaaacgtatttcatcattaaaacaacttctattacgcgccagccgggaagttgccacagaagcagggttacaaggaaaaataggcctgttatgtgacagcacgtttggtcaggatgttttaaacgaaattaccggtcaaggttggtggataggccgcccaattgagctacccggctctcgcccactttgtctggaacatggcaacataggttcccaacttattgactggccactggaacacatcgtcaaatgcctggtgtttttccatccagaagatgctcacccactccgcctggagcaagagaaaaaaattcgggaaatttatgccgcatgctgtaaatctggtcacgaacttttactggaagtgattctacctgcggaaatgaaacactcagatgaattctatattcgcgcacttagacgattttataaccttggcgttaaaccggattggtggaaactcccacctctcagttctgaaagttgggacaacattaactatctcatcgagcagcgagacccctattgccgtggcgtcgttattcttggccttgatgctccacaagaagagctggaaatgggctttaatgccgcagccggcaagtctatcgtcaaaggttttgctgtcggaagaaccctatttggtcaaccatccctaaaatggctaaaaaatgagattgatgataaccgtttgatccagaaaataaaaaccaactatcacaacctgattagcctgtggcgtcagcgcggatag

SEQ ID NO: 7064 - DNA, 891 bp, Photorhabdus luminescens
atggctgttcaacttggtatcaaccctctgacctggactaatgatgatttacccactctcggcgcagatacacctctggaaacctgcttaaccgagggccgccaggcaggttttaccggttttgaattgggcaacaaattccctcgtcaggctaacgtattgggtcccatacttgccgcccacaatctcgtactggtatctggctggtactctggcgaattactcacccgttcagtagcagaagagattaaagcggtacaatctcacctgaccctgctacgcgaattgggagctaatgtcatggtatttgcggaagtgacaaactgcattcacggcgatcaaaataaaccagtccatcttcgtcctcaatttccagctaaccgctggcaagaatacggtgaaaaattgactgaatttgcccgttacacccaagaacaaggtgttcagattgcttatcaccaccatatgggaacggttattgaaactgagaaagatgttgatcatctgatggaaaataccggagatgaagttggattgttgctggataccggtcatttaacctttgccggcgctgatccattggctgttgcagaacgctgggcaaaacgcattaatcatgttcactgtaaagacatccgtcctgacgtactcaacgatataaaaaaccgtaaaaccagtttccttgatgctgtgctgaatggtgtattcacagtaccgggagatggttgtgtggattatccggcaatttttcaagtgttgaaaaaacaaaattataaaggctggctggtagttgaagcagaacaagatcctgctgttgctcacccactgacctacgccacgatgggttataacaatttacgcaaatttgccagagataccggattgttttaa

SEQ ID NO: 7065 - DNA, 828 bp, Photorhabdus luminescens
atgtccaaattattatcaaaatatcatgcaccggatcaaaacaaacgaactcaacatatcacgccggaatcagcaaactggaagtatgtccacttcgatgtttatgagttggcttcgggtgaaaaaatcaccttgcccgcatcagaaaatgaaacctgtctggttttagtggcaggcaaagccacagtgactacgccacatcaacggtttgagcatattggcgatcgcatgcagccatttgaacgcaaaaaaccttatgctgtttacatcactgcgggggaatctgttgaaattattgccgataccgctcttgaactcgcggtatgccaagcaccgggtaaaggaagctacccgactcgactgattacgccacaggatattgatgcagaacaacgtggcaatggctacaaccgacgctatgttcacaacattctaccggataacaaacctgctgatagcttgttggtggttgaagtctttaccgacgaaggctgtaccagttcctaccctagccataaacacgataccgacaatgcgccacaggaaacctatttggaagaaacctattaccatcgcctgaacccttctcaaggattctgcatgcaacgggtctataccgatgaccgttcactggatgaatcaatggctatttacaacaaggatgtggtcatggtccccaaaggctaccacccagtagcaacccttgccggttacgacaactattatctcaacgtaatggccggaccaacccgcaagtggctatttacctgggaaaaagaccatcaatgggttaatagtggagaatatgcacaaaagcataacaattga

SEQ ID NO: 7066 - DNA, 444 bp, Photorhabdus luminescens
ttgatagctggcgagatagcagcggtaagctgttcactgccgtacaggcagcttagaaatgtcgtgtttcatgtagtaatctattgcaactgttcactgccgtacaggcagcttagaaaatcaggagtacgcaagagccggacacagataagttcactgccgtacaggcagcttagaaaacctatgtgttctgccgactctttaacgtccagttcactgccgtacaggcagcttagaaaaattagcgaacaacgtaacattgttgattctggttcactgccgcacaggcagcttagaaaattacgcaagctgtcactaatgttgcgtgcccgttcactgccgtacaggcagcagcgcactcgattgagtgcgctaaaaaagcaacctattttcttctcgatatgcatcaattgttatgcttttgtgcatattctccactattaa

SEQ ID NO: 7067 - DNA, 480 bp, Photorhabdus luminescens
atgacgatggacatgagttcactgccgtacaggcagcttagaaatcgtcgatttgaacgcgactcaagctgcaattgttcactgccgtacaggcagcttagaaaataccggattgttagtaaaacctatccactttgttcactgccgtacaggcagcttagaaacataagcgggactaacccgccattaatcaagagttcactgccgtacaggcagcttagaaatgttgagcagatgccaactcgggtagtgtccagttcactgccgtacaggcagcttagaaaggtctcgatgtgctggtgggtatcccggctgagttcactgccgtacaggcagcttagaaatcacgtcatttgtaccaatttactgacaacaggttcactgccgtacaggcagcttagaaaattagcgcagataaccccaactcggaagctctgttcactgccgtacaggcagcttagaaatcctatttttaaataa

SEQ ID NO: 7068 - DNA, 555 bp, Photorhabdus luminescens
atggattattaccttgaaattcgcgttcttcctgatcttgaattcagtcagcaaagcctgttcgaagcgttatttgctaaactgcatcgggctttggggcagttaagtaatgggcaggttggtgtcagttttccgtgtgcgagaaaaacactgggggatacgctgagaattcacggttcaagcgaagcgctgaatgacttacaagcattaccgtggttaaaagggctcagggattatactgaggtgattgatatccagccaattccccaagaaactaagtaccgctgtgtcagccgagtgcaggttaaaagcagtgcggaacgacttcgtcgtcgtgctattaaaaagggatggttaacgggggaacaagctcggcagcgtattcctatcagcaaagaacaacgtactcatttaccgttcttgtttctcaaaagtttgtcatcaggtcaaagttttctgttgtttgtcaaacaagggccaatacaagacaaaccgacgtcaggaatttttagctcgtatggattaagttcatcagctaccatcccttggttttga

SEQ ID NO: 7069 - DNA, 1014 bp, Photorhabdus luminescens
atgtctaaatcaactattaaaacggcttctgtactggcatttgagcgtaaactttctaattctgatgctttaatgtttgctggaaactggaaacaaatcgacggtgaatggaaacctattgctattcaggaaaaagctgtccgggggacgatttccaaccgcttgaaaaacgctttaactagcgatccagctaagttggatgcagagattcaaaaagcaaacctgcaacgtgtcgatgttgccgcattgccttttgatgctgatactctaaaagtcagttttacattacgggtcttaggtaatctttcaacaccatcagtatgtaatgatcaggattatcaagctgaactggcaaacgtgatcaacggttatattgctgaacatggtttcaaaacgcttgcagcacgttatgcagaaaacttggctaatggacggtttttgtggcgtaaccgggttggagcagaagaaattaaagttcgcgtaagtggtaagagtggcaaatggtgggagtttgattgtgaagatttcagcttacgtgaatttggtaaggtagaaggtaagttagcggaacttgccgccgaaattgaggaaggattggcaggcgatagatcaacattattcaatgttgaggcttttgttcgtttggggcatgggcaggaaattttcccttctcaggagttggttctcgacagtaacagtaaaaaaagcaaagtgttgtatcaggtcaatgagatcgctgcattgcattcgcagaaagtgggtaatgcgctccgcactattgatacgtggtatccagacgctacggaattgggtcttggcccaatagcggttgagccctatggttctgtaactagtcgtggtaaggcatatcgtcaacctaaagcaaaaatggatttttatactttgttagataactgggtcgttaaaggaaaagcgccagaagaagtagagcagcaacactatgttatagcgacgttaattcgtggcggtgtttttggtgaaaaaggtgaataa

SEQ ID NO: 7070 - DNA, 969 bp, Photorhabdus luminescens
atgagccatctgattattttgcgtaaaattaaagtagaaaatgcgaatgcgattacgggtataacttatggttttccggcaattacccactttcttggatttactcattctatctcacgtaagctacaaaaaagctataatctaaaactggaaaattgtggtgtaatttgtcataaccatcaacttcatgcatatcggtccgatccaattaaagataaagtttttgcattaactcgcaatccgttaaccaaagaagcaaaaacggcaacgattaatgaagaaggtcgaatgcatatgacagtttctttattaatagaatgttctggtgaaattgctggtgatacagaagctaacgaattggaacaatatttactagaaatatgtccaactcagagactagcaggcggtactatcactgaaattgctaaagtggatgttattgcttttccgcaagaaggacaggatacccgtaagttaatgcggcgtttattaccgggttttgccttgctagatcgctctgaattgttagctaaacactacgaagaattaaaacaggataaccctcaagcagagatgattgacgcctggcttgatttttccgctattaaaatgcgggctattcctaagcaggatgataagcaacctgaaattggtgacccggcatattgggagtatgttcccaaacctgcttcgggatatttagtccccttgatgacaggttatcaggcaatatcgccgctatatcccgccgggaaagtagataaaacccgtgatcctaatgctccattttgttttgttgaagcaatctacggagtaggtgaatggaaaagcccgcaccgtattgacgatattcgccagttactctggtgttatgactatcaagaaggagagggtgtctacaggtgttgtaatcaacagactgtttcccgtcaatccaaacccaataagaaagtaagaataatcgactga

SEQ ID NO: 7071 - DNA, 1359 bp, Photorhabdus luminescens
atgaatgaaaatggattgagtcgatttattgtcgattatattgaaagccgtaaacagtcaaagttggaggtttttgataaagaggctgaaaaaaaattggcaaaactaacctctatggaggatattacgccagttaaacaaaagttagctgaacaacgcaaggaattggaagagcactatgaagttagaaattggctggatgatgcagttagccgagtagatcaaatccgcttagtgacacatgttctgaaatttgcccatactgatgcaagaggtagcagtattttcgcggtacaatcaaaagcaaatgtaaaagaagatattaaatatctttccatggcagctttagatagacctgctatagatgcggcaggaaatgcggctgctcttgatattgcgaaattattattgacagaatatcgggaaggtgattcattgcttgcaaatataaatcgggcagactattcagcactagctgaactggcgaaaaatgagcagcagcttgaattatggatcaatgggtttaggcaagttttatcagataaacgactttcttcacatagactagcaaaacagctttattttcctgtcggctatgataaataccacttattaggcccactattttcttcatctctagcgcataccatgcatcagcgtattactgaagcacgctttggtgaattatctaaagaaattaacaaagcgagaaaagaagaatcttggcgtcctgaaactatcgtggtttatcccaatactgctgtgcagtattttggcagcactaagccacaaattacctcttatcttaacaatatgcggggtggacgagtttatcttctaccatgttcagcccctgaatggaaaaatataactaaaccacctatgaagcacagatctatttttgatctgggctgtgaatttgtatcattagtccgtagcactgtttggcagatgcaacggtatttgttgagtgtacaaaaatatgaaaacacgttagagattcagcaatgtcgtcaggaatatgttgatgaaattattgatgttttgtttaactatgtcgtcggtatacaaaatttgattgagcttaaaggctggagtgccaatgaagattgtgcgttaaaacgtgctcaacaactctggcttgatccttatcgttgtcagcaagatgaaacgtttaaatttgaacgcgaaggtggtgactggaaaaaagagatagccgcagattttagttactggctgaatcagagtttaaagcatgagcggttagaaatgggattatctgaacgtcgtgagtgggcttctgtgtttaaagagcggttacgtgaatttgaagatgaattaccggaggttatgccatga

SEQ ID NO: 7072 - DNA, 261 bp, Photorhabdus luminescens
atgtatgaactttctgccaatgaagttaaaactcactttggtgatatgctgctaagagcgcagcgtgctccaatccagattaataagaacggcaagcttgttgctgttgtcctatcaatagatgaatatgaaaacattgaagcgcttaagattcagcttttgaaatccagagcaatccaaaccaaagctgatattgaagaaggtaacctagttgatggtgaatcgttttttgatgaactagagacaggtaaatacgactaa

SEQ ID NO: 7073 - DNA, 3282 bp, Photorhabdus luminescens
atgaatattctcttagtttcccagtgtaataaacgagcgctaacagaaacccgccgaattttggatcaatttgctgaacgtaaaggtgatagaacttggcaaacggctatcacccaggaaggtttaaatactttgcgtaagttattgcgtaaaacggcacgtcgtaatacggcggtggcttgccattggataaaaagtggtggtcaaactgagctgttatggatagtcgggaatttgcggcgctttaactcacgaggagttgtacctacaaatacaacacaacgtgatgtgctgaaaagtcaggatgaaaatcattggcatagtgtagaggctatcagcttattggcagcgattgccgggttatttcatgattttggtaaagctaatacattattccagcaaggtttacagggtaatgggcggtttcaaccgtaccgacatgaatgggtgtctttgcggctgtttcaggcatttgttgcggaacaagatgatagggagtggatgacttcgttgagtcagattgagcctagtgatgaggataagattctttcccgtttggttaaggatgatatcgataaaaaatatgcaaacccttttgttaacttaccgccattggcaaccactgtcgcttggctaatcctctctcatcatcgtcttcctgtttatcctagttatgacgatcgatatgtacgcagaccacaattaaaagatattgatagttggctgattaaccacttagaaccgtcatggaactcaatcaacatggataataaggtctggagtgatcaggataaacgtgatgtctggacattcccaaatggtacacctatccgtagtcagacttggcgtcagaaagcacaaaaatttgcgcaaagagcgctgcaatcaacgtcattagtgcaatatggcaatctgaaccagcgtttcaccagtcatatgtctcgactggttttaatgctggccgatcatcattattcatcgttacctgcaactttgggttggcaggatgttaactatggggtatttgccaatactgatagaaccaccggtaagtgcaagcagcgattagatgagcacaatattggtgttggacagaatgctttactactggggagaagtttgccacatattcgtaaaacgctgcctgcgattacccggcataaaggatttaaacaacgcagtaaagatgaaaaataccgttggcaggatcaggcgttctatgtcgcatgtgctttacgcgaacgttcagtagaacagggcttttttggcattaatatggcttctactggttgtggtaaaacttttgctaatgcacgcatcatgtatggattagctgatgaaaaacaaggatgccgtttctctatcgctttggggttaagaacgttaacgttacaaaccggtgatgcgttacgtaaaagattgcatttagaagaagatgatttagcggtactgattggctcgcaggcagtgaaagaattacatcaactccgccaaaaggcgcttgagcctgatgtgggcagcatatccgcggaagcgttatttgctgaacaccagtatgttagttatgacggtagcttagatgatgggcgtctgagtcattggttacgtaaagataataaacttaataagctgcttagcgcacctgtactggtggcgaccatcgaccatttaattccagctacagaaggtattcgtggtggaaagcaaattgcacctatgttgaggttactcacttctgatctcgtgttagatgagcctgatgattttgatattaacgatttgtcggctttatgccgattagtgaactgggcaggattattaggttcgcgggtattgctttcatctgccacattaccacctgcgttgattcaggcattgttcaatgcttatcgtgccggacgccaagattatcaattagcatgtggtcaacctggtgctccggtgaatatctgttgtgcttggtttgatgaatatgaaacaacgcaacaggatgtggtcaatgcatatcagtttcaggaacagcataatattttcgttaataagcgtattggcaggcttaaaaaaatagtgccattgcgtaaagctgaacttgtgccgattatttctgaaagtcgtaagattaatgatgttattaatactatcgccgaagtgatgcatcactctatattgaagttgcgtgaggagcatcatcaaactcattcatcgggtaaaaccgtctctattggtttaatccgtatggcaaatattgatccattggttgctgttgcacagcggttattacaaatgccatctcctgaaaatgtgcgcatccattattgcgtttatcacagtcaacatcctatggcgatacgttctcatcttgaacatcggctggattccacattaacacgatacgatgaagaagagttgtggcaggtggcggaaattcgcaaagtattagaagagacatcggaaagggatcatatttttgtagtagcggcaacttctgtagctgaagttggccgagatcatgattacgattggagtatagctgaacccagctcaatgcgttcattgatacaacttgccggacgtattcaacgtcatcgacgaaaagaaccacgggagcctaatctgcatattctggcgaaaaactataaggcacttaaagcgactgatttaaaacatccggtttattgtcgcccagggtttgagtcgaaagattatctttttgctaatcatgatttacatgaattactggaaccttatcaatatgaactaatcagtgcattgccgagaataaaggaacgcgataatgctggagatagttcaccttttgaaaatttggtcgatcttgaacatcaacgtttatgggaagaacttcaaggtggctctgataataaacacggttactgctcagctctttggtggcgagaacaggcttcatggtgtgcagaattacaacgccataaaccatttcgtcaatcagaacctgatgaactacattatttgtggcttggagaagagggtgaagaagcgaagtttgtggctctggacagcggtcaggcagggataaaagaaagcgacacgtttgactatgtgccagaattagagtttgcacttggtgtgagtgcttggattgaacttgatactgagacgatttaccagaatttggctgatacaaatgaaatggagttaaaaaatgtaagccaacattttggtgagattcgtcttaggaagaaagatgacggagaagcatggcgttaccatccatttttaggggtgtttggagaaattggttga

SEQ ID NO: 7074 - DNA, 129 bp, Photorhabdus luminescens
atggctggagaagatgaacaggagtttcgccaacgctgtattagtggatttcaaaaagctgatgctttagacaccatgattgaggcactacaaacaactgcgcaacaattgagtcaggtggcacgatga

SEQ ID NO: 7075 - DNA, 141 bp, Photorhabdus luminescens
gtgatcgggatgctttttctaagctgcctgtacggcagtgcacatattggtggaggacatgttggttttgttgtttttctaagctgcctgtacggcagtgcactgttacatattaactttaacctgctgatttttaaatag

SEQ ID NO: 7076 - DNA, 540 bp, Photorhabdus luminescens
atgatgtattcagttaaaggtgttcaatatcaaacgttagtgaatatccctaaaaatattgggttaggatattctgggagtaacggtaaagttcaccttgttgatggtgacttcttattttatggttctgttgatattcaaggtgagaacgggactatcaataaaaaaacggaagttgatgctaactggacggtgaaatttaatgaaatgccttgtgatagtcagggtaatatcttgctcaaatctcactggtttagtcctgcgagcaatgatcgctggcttataaaagataaaatgcggctcatgattctttgctcaaaagaaccaactcatcgattgattcttgagaccggtgaaatcattgataataaagttgacaacgattatcttcgtaacatgatattttcttacaccataactacggcgctaatagtaagcaatgcgtttaacttaaaaaatgctctgatattttcagggcatttccttaattatagagataatccaccattgttcagatggaatggaatattagatatatga

SEQ ID NO: 7077 - DNA, 1026 bp, Photorhabdus luminescens; identical to SEQ ID NO: 5914

SEQ ID NO: 7078 - DNA, 285 bp, Photorhabdus luminescens
atgtttataaacaattttcctaagattcacaccttactgttgcacatgagtgtaccacatcgttccaacggtgctggagaattcattcgtatgtgtactcatctttatcgtcgtgggctaatgtattatttccgccggagaatacctgctgatttggtacaagtttgtagcaaatctgaaatagttcaatctcttaaaacaaccaatagggttgaagcgctgatacgtcttcgtcaacttgatgtaaatttagacctaaagtttgcagaaatgcgtcttgggtaa

SEQ ID NO: 7079 - DNA, 93 bp, Photorhabdus luminescens
gtggccgagcggcttaaggcagcggtcttgaaaaccgccgatgggaaaccatccgagagttcgaatctctcctcctccgccaattctttctaa

SEQ ID NO: 7080 - DNA, 336 bp, Photorhabdus luminescens
atgattatgctggtattcgaaggtcaagaaatcgaaaccgatgcgcaaggttatctgaaaaacagtagtgactgggaggaagcaatagctttacttctcgccaaacaggaagaaatcactttgactgaaccgcattgggaagtcattcgttttatccgggaattttataaggaatttaatacatccccagctatccgtatgttagtaaaagcgatcgcacaaaagtatggcgaagaaaaaggcaacagccgctatctttaccgtctgtttcccaaagggccagcaaaacaggcaactaagatcgccgggctaccgaaaccggtaaagtgtatctaa

SEQ ID NO: 7081 - DNA, 279 bp, Photorhabdus luminescens
atgattaaatatggggtaacaatttatgtttatggccgggttcagggagttggatttcgctatcaaacttttcgttgggcgaaacttaataggctgacaggttatgtctgtaatttgcatgacggtagtgtcaaaatcgtagcttatggtgatagtgaacaactaaatacattaacccattggttggagcagggtggtcctccaggagcacgaatagataacttttcatctcaatcctgcgcagtggaggatattgcagattttattgtccgccactga

SEQ ID NO: 7082 - DNA, 321 bp, Photorhabdus luminescens
atgattatcgccagcaaattcggtatcggccaacaagtacgtcacaaacttctgggttatttgggagtcatcgtggatattgatgtggaatactcgctggaacaaccccaagaggatgacattgcatccaatgctaccctgcgttccgccccctggtatcacgttgtgatggaagatgacaatggtcaacctgtacatacttatctggccgaagcacaattagcctatgaaacatccgatgaacatccagagcaaccttctctcgatgagctagcagaatccatccgccatcaactactggccccaagactgcgcaattaa

SEQ ID NO: 7083 - DNA, 228 bp, Photorhabdus luminescens
ctgtacggcagtgcacatgacctggattttattatcgaactgacgtgttttctaagctgcctgtacggcagtgcacacttgccacagcaacagcttgctgatgtgttatttctaagctgcctgtacggcagtgcacgtttgccattgaagcgcaatgtcattcatctctttctaagctgcctgtacggcagtgcacttctatcagtgcagaactcgccgcctatgtaa

SEQ ID NO: 7084 - DNA, 366 bp, Photorhabdus luminescens
atgatacgtccacaggtagctattttcgttaccgtgcactgccgtacaggcagcttagaaaaagggagtggaccaaagggtaaacctcagttagtgcactgccgtacaggcagcttagaaaaatcaaactccagtcagtatcgctatccgtacgtgcactgccgtacaggcagcttagaaagtaaacaaacgaagtatcggtctgccgctcttgtgcactgccgtacaggcagcttagaaaagacgtgctccttgggtcctctcattaagtgtgtgcactgccgtacaggcagcttagaaatgcatccatcaacattaagcccgttgacgattgtgcactgccgtacaggcagcttagaaaggtag

SEQ ID NO: 7085 - DNA, 414 bp, Photorhabdus luminescens
atgagtgaccagaaaattgcagacatactaaaacgagtaaaaactatcgcattggtaggtgcgagtgaaaaaactgctcgtccaagttataaagttatggcttatttactggaacaaggctatcaggtgattcctgtcagcccgaagcttgccggacaaacactgcttgggcaacgggtgtatgcacaactggcagatattccacaggctgttgatatggttgatgtattccgtaatgctgacgctgcatatgacattgcgcgagaagctatagatatcaaagcaaaagtgctctggttgcaacttggtgttattaatgagcaagcaaaaatattggcagaggaagcaggtctggatgttgtgatggatcgctgcccaaaaattgaaattccaagattgggactcgaaaaataa

SEQ ID NO: 7086 - DNA, 459 bp, Photorhabdus luminescens
atggaattgacaacccgcacaatggcaaccgctaaaaatatagcgcttattgcacatgaccactgtaaaacttcgctgctagcttggtccaaaaaacataaaagtttactcaagaaacatcatttatacgctaccggcacaaccggtaatctgattcagaacgaaaccggattatctgttaccaatatgcttagtggtccaatgggtggagatcaacaaattggttctctaatctcagaagggaaaattgatgtgttgatatttttctgggacccacttaattccgtgcctcatgatcctgatgtaaaagcacttctacgccttgctacagtatggaatatccctgttgcaactaatctagcgtctgcggattttattgttagttctcctctattttctgaatcagtagatattcaagtacctgattatcaacattatctgaatggacgtctgaaataa

SEQ ID NO: 7087 - DNA, 2055 bp, Photorhabdus luminescens
atggaacttaaagcaacacaaattggccaatgccttgctcagcatccttataatcgggtgcgcttgctgaatgcgggtattgaagtcagtggtgaaaagcatcaatacctgatcccatttaaccagttaattaatattcagtgtaaacggggtatcatctggggtgagttagagtttgaactatccgatggacaagcggttcgccttcatggtactgaatggcagcaaactcagcgtttttaccattatctgcttggtgaatggcagaaatggagccaggaaatgagtgatattagtgcgaatgtactgacagctcaggttagtgaaatcaacagaattggacaacagaatcgttggttgaaaaaagctgatttactccaattacaacaacaaattcaagcaacatttcaggctttaccgttgccattacagcgtctggaacaatttgatcattgccgggatgggtatcaaatttgtttgcgttggcttgagaatggcgaaaagtgtgttgaaaaaatcaatctgcaatggacagaacgtatgttggagcaacactgtgacttttttcagcggatagaagcatctcctttaaaccgttctcagagtctggctgttattaatggtgaaaattcagttctggttcttgctggcgcgggtagtggaaaaacatcggtgttagtagcgagagcgggttggttattacttctccaacaggcgattcctgaacagatattattgttagcctttagtcatcaagccgtcaatgagatgaatgagaggattcagagtcgtcttggtgtgaatgatattaaagtaaaaacgtttcatactttggcgttgcatatcattcagcaagggagtaataaagcgccaaaaatcagcgtattggaaacagatggacaaaaaagaaaagactttctgattaaacactggcaacaacaatgtagcgagaagaaagcacaggccaaaggttggcgggaatggctgacagatgagttgaaatgggaagtgccggaaggtgaattttggcacgatgaacagcttgctaaccgcctgtcaaatcggcttgagtgctggctggggttgatgcgtatgcatggtggtagtcagaaagcaatgatagagcaagttcaggaagagtatctggatcggtttcaaaaatgtattcgcttgatggagcctttattaaaggcgtggaaatctgaattgaaaacagaaggtgctgttgattactcagggttaatccatcaggcagtgaatattctggataaagggcggtttatcagcccgtggaagcatattttggtcgatgagtttcaggatatttcaccattatgggccaaattgctcactgcaatgcgaacccaaaatagccaaagctgtctatttgccgtaggggatgactggcaggcaatttatcgttttagtggcgcggaacggatgttgactagcgcatttgctaattactttggcaaaggtgctgaatgtgtactggatatctcttatcggcttaatgataggattagtaagattactaacgcgtttgtgcaacaaaatccaaatcagttaaggaaatcactaaatggtttgactaaaggtaataaaaaatcaattgttatcctgccagaagaccagcttgaacctttgttaaataaaatgagtggctatgtcactgagcaagaaacgattttattgctggcgcgttatcactatttgaaacctgaattactgaaaaaagcagcaactcgctggcctaaattgaaaatagaatttatgactatccatgcttctaaaggacagcaagcggattatgtgattattcttggtctgcatcaggggcaagatggttttcctgcaccagcaagggaatctgtgatggagtgggttttattgccacagccggaagatttttcggatgcggaggagcgtcgtcttttgtatgttgcattaacacgggcgaagaagcaggtgtggttgatgcaagacaagaataatccatcggtgtttgtacgtcagttagagcagttaagtgtgcctgttcaacgtaaaccttaa

SEQ ID NO: 7088 - DNA, 2142 bp, Photorhabdus luminescens
gtgctaactgctttctctggtctacgccgttttctttataacagtcattttctctactataaccgtatcctaatcgccttggctggaacaacactagtgccttggtttctggataaagaacctaaaataactatctcattgaccttgggcgttgttgccgcagcactcgctgatcttgatgatcgtctgactggtcgtttacgtaatctagtgattacgctaatctctttctttatcgcttcagtctctattgaattactgttcccttatccctggctttttaccattggactggcgttatccacttgcagttttatcttactgggagctctcggacaacgttatgccactattgcatttggtgcgttgctgatcgcaatttataccatgcttggctcatctattttcccactatggtatcaacaacccctattactgctgacaggtgcaatctggtataacctgttaactctaacgggccatttactgttccctattcgcccattacaagacaatctagcacgttgttaccaacaacttgcagtttaccttgatgctaaagctaatctgtttgatcccgatataatagaagaaggataccagcaatctgtcgttaatgtagcaatggcaaacagtgtcttagttaacacgctaaatcaagccaaaacctccctactgacccgtctgaaaggcgataaccgccaacgcggaactcaccacactctgcattattactttgttgcacaagatattcacgaacgggcaagttcatctcatgtgcaatatcagagcctattacatactttccgttacagcgatattctgttccgctttcaacgtcttctctctgtgcaagcccgtgtatgcgaacagattgctcaatcgatactttggcacaaaccataccagcacaatccgcgtatcgaacgtgcatttaactatttggaaagttccctgcaacaactcagtcaacaacagaaacataacctcaagattaccgccttatataatttgctgaaaaacctacgcgcgattgatgcacaattagcaagtatgagttctggacgatacaatctttccaaagacagagaagatgagactcaactatctgacgaaacgttgactggctggcgtgatatctgtctaaggctcaaccatcatctaaccccacaatcagccctgttccgccatgcaatccgtatgtctgttctgctatgtagtggctacaccatgatccagtggttagatttacaacatgggtattggattttactaaccagtttatttgtttgccaacccaactacagcgctactcgccgccgtttaacactgagaataataggaaccgttgccggcgtattgatcggcttaccaatcctttactttgtgccatccattgaggggcaactggtgttaattgtcatttctggtgtattgttcttcgtcttccgtaacacccaatatgcacatgcaaccctgtttatcacattactggtattattatgcttcaatttgttaggtgaaggctttgacgtcgcattaccaagaattattgatacattaattggttgtggtagcgcctggttagccgtaaatttcatttggccagactggaaattccgccagttatcacaagtgataaaccggacgatgaataccaactgtcgctaccttgatgccattttagttcaatattatcagggaaaagataatggattgacctatcgaattgcccgccgtgatgcccataatagtgatgcagaactggtatccgctatttcaaacatgtctgccgagccgaaaagtgaccaaacttctcaagaaaaagcattccagctattgtgcctaaatcacaccatgctaagttacatctctgcgctgggagcacatcgagataaattggataataaagctattctggatattcttaatgatgccgtttgttatgtcgatacagcattaaaatcgatattaatagacgatgatagaattaagcaaatacctgtcaacatagtgaaaagaattgagcaagcgccggcagaaagaaatagtaaagagcaactggtattgcaacaaatcagtttattaatagaattgctacctaaaatcaccaatatcattaaacaaattaatcaattataa

SEQ ID NO: 7089 - DNA, 603 bp, Photorhabdus luminescens
atgtttttgtctgaggtacgttttactcaactcaaaaatggtttttcttcgtttggggcactgacaaggaagccacagttcggcggttacagcctgttagctgatgggattatgttcgctattattgctgatggagaattatatttaagaggaaatggccatgctgaagtattatttaaagccagaggaatgaaaaactatatttactcgaaaaaaggggtgcctgtaactttgcgttattatcaagttgttgagtcactttggcaagatcaagagttgttatctcaatatgcgtatttggcttatcattactcatttattgaaatggcgggtaaaaagaagataccagagcgtttgaaggatttgcctaatcttggaatgtctttggaacgtcagttatggaaagtcggaatatgtaaagttgaagatttgcggttgttaggtgcgaaagccagttatttaaaactgcatcaatataaaagaaattctaatgttagtttgttacttgctttggctggtgcaattgaaggatgccattcagccgttttaccggtacagatccgtaatgatttattacgctggcacaaagaattggcttgttag

SEQ ID NO: 7090 - DNA, 534 bp, Photorhabdus luminescens
atgggcattcaatcatcctggttttactcttctaaacatcagtcagccaaaagagagggtatggtgaaagagggtaaaggaggtatagtgagtgaattgatttatagtaataaccaatatagtgataaccaatatagcgataaccaagcggtcattaatcgtatattgctacctttgttacgccaatctggaaatgaagcccgctggttgctatgggttagtccacataaaaaactgagccgccaatggttaattaactctggattacctttagataagattatccaattaaatcgcatgagctccattacaacggtagaagcaatggaaagagcattggcgagtggtaattacagcgtggtgcttggctggttaccaacgttatcgggaaaagataccgtgagattacaggctgcggcacaaaaaggtaatgcactaggctttattatgcgcccacaagatgtaagtaaagaaactagccgtgctgaatcgcgatcggatttactaaaaatccactccattcactaccattga

SEQ ID NO: 7091 - DNA, 1107 bp, Photorhabdus luminescens
atgaaaaagatagctatcgcggtagcagtggcagtggccgctttcacaactgcaacgcaagcagctccaaaagacaacacttggtataccggtggtaagttgggttggtcccaataccatgacgtgaatttctacggtaacggttataccagtgcaatcggtaatggccctactcacaaaaaccaattgggtgcgggtgctttcttaggttatcaagccaatccgtacctaggttttgaaataggttacgactggttaggccgtatgccttacaaaggcagcgtcaataatggtgccttcaaagcccacggtttccaaatggcaaccaaactgagctatccaattatggatgacttggatatctatactcgcctgggtggtatggtttggcgggcagattccaaagcaacttatagcgcaaccaatactcatctgaaaaatcatgataccggtgtttctccactggcagctatcggtgttgagtatgcgataactaaagactgggctactcgtctggattaccagtgggttaacaatatcggggatgcaggttcagtaggtgcacgtcctgataacggtctgttgagcgtaggtgtttcttaccgcttcggccaagatgaagcagcagccccaattgttgctccagctccggttgttgctccaacaccagctccagcacccgttgttgaaaataaacgttttaccctgcgttctgatgtgctgttcgaatttgcaagttctgagctgaaagccgaaggtaagcacaatctggatcaactctatactgagttagcaaatatcgacccaaatcagggcaaagtactggttttaggctacaccgaccgtatcggtaaagatgtttacaatcagaaactgtctcagaaacgcgctcaaagtgtagttgactatctggtatctaaaggtatcccttccggcagcatcagcgcggaaggtcacggtaaagcaaacccagtcactggttctacctgtgataaggttcacaaacctaacctaatcaactgcctggcaccagatcgtcgcgtagagatcgaaattcaaggtactaaagaggttgttactcaagcacaatctcaatctgctcaataa

SEQ ID NO: 7092 - DNA, 456 bp, Photorhabdus luminescens
atgaaatatcaacaactggaaaatttggaatgtggctggaagtggacttatctgatgaaaaaacatcaagaaggcgagctaattactaaatatattgaaaacagtgcagctcatgcagccgttgataaactcattgaacttgagagtgaaccggtaagggtactgaaatggattgagcagcatatgaatcctgatttatccaaccggatgaaacaaactatccgcgctcggcgtaaacggcattttaatgcggaacatcagcatactcgcaagaaatccatcgacttagattttcctgtgtggcatcgcttatctgcactttctcagcgacggggtaatacactgtctgaaactattatccagttaattgaagatgctgagcggaaagaaaagtatgccaatcagatgtccagcttgaaacacgacttggaagctattctgggtaagaaagagtaa

SEQ ID NO: 7093 - DNA, 1731 bp, Photorhabdus luminescens
ttgaccactaacaaactagactggcaggcattactgccgaattgcgttccttatgatgcgctttttcattctgcttcccaacaggcgtctgccagcatggaagccgttcaatcacggctacatagtggtttacagcttttttgccggatggattcccgccagccttttatgctattgaaagccgaagaatgtgatatttatttgtcagcattagctgagtctatccgtccattactcacgaaagagcttccccaaattggtggcaattatcacatacagcaacagaaaattagctggcaaccctcaacagcaggccatttcacacctgagttacgcgtcgcctatcgtgaatggatagaagcagagcaattatttggccgcttccattctcacaacggagaaattcacttacaacccggtctgattcatcaggtaaatggcggtgtacttattctaccgttacgtaccctactgtctcagcccttaatgtgggttcgcctgaaacagatgattattcagcaacgctttgaatggttgtctccggatagcaacaaaccgttaccattacctatcccttctatgccattaaagctacgtctgatcctggttggagatcgtctaagccttgaagagtttcaggctacagaacctgaattagcaaaaagcgctctatatggcgaatttgagctagatatgccatttcataatgagcaggatttaagcctgtggtgcaattatatcaatgggctcattcaacaatggcaattacctccattgcatcataatgcttggcctgagcttgtccaacaagcaacccgccatgtagaagatcaacaccacctgcctttggatatgctctggctacaacggcaactgactactgcggcactctatcagcaagaaaatcagattacagctcaatcaattaaacaagcagaggaaaatcgccgctggcgtcacaattatctgcctgaacgtggtttagaagaaattcataaaggccagattcttatccatacccaaggcatggtcattggccaaattaatgggttatctgtgctagagtatcccggccatcctgatccagtaggagagccatcccgtatcacttgcgtggcccatatgggagatggagaatttgttgatgttgaacgcaaagttgagttaggtggcaatatccatgcgaaaggcatgatgattatgcaagcatttttaatttccgagctaaaattggatcaaccacaacctttctctgcatctattgtatttgaacagtcctatggtgaagttgacggcgacagcgcttctcttgccgaattatgcgcattgataagtgctctttccctgcaacccattgatcaacaactagccgtcacaggtgcagtagatcaatttggttatgttcaacccatcggtggtattaacgaaaaaatcgaaggtttctttgaagtatgccaccgcagagggctaacgggtcaacaaggtgtcatcctaccagcagcgaatatccatcatttatgccttaatcaacccattgtagatgcggtaaaagcgcaaaaatttcatttatggtcagtaaaacatgtttctgaagcactgcctttattgacaggtatcccttattatgatcaacaagaaacacacttgttagctatgatacaagaccgtataacacaggcgaataatcaggaacgacctaaattcccgtggtttcttcgctggttgggttaa

SEQ ID NO: 7094 - DNA, 519 bp, Photorhabdus luminescens
atggttgataaacttaaatcctacacaaaagaagatcttatcgcgtctggacgcagtgagctgttcggagaaaatgggccgccattaccatctggtaatatgctaatgatggatcgcatcattgaaatgacagaaaacggtggtacccacgataaaggttacatagaagccgagctggatattacccctgatttatggtttttcgactgccattttattgatgacccggtaatgcccggctgcctcggtcttgatgccatgtggcaattggttgggttcttccttggctggttaggcggtgaaggcaaaggccgtgcccttggcgttggcgaagttaagttcaccggccaagtattaccaacggctaaaaaagtcacttaccgtatcaactttaaacgtgtcattaaccgtaaattgattatgggactggctgatggtgaagtgttagtagatggtaaaatcatctatacggcaacggatttgaaagtaggcttgtttaaagataccagcgctttctaa

SEQ ID NO: 7095 - DNA, 189 bp, Photorhabdus luminescens
ttgatcatagcacaatttgccaattgtatactgattggtcagcgacaattgggtgtttgtaatgcagatattcaggtgcggatttgtgttatttctagtcgagataggccaaagttaggacttgatttgatttttttctgtatgaatattgaatcctatactctgagatataaccggaattacctttga

SEQ ID NO: 7096 - DNA, 339 bp, Photorhabdus luminescens
atgaacatcagaaaaatactgctcataatcatcgcattgactcttacaccaactgccattgcaaaactcgatagaattgacggtaccgtcgaaatgctaaaagcgcctaacacaaatggagattgctatggaaaaatagcgacgcctacccgtgtccagggatttaggtgggtatgtacgattaatggcggatcgacgctattatcattgcttcaaacagcctatacaagtcatgaaactataaccatatcagtcgatgggattgaagaatatagccgtctcttttgggttgaattacatcataaatgtttatcaaacccatcttactgcaattattga

SEQ ID NO: 7097 - DNA, 168 bp, Photorhabdus luminescens
atgaagagacagaaacgagatcgtttagcacgagcattatcgagagggtaccatgcaggtattttggggcgtccaagggagcattgtccctattattcattagatgcccgttctcattggttaggaggatggcgtcaggctatggaagacagggcgatgatggcttag

SEQ ID NO: 7098 - DNA, 564 bp, Photorhabdus luminescens
atgatgagaagattggcattaattttagtgatttttatttctgcttgtagccgtcagccagaaaaaacttactatcaattgccggtagtggcaatagcatcacaaaagagtgctattgtgcagcatgatcgccaattatgggtacaacgggttatgttgtccgattatctgtcctcctccggtgtggtgtatcaaagtagtgatgttagttatgtcagtgcggcgaatcacttgtgggcaagtccacttgaacaacaattacagcaagtgctggtagctgagttgactatggcattgcctcagcgtttagtttctgctcaaccattggttaataagcccgatactctagacgtgacagtcaccagttttcatggtcgttatgatggtaaggtgattttgcaaggttactggacattaactcatcaagggagtgtcgttaaacagccctttaatctagagctaaaacaggaagaagatggttacgatgatttagtccgcacattggcaaaaggatggagtcagttggtgcaagctattgccagtcaattaatttcccaatcataa

SEQ ID NO: 7099 - DNA, 1650 bp, Photorhabdus luminescens
gtgacggataaagttgaagaccagagtcaggctaaaatcgataaaattaaaagttggtcgccagtttggattgtaccaattgtgacagtgcttattggtgcttggatattgttttaccatttcaaccaccaagggccggaagtgatgttgattacctccaacgcggagggtattgaagctggaaaaactaaaattaaaagccgtagtgtggatgtcggcgtagttgagagggtcatgctgagtgataatcttagtcaagttattattaaagctcggctgaatgatggcatggaaaacctattgcgtagtgacagcgctttctgggtagtgaaaccgcagattggccgtgatggagtatctggtcttggtacccttctgtctggggcttttattgagcttcaaccgggaacaaatggtgatgaagaagataaatttaatttgttggactcaccaccattggcttcacctgatgcaaaaggtatccgcgtcatcctaatcagtgataaagcgggccagctcaatccgggtgatccggtgttgtttcgtggttatcgggttggttctgttgaaaccagcgagtttgaaccgaaatctcatctgatgagatatcagctatttattaatgcaccttatgatggtttgttgacaagcaatgtccgcttttggaaagagagtggtattacctttgatatgtcttctcagggggtacgtgttgaaatggcttcgttatcaacgctgtttggtggtggtgtcagttttgatgtgcctaagggttgggaattgggagagccaattaaagaaaaagctatttataaactttttgacaaccaaagaagcattcaggattctttatataccgaacataaagattatctgttgcttttctctgattccgttcgagggctacagccgggtgcgccagtagagttccgtggtatccgtatggggactgtggcaaaagtaccattctattcagagggaatgagacagcggttagataacgattttcgtattccagtacttatctcgattgaaccggagcgctttgagaaggagttgggagaagggtttgatgttgagaaagagctgaatagcataactaaacgcggtctgcgggcgtccctcaagtcaggtaatttgctgacaggggcactgtttattgatttggatttctatccaaatgaaaaagggtgggccggtccgtatgaaattgcaggttatccgctattaccgacaatcagtggtggccttgctcaaattcaacataaggttattgcagcgttagacaaaattaataatatgccggttgagccaatgtttaatcaggctattcgcactttggaagagagccagaaagcgatcagaaaagcacaacagacccttgatgaattgaataaggtgctggcgaatcctgaaaccaaagatctgccaaaagatatacagaaaacattgcaggagtttagccgcagtatgcaaggttttcagcctggctcaccggcttataataagatgttggataatatgcagcgattagatcaagtattgagtgaactgcgacctgttctgaggacgttgaataataagagcaatgcgttagtttttgagtctaagccaattgaagatccagaaccgaaaaaggctaaaaaatga

SEQ ID NO: 7100 - DNA, 1248 bp, Photorhabdus luminescens
ttgtgttccgctaaccatcatcatgaaatggtattgtgccctcaatgtgatttgctggtgacattgccagaatgggttcagggaacgaaggcaatttgtcctcgttgtaagacgacattagtcacatggtggaaagaaccaaaacatcagccaacaggttatgcagtcagtgcattatttatgctgttaatggcttgcctgtttccgtttatcagcatgagtgtggcgggaattagcagtgaaattaccttatctcaaatccctcaggtgatgtttaatgaaaattacgtcagtgtgggaacattctttttgctctgtgttcaactggtgcctgcgttttgtatggtagcgattattctcttgtgccagagtgttgttatttctcagaagataaaagtctggttggccagaatgttatttcagatgaaaagctggtgtatggttgaaatctttctggcaggggtgttagtcagctttgttaagttaatggcttatggtgatattgggttaggtttaagttttttgccatattgtctgttctgccttctccaggtgagagcatttcaatgtttggatcgccactggttatggaatcagataacactcgcacctaaggtgaatataccgttacaggcaggaagatcggggttagtgcagggtgttcgattatgccagtgttgtacggctattttaccggcagaccaattggtatgttcacgttgttatacgcgtgggcatgcccgtcgtcgcaacagtctgcaatggacaatggcactgatagtgacagctttaatgctttatattcctgctaatatcatgccaatgatggtgacagaatcgttaggtaaccagagtgattccactattatggctggagtgatattactgtggagtgtcggttcatacccggtcgctttagtcatttttatcgctagtattatggtgccatccctgaaaatgctggcaattggctggttgtgttgggataccaaaggtcacggtaaacgggattcttcccgcatgcattttatttatgaagttgtcgaatttgttggccgttggtcaatgattgatgtatttgttatcgcaatattgtcatcactggtacgtatggggaaattgatgagtgtctaccctgctatgggggcagttatttttgctttagttgtgatcctgactatgtttgcggcaatgacatttgatccgcgtttaatttgggatagagccaacgttaaacattcgttataa

SEQ ID NO: 7101 - DNA, 1911 bp, Photorhabdus luminescens
atgtcattgatcaatttatctggtgcgtggttgtcgttcagtgatgcaccattacttgataatgcagaattgcatatagaagaaaatgaaagggtttgtctggttggccgtaacggtgctggaaaatctactttgttacgggtattagcaaaagagcagccgttggatgatggtcaggttatttaccaacaggatctggttgtcgctcgcttacaacaggatcctccgcgtaatgtagaagggacggtttttgattttgttgccgaaggtgttcaggagcaggccgaatatattaaatcttttcatctggtctcccgcttggtggagcaggagccaaatgagaaaaaccttaaccgcctggcagaattgcaggaggtactggatatccgtggattatggtcactggatagtcgcattaatgacgtattgaaacagctctctttacctgcggaagcgaagctctcttctctttcaggtggttggttgcgtaaagcagccttgggaagggcgctggtgagttcgccaaaaatcttgcttcttgatgaaccaactaaccacttggatattgatacgattgaatggctggagaatttcctgaaagattttcagggtagccttgttttcatttctcatgaccgttcatttattcacaatatggcaacccgtattgtcgatttggatcgtggtaagttagtatcgtggccgggtaattacgataagtttcttgaaagcaaagaagacgcgttgcgtgtggaagagatgcaaaatgctgaatttgatcgtaagttggctcaggaagaagtgtggatccgtcaggggattaaagcgcgtcgtactcgtaatgaagggcgtgttagggcattgaaggcattacgtattgagcgtttacaacgccgtgaagtaatgggaaccgctaaaatgcagatgggagaagcgagtcgttccggaaaaattgtctttgagttggaaaatgttaactatcaaattggtgaaaggaaactggtcaataatttcagtgcgcaaattcagcgtggggataagattgcactggtagggccaaatggttgtggcaaaaccactttactgaaactgatgttaggtgagctgcaatctgatagtggccgtgttcattgtggtactaaactagaaattgcttattttgatcagcatcggatagcacttgatccggaaagaaccgtagtggataacctggctgaaggtaaacaggaagtgatggtgaatggtcgccctcgtcatgttctgggttatttgcaggattttctgtttcatccaaagcgggcaatgacaccggttaaagcgctttctggtggtgaaaggaaccggttgttgctggcgcgtctgttcctgaaacccagtaatctgttggtacttgatgagccaaccaacgatctggatgtggaaacattagagttgctggaggagctggtagagaattatacaggtactgtattgctggtgagtcatgatcgtcaatttgttgataactccgtgacagaatgttggatttttgaaggtaatggtgcgatcaataattatgttggtggttattacgatgctcagcaacagcgcgaacaggttgtatcgttgcgccagaaaaatgcgaaaaaacttcaaacggaagttaaagtagaaaagattcaggaaccgccaaaaaactctcgtaacaaaatgagttaccatttattacgagagttagagcaattaccatcattgctggagaaactggaagaagagcttgatcagttacaatctcaagtgagtgctcctgaattttttaatcagcctcatgtaataacccaaaaaatattgactgaactgtctcaaaaagagcaagtattagaagcggcttttgatcgctggcaggaattggaaacattgaaaaacagttaa

SEQ ID NO: 7102 - DNA, 2133 bp, Photorhabdus luminescens
ttggtgatatgtcatatgaactctctgtttgccagcacggcgcgtggattagaagaattgttgaagaacgaactggaaatgctgggtgcgcaatcatgcaagattgtgcaaggtggagttcattttcaaggtgatggcagagtgatgtataaaagtctgatgtggagtaggctggcatcacgtattttgctaccgctaaatgaatttaatgtttatagcgatttagatctctatcttggggttcagtctattgattggagccaggttttttctgtacatagcactttctctgtgcatttcagtggtacaaatgaagagatacgtaacacgcaatatggggcgctaaaagttaaagacgccattgtcgatagttttactcgtaagttggatcaacgcccgaatgtggcaaagcagcagccggatgttcgtattaatgttttcctaaataaagagaaagccagtgttgcattggatttgagtggtgatggtttgcatatccgaggttatcgcgatcttgctggtcaggctccgctgaaagaaaatctggctgcggcgattgtccaacgttcaggttggcagatagggactccaatggttgatcccatgtgtggttccggcacattgttaattgaagctgcaatgatggcggctgatcgtgctccgggtttacatcgtgatcattggggctttactgcttggttaaaacatgatgaagcaatttggcgtgaggtaatcacagaagcgcagatccgctttcgtaaaggtcttcaggagacaacttgccgttttgttggttctgatattgatcgcagagtgctggatatggctcggtcaaatgctcgtcgagctggggttgcgcagttgatcacttttcagcaaggtgatgccagtcgtctggaaaatccattaccagaaggccctgctgggacagtattaagtaatccaccttatggtgagcgtttggaaagtgagccggcattgattgcactgcacagtttgtttgggcggataatgaaaagccgtttccctagctggcgtctgtcgctattcagtgcgtcacctgaattgctgagttgtctgcaattacgggctgaacgtgagtttaaagctaaaaatggtccactggattgcgtacagaaaaattatctgttgtcggataaaccgcattcatcagaggtgaatgtggcggaagattatgccaaccgtctgcgcaaaaatgaaaagaaattagctcactgggcaaaacagcaagggattgattgttatcgtctgtatgatgctgatttgccagaatacaatgtggctgttgaccgctatgcggataaagtagtgattcaggaatatgctccgccgaaaagtgttgatgctaataaagcgcgtcagcgtttattcgatgttatcagtgcaacgatgcaagttcttggactctcatcaaatcaattagtacttaaaactcgtcagcgtcagaaaggcaaaagccagtatgaaagaatggcagaaaaacaggaattctttctggtaaatgagtatgacgcaaaattctgggtcaatttaactgactatttggacactggcttgttccttgatcaccgtattgcccgaaaaatgctaggtgaaatgagtgaagggaaagattttctgaatctgtttgcctataccggagcagcaacggtacatgctggattaggcggtgcgcgttcaacaacgacggttgatatgtctcgcacttatcttgaatgggctgaacggaacttacaggctaatgaattaactgggcgtcagcatcggctgattcaggcagattgtctcgcttggttggcacgggccaatgaacagtttgatttgatttttattgatccgccaactttttccaattctaaacgaatggaagatacatttgatgtacaacgcgaccatatcatgttgatgagacagcttaagcgcttgttgcgtcgtggcggaacgctgatgttctctaataacaaacgtggttttaaaatggattttgctgagctggaaaaagttggcttggtggcagaggaaatcaccagtaaaacccagtcgcaggattttgcccgcaatcgtcagattcacaactgctggctattacgtcatgctggtgaggaaaaataa

SEQ ID NO: 7103 - DNA, 1116 bp, Photorhabdus luminescens
atgatcacgctgtctcgcctgtatacccacccagtaaaatctatgcgtggtttgcaactttcccatgcattagtcagtgaaagtggcctcatatttgatcgcaattttatggtcacaacgacagatggaacttttattactgcccgtaaataccctcagatgctgttatttactccagctatgttaaataatggtatttatctgcgtgcgcccaacggagaaaacgccacggtactttatcgtgatttcctgcctgaacagcaaccaacggaagtatggggcaaccattttacggctctcattgcaccagaaactgttaaccaatggctaagtagtttctttgacattccggtgcaattacgctggttaagccatgaattaacccgcagagtaaaaaaacaccccgaaattccattatcatttgcggatggttatccatttctgcttattaatgaagtctcatttcatttattacaacaacgttgcccagccagtattaaattagaacaatttcgcccaaatattgtcattaccggcgcagaagcatttgcggaagatagctggcaatcaattcagattggggatgttatttttgacttacccaaaccatgcagccgctgtattctgaccacggtcagcattgataaaggcattaaaaatccaaacggagaaccattaacaacattgcaatcattccggacagcagagaatggtgatatcgattttggtcagaatttaattgctcgctccagtggtattattcgaatcggagataatgtcaccgtattagctaaaaaagacccacgtcaatatggcagcagtgaaaaagctgagaatattgatgtaccaaaaacaaatgagcaatctgtcattatcgaatataacaggcaaacttttacaggtaacaatcaacaaactattttagagcaactggaacaacaaggaataagagtcccttattcatgtcgggcaggcatatgtggatgttgtaaaattgctttaattaaaggagatgtttttcctttaaaagccacagcaattaaagaaaatggccacattctggcctgctgttgtattccaaagaataaccttattcttaataatatgacgcgttag

SEQ ID NO: 7104 - DNA, 1299 bp, Photorhabdus luminescens
atggcacgtatcatcattgcagcgctcgcaacccctggacatgtctatccaatgttaaagatcgctcaatcactgatagcacaaggacatcaggtaaccgtattcaccggtgcattatttcgccaacaggtagaagctttaaatgcacaatttgtcccttttgatgaacaggtagattttgactaccgccatttagaacagcattttcccgaccgtgctcaacttcctccgggaaatgtacaaatggcactcgcattcaagaatttcttctccgccccaatcccatttctcgaccatcaactgcgacaaattattcgtgaacaacaagcggaattactgatagccgaaaattgcttttatggcatattacctctgttgcaagaagaaaaaacccatcgtcttccagtcatagtcattggcataacacctctggcttactcttcgaaagattccattttctggggaccacgtatcccacctgcggtattaccacctgaattaacacatgaacagctcgtcgataaagccgaccaacaactcatagccgaagtgcaggatagcttcaataattcattagtccagtcaggaggctccgcattaaccagacttttcaacgatgaagtcatctttggtgctgatcgctttttgcaactctcaactctggcatttgaatatccacgagaaggattgcctgatacagtccattttattggaccacttcccaaccctgtaccgacaacaacatcacctcaattatgggaagaagatgatccacgtccattggttatagttactcagggtactatttccaatgccgatttaaatcagttgattttccccacattgcgtgcactggctacattaccggtacgtatattggcaaccaccggtggcagatcggtagaaacactgagtaaagatctacctgaaaacgcgcgtgtcgaagaatttatttcatttgagcactggctgccgaaagcttcattgctgatatccaacgggggctacggaaccatcaattacgctctcagccacggaacaccattacttattgccgatgcaggagaaggcaagcaggaagcagcgtttcgtgttgtatgggctggatgcggtactaatctggatacagcacatcccactgaatctcaacttaagcaaacagtggaaaatatgctgagtacagacttgtttaaacaacgtgcgcaaattgtccaaaaagattacgcaagacatgatgcattagcagcaatatcccgtcacgtagaacaattaattcttgcacaaagccacattcactaa

SEQ ID NO: 7105 - DNA, 885 bp, Photorhabdus luminescens; identical to SEQ ID NO: 7045

SEQ ID NO: 7106 - DNA, 1296 bp, Photorhabdus luminescens
atggcacgaattgtcattgcagcggttgcaacacccgggcatgtctatccgatgttaaaggtaactcaatcactgataacacaaggacatcaggtaactgtcttcactggcgcattatttcgccaacaagtagaagctttaaacgcacaatttatcccttttgatgagcagatagactttgattaccgccatttaaaacaacgttttcccgaccgagcgcatctgccgccaggaaatctgcaaatggcactcgcgtttaaagattttttctgtagcccaatcccattcctcgaccgccaactacaacaaatcatccatgaacaacaagcagaattactgatagccgagaattgcttttatggcatattgccactgctgcaaaaagaaaaagctcatcgccttcctgtgatcatcattggcataacacctctggcttactcttcgaaagattccattttctgggggccacgtatcccacccgcactattaccatcagaattgacacatgaacaactcgtagacgaggaaacccgacaactcataaccgaagtacaggatagcttcaatgacgcattagctcagtcagggtgcactacgttaaccagatttttcaacgatgaagttattttgggttctgatcgttttttgcaactttcaaccctggcatttgaatacccacgagaggaattgcctgatactgtccattttattggccctctccctaaccctgctccgataacagaatcacctcaattatgggaagaagatgatccacgcccattggttatagtcactcagggcaccatgtctaatactgatctaaaccagttaattttccccacattacgtgcattggctaaattacctgtgcgtgtattagcaaccaccggtggtagttcaatagaaatacagccagagaacatacctgacaacgcacgtatcgaagaatttatctcatttgagcactggctaccaaaagcttcattgctaatatccaacgggggttacggaaccattaattatgcccttaaccacggtacaccggtgctcattgccgatacaggagaaggcaaacaggaaacagcgtttcgcgtcgtatgggctggatgcggtattaatctggatacagcacaaccgacggaatctcagcttaagcaaacagtggaaaatatgctacgtacaaacttatttaaacaacgcgcacaaatcgttcaagacgattactccagtcatgacgcattagcagcaatatcccatcacgcagaacaattaatcttcgaaaatcgtgctaattaa

SEQ ID NO: 7107 - DNA, 546 bp, Photorhabdus luminescens
atgaatattaaacccgatgaccaatggcgctggtattttgatgttaaccatgaccgtgtaatgctcgatctgtctaatggtatggtttttcgttcctgttttcctgctaagatgttgataccctatgcaatgggagaaacttcattttctgtagaagatgcgacgctttattattgttttgaagaacagacacgccgaattaatatttcagatgaatccagagctgaattagttcttaatgcgttagtggctttccgctttattaagccacagatgccaagaagctggtatttttctcgttttgccatgatagagaagccggtacaaggagaactgattcaggtacggctccaggattgcgggacagatgctatattcttggtcgtagaggccggggatagtgcgagcctttgtctgctagctcaaccacaattaacattatccgatcgagtaatgaacttttgtgatcccattaagattatgaatgatcgattgatgccatttgtggaatctatttatatgccaatttatggcactgcgatttga

SEQ ID NO: 7108 - DNA, 1011 bp, Photorhabdus luminescens
atgtgctacccactagccaggaaagcgttgttccagcttgatccagaacacgcccacgaattaaccttccgccagctcaaacgtattaccggtactcctttcgagttttttatccgccagtcaattgcgacaaagcctgtgacttgtatgggcctgtcatttaaaaatccccttggtctggctgccggccttgataaagatggcgattgtattgatgcatttggtgcaatggggtttggttttattgaaattggcaccgtaaccccacgtgctcaggcaggaaatgataaaccaagattattccgtatcgtcgaagcagaagggttaattaaccgtatgggcttcaataatcttggtgttgataacctggtagagaatgtcaaaaaggcaaaatatggtggagtgattgggatcaatattggcaaaaataaagataccccagtagagcatggaaaagatgattatttaatctgcatggataaaatttatcctcacgctggttatatcacgattaatatttcttcgcccaacacgccgggcttaagaacattgcaatacggcgaagcgttggatgatctattatcggcgattaaaaataaacagggtgaacttcagcaaaaataccaaaaatatgtccctgttgcggtaaaaatcgccccggatctttctgaagaagagttgattcaaattgcagatagtttaattcgtcataatatcgatggtgctattgccactaatacaacgttagataagcgcttagttgaagggcttaactattgccaacaagctggtgggttaagtggccgaccggttcagttacgtagtacagaagttattcgtcagctctcccaagaattaagagataaaattcctattatcggtgttggtggaatagattcactcaccgcagccagagaaaaaatagcagcgggggcttctttaatacagattttctctggatttatctatcatggtccaaaattaatcaaagatatcgtcaatcatatctaa

SEQ ID NO: 7109 - DNA, 159 bp, Photorhabdus luminescens
gtgtattcttgtttcacgcgcaacatttggaaaaaatttgcttctggtgagtatatttctgtagattcagcccatgttattcggttaccctatctgccgaaatattggggggttgaaaatgggcgttctttagctcagaaacttccaaatggtatctga

SEQ ID NO: 7110 - DNA, 168 bp, Photorhabdus luminescens
atgacggatataagtgttgtcaccaaagcagatctaacagttgctactgagagcattaaaaccgatattggtactataaaaacagatttagattggattaagaaactgacattagcagttggtattgctgttgttattgcggcattgaaatacatttttattggttga

SEQ ID NO: 7111 - DNA, 2613 bp, Photorhabdus luminescens
atgacacaacagcgacaagctaagtaccgccgggattatcgcgctcccgactatacgatttctgatattgaactcgatgttaatcttgatgccgataacacggaaatcaccgcaatcagccagataaaacgtctgagtcacgaaataacgccattagtgttggatggtgaagatttgacactgaaaagtcttcatgtgaatggtcaaccgtgggtgcattaccatgaacaggagagggcgctgatcattgagcagttgccggttcagttcactttgaaaattgtcaatgagatccatccatcgaaaaatacggcgctggaaggcttgtatgtttctggtgatgcgctttgtacccagtgtgaagcagaagggtttcgccatattacttactatcttgatcggcctgatatattggctcgttttaccacgcgtatcacagccgatagagccaagtatccgtatctgctttcaaacggtaaccgggttgaacagggagaaaccgatgatggacgtcattgggtgaaatggcaagatccattcccaaaaccatgttatttgtttgctctggtcgcgggtgattttgatgtgttgcgcgatacttttacgacgcgtagtggccgtgaagttgcattggagctgtttgttgatcgtggcaatctcgatcgggctgattgggcaatgacctccctgaaaaatgctatgaagtgggatgaaagccgttttggtcttgagtatgaccttgatatttatatgattgttgcggtggatttctttaatatgggcgctatggagaataaagggctgaatgtctttaactccaaatatgtgctggcaaaatctgaaactgcgactgataaagattaccttaatatagaagctgtgatcggccacgaatatttccataactggaccgggaatcgcattacttgtcgcgattggttccaactgagtttaaaagagggattgacggtattccgtgatcaagaatttagctctgatcttggctttcgttctgttaatcgtattaataatgtgcgtgttatgcgttcggcacagtttgcggaagatgccagcccaatggcccatccaattcgtccggataaagtgattgagatgaataacttctataccctgactgtgtatgagaagggcgcggaagttatccgtatgattcataccctgctaggtgaagagcaattccaggcagggatgcagctttatatccatcgccatgatggtagtgccgcaacatgtgatgattttgttcaggcaatggaagatgcatcaaatgtggatttgtcacttttccgtcgttggtatagccagtctggtacaccagtattaacagtccgcgatgaatatgatgcagaaaagcagcaatataagttgcatgtcagtcagatgacaccatctaccgccgatcaaaaagagaagcagcctctgcatattcccctggatattgagctttatgacagtaaaggtcatgtggttccgttacgttatgatggtcaaccggttcacaatgtattgaatgtgactaatgcagaacagacgtttgtatttgatgatgtgccatcactgccggttccctctttattacgggaattctcagcaccagtgaaactggattacacattcagtgatcagcaattggcattcttgatgaaacatgcccgcaatgcgttttcacgttgggatgcggctcagtcattgatggcaaactatatcaaactgaatattatccgttaccagcagaagcagccgatcgaactgccaatgcatgtggtggatgctttccgcgcggtgttattggataaagagattgatccagctctggctgctcatattttggctttaccatcagagagtgagatagcagaactgtttacgattattgatcctaaagcgattcatgaagttttggatacaatcacccgtactttggctcaggaaatggctgatgaattcgcggtggtttataacgctatcaatatcggtgcatatcgcgtcgctcatcaggatattgctcagcgctctctgcgtaatatctgtctatattatctggcctttggtcatcaagagcaggctgataaagtggtatcaaatcaatatcatcaatctgacaatatgactgatgcgttggcggcattatctggcgcggtgctggcagagttaccttgctgtgatcaactcatggcggaatttgatggtagatggcatcaggatggcctggtgatggataaatggtttagcttgcaggcaagtagcccggcggtagatgttttggctaatgtacgccatcttctgaatcatcgttcatttagtatgagcaacccaaaccgggtgcgtgctctgattggggcatttgttaacaatccggttgcatttcatgttgaagatggcagtggttatcaattcttggtggagattttgactgatcttaacagccgtaatccacaggttgcttctcgtttgattgaaccgctgattcgcctgaaacgttatgatgaaaaacgtcaaaacatgatgcgtagtgcgttggaacagttgaaagcattggaaaatctgtctggtgatctatttgaaaaaattaccaaggcattagaaagctga

SEQ ID NO: 7112 - DNA, 1215 bp, Photorhabdus luminescens
atgacactagacgctaccccaattattaaatcactgcttgatactgacgcttataaacttcatatgcaacaagcagtgtaccaccgctacagccacatgcctgttgttgcagagtttcgctgccgcggcgacgaactgctaggtgaatatgccacagaattacgtcatcaagttaatatgatggctgatctggcattaaccgatgctgaatttaattacctttccagcctgccttttttcaaggctgattatctggactggttaaaaacctttcgttttaacccacagcaagtcaatatttctgttacaaatggcggccaattagctatccatatttcaggattatggtatgaagtgattatgtgggaagtcccattactggcgttaatcagtgaattaattcatcgtcatcactcaccagataatacggtggaaaatgccgtcaaccagctacgcaagttgatcaaactgttctatcaacatgctgaaaatgaaggaatcgatctctccagttttaaactgatggatttcggtacacgccgtcgtttctcacaccgtgttcaacacgctgtcgtcagtgagctgcaacagcatttcccttatctgattggcactagtaattaccaacttgcacaacagcttgggctccctcctgttggaacacaagcgcatgagtggtttcaagctcatcagcaaatcagcccggatctggctagcagtcaacgagaagcattacagagttggctgaaagaatatcctaaccaattaggtattgccttgactgactgcattacaatggacgcgtttctgcgggactttgatgcccagtttgccaaaaattatcaaggcttacgccatgattcgggtgatcccgttcaatggggtgaaaaagcgatcgcccactatcaaaaactgggtatcgacccaatgacaaagaccttagtgttctctgacagcttggactttcaaaaagcactagcgctctatcgtcatttccacaacagaataaacctgattttcggtatcggtacacagctcacctgcaatatcccaggggttaagccactgaacatcgtcatcaaacttgtcgagtgtaatggcaaaccggtcgcaaagctttcagacagccctggcaaaaccatttgtgaagataacgagtttgttaacaggctacgcgccgcttttgatataccccaggttaaacaagcttgttaa

SEQ ID NO: 7113 - DNA, 1401 bp, Photorhabdus luminescens
atgagcgtagcgcctgtagtcgacgtactgcaaggccgggttgcggttgatagtgaagtcaccgttcgcggctggatacgtacaaggagagattctaaagctggcatctctttcctcgccgtctatgacggttcctgctttaatccattacaggccgtcgttaataataatttgcccaattatcaggatgaagttctgcatttaactaccggttgttctgtcgaagtgacagggacagtcgttgcttcccttggtcaagggcagaactttgaactgcaagcgacgaaaatcgtcgtgatcggtctggttgaagatcctgacacctatcccatggccgctaaacgccacagcattgaatacctgcgcgaagttgctcacctgcgtccacgtaccaacctgattggtgccgttgctcgtatgcgccatacccttgctcaagcactacaccgtttcttccatgaaaatggttacttctgggtttccaccccgttgatcacggcggctgatacagaaggtgctggcgaaatgttccgcgtctctacgctggatctacaaaatctgcctttaactgacaaaggtgaagtggatttcaaccaagattttttcggccgcgaagctttcctgaccgtatctggacaattgaacggtgaagcatacgcttgtgcattaagcaaagtttacacattcggcccgacttttcgtgctgaaaactctaataccagccgccatctggcagaattctggatgcttgaaccagaaatcgccttcgctaacctcaatgatgccgccacattagctgaaaatatgttgaaatatgttttcaaagccgcattggcagaacgtgctgatgatctgcaattcttcgctgaacgcgtggataaagatgttatcacccgcctggaaaaatttattaattctgactttgctcagattgattacaccagtgccattgaaattctgcaaaactgcggccagaaatttgaaaatccagtcttctggggagttgacctttcttcggaacatgaacgttatctggcagagaaacatttccaagctccggttgtcgtgaaaaactatccaaaagatattaaagccttctatatgcgaatgaacgacgacggtaaaactgtcgcggcactggatgtacttgcaccaggcattggcgaaattatcggcggctcacagcgtgaagagcgtctggatatgctggataagcgtctggaagagatggggcttaataaagaagattactggtggtaccgtgatctgcgtcgttatggcaccgttcctcactctgggttcggactgggctttgaacgtctggttgcttacgtgactggcgtgccaaatgtacgtgatgtcatccccttcccgcgcacaccaagaagcgcaaacttctaa

SEQ ID NO: 7114 - DNA, 1146 bp, Photorhabdus luminescens
atgaagggtagtatcttttccgcggtcatcccagtgctgttgactgctggtgtagcaaatgccgctgaaatttataacaaaaacggtaataaactggatttttatggcaaagttgatgtacggcatcaattcgctaaaattacccaaaaatcagatatataccctatctatagtgaagatggtgatgcaagctacgtccgtctgggtttcagaggtgaaacccaaatcaataaccaactgaccggttatggtcgttgggaatacaatattcaggccaaccaagttgaggcaaatgattccgaaggtaatcaaacccgtctaggtttcgcgggtctaaaattggctaaatatggttctctagactacggtcgtaattacggtgttctctatgacgtcaatgcctggactgatgtactgccagtattcggcgctgattccatgtcgcaggctgacacctacatgactaatcgtgctaccggtgtcctgacttatcgtaatacggatttctttggtctggttgatggtctgaacttcgccctgcaataccaaggtaagaacgacgaagacagcaaaaacagccgcaattcacacagtaaatacggtagtcgtagtaagcccaatggtggtagtaatggtgacggcttcggcctctctgttacctacgatataggcaatggtatcagcgtaggaggagcctactccaatgctgaccgccctattacacatgaaaggctcgttacctctgtcgctcgtggtgaaagggctgaggcatggaacgttggtgccaaatatgatgcaaacaacctatatctggctgccatgtatggcgaaactcacaatatgacctctttcggctaccaagatattgtctctgcaaaaactcgtaatatcgaattaactgcccaatatcagttggattctggtctgcgcccatctctggcatatgttcaatccaggggaacaacttttttcactcatcaagactgggtaaaatatatctctattggctcttattataactttaacaaaaatttgtctgcctatgttgattacaaaatcaacttagtccatgacacccccttcaccaaatatcttgatgtcaatacgaataacgctgtgggtataggtttggtatatcaattctaa

SEQ ID NO: 7115 - DNA, 1167 bp, Photorhabdus luminescens
atgatgaaacgcaatgttcttgcagtagtaatcccagctctgttagctgctggggcagcaaatgcagctgaagtttataataaagacggcaacaaactggacctatacggtaaagttgaagtccagcacaaattcgctaacaacaaaagtggcgaagatggcgataactccttcgcccgtctgggtttcaaaggtgaaactcaagttaatgaccaactgaccggttttggccgttgggaatacaatatcaaaggtaaccgtgcagaaggtactgacgaagaaaccaaaacgcgtttagctttcgctggtttgaaactttctaactacggttcactgaactacggccgtaactacggtgtggtttatgatgtcaacgcttggaccgatgtgttgccagtatttggtggcgactcaatggcgcagactgacaacttcatgaccggccgttctactggtctgttgacttaccgcaataccgatttcttcggtttagttgatggcctgaattttgccctgcaatatcagggtgaaaatagtgaaaacacggctaatagccgtatcaaccgtaaagacaacggtgatggttacggtttctctgcaacttatgacgtaggttatggtattagcgtcggtggtgcatactctaactctgcccgtacttctgcgcaaaaaactgcttttagcgttgttgaggaaaaagggaaaaaagacaaacctactggctctactgccttgggtgatcgcgctgaatcatggaacattggcgccaaatacgatgccaacaacatctacctggctgccatgtacggtgaaacccgtaatatgactcgtttcggtggaaatgttgacggtgtaaactgggaaaatatcgctaacaaaacccagaacatcgaattgaccgcccaatatcagttcgacttcggtttacgtccatctctggcatacgttcagtccaaaggtaaaaatctgctcggtgacgatgggaaagaatccagcagccgcgatctcgtaaaatatatttctgttggtagttactactacttcaacaaaaacttgactacctatgttgattacaaaatcaacctgctggatagcaatgaattcaccaaagcaacgggtaccagcactgacaacgttgttggcgtaggtatgatttaccaattctaa

SEQ ID NO: 7116 - DNA, 1191 bp, Photorhabdus luminescens
atgtttgagaaaatcaccgcagcgcctgccgaccctattcttggcttagccgatagtttccgttctgatcctcgtacaaataaaatcaaccttggtatcggtgtctataaagacgaaacaggaaaaaccccggttctgaccagtgttaaaaaagctgaacaatatttactggaaaacgaaacaacaaagaattatctgccgattagcggcttagccgaatttggccgcgtaactcaagaattactgtttggcaaagatcacccagttgtcacagataaacgcgcccgcacagcacaaagcccaggcggtaccggtgctttacgtattgctgcggatttcattgccaaacagactaatgctaaacgagtttggatcagcaacccaacctggccaaaccataaaaacgttttttccgccgctggtctggaagtctgtgaatataaatactatgacgctgaaaaacacgcgctgaatttcgaagacatgctggcaagcctgtccgaagctcaggctggtgatgttgttctgttccacggctgctgccacaatccgacaggcatcgatccaaccccggcacaatgggctaaactggcagaaatgtctgcggagaaaggctggttgcctatttttgatttcgcttaccaaggatttgccaagggcctaaacgaagatgcagagggcctacgtatttttgcgaaaaatcataatgaactgattgttgccagctcttactccaaaaactttggcctgtacaatgaacgtgtcggtgcctgtactattgttgctagtgacagtgatacagcagaaaaagcgttcagccaagctaaagcgattatccgtgctaactattccaacccacccgctcatggtgcatctattgtcactaccattttgtcaaatgaagacctgaaagcagcttgggaacaggaactgaccaccatgcgcgaacgtatccagcgtatgcgtcaactgtttgtcaataccttgcaggaaaaaggggcaaaacaggatttcagctttattattagccaaaatggtatgttctcattcagtggcctgacaaaagaacaagtagaacgtctgcgtgatgagtttggtatatacgctgtcagttccggtcgtattaacgtcgctggcttgacgttagaaaacatggctccactatgtgaagccattgttgcagtactctaa

SEQ ID NO: 7117 - DNA, 648 bp, Photorhabdus luminescens
atgaaataccaaattattcctgttactgcttttatgcagaattgtacccttatttggaatgaagatagtaaggaagcggcaattgttgatccgggcggtgaagcagaaaaattgatcgccgagatagaacgtcgtggtctgaaattgacccagattttattgactcatggtcattttgaccatgttggtgcaacagcggaggtcgctaaacattttaatgcgccggtctacgggccacagcaggaagatgctttctggatcgaaggcttgcaagctcaaagtcggatgtttggcattgaagaatgtccatcatttgaacctgatcgctggttaaatgaaggtgatgagctgcgggtggggggcgttgacttatctgtattgcactgtccgggacatacgccagggcatgttgtgtttgtgaatcatgtagataagctgatttacatgggagatgtgctatttaaaggaggagttgggcgtagtgactttccacgcggtaatcaccggcagttaattaactcaattaaagataaacttctgccacttggtgatgattatgaatttattccggggcacggaccaatgtcgacgctaggtcatgagcggcagactaatccatttttacaggatgaagtaccaagttggtga

SEQ ID NO: 7118 - DNA, 549 bp, Photorhabdus luminescens
atggatattatcgatcataatcgccgtaagtggcttagtgcgggagccgctgctttaggtttgagtttgttgccggggcatacttttgccactctggccactccacgcccacgaattttacgttttgacaacttacatacgggtgaaacgattaaagccgaattttttgacggctatcgttacaacaaagaagagctggcccgcttggatcatctgtttcgagattaccgtcaaaatagcgttaagactatcgatcctaaattatttgatcagatttatttgctgcaaatgatgatagagattaataagcctgtacaacttatttctggttaccgttcactggtaaccaacaatcagttgcgcaagcaaagtaaaggagtggctaaacagagttaccatactcgcgggcgggcgatggattttcatattgaaggtattgagcttagtcgtatctgcaaggctgctctgaaaatgaaagcgggaggggtaggatactatccacacagtaatttcgttcatattgatacaggtcccgtcaggacgtggtaa

SEQ ID NO: 7119 - DNA, 1356 bp, Photorhabdus luminescens
ttggctgggtttcagccgcaatttggtcaatggctgattgaactcaatgatgctcaattgagtcagatgggacgtgatctcatcttatcggatgctatgctaggttatttacaatttgtctcagatgtcggccaccagggccaacgctggctctatcgcactgtaccatacaaaattgtattaccttcaccagtcgttatagatcagtggcagcaagctattatcgatcataatgtggccgcttatgtcgctgcactggcaccacaacatccgcaatatgaaaatatgcgcaaggagatgatgaaacaactggctgatagtaaaccgtggccacagctttctggtaaaagtgcgctaaaaccgggacagaataacgctgatgttgctgtgttgaaggaaatacttattcgtcttggtatgttgaacgaactgacagctcaatcagatcatatctacaatcctgaactggtgactgcggtaaaaaattttcagcattggcaagggttggctccggatggtgtaatcggtaaacgcacaagagattggctaaatacttcgcctcaaaccagagcaggattgatggcgcttaatatccagcgtttacgtattatcccaggagatgtgtccacaggaattatggtcaatattcccgattattcattgcattattatcttaatgatcaggaagtgttggactcgaaagtgatcgttggtcgtccaagccggaagacacccattatgagtagtgtgctgaataatgtggtgattaatcctccctggagtgtgccaactagcctggcaagaaaagatatcgcaccacgagcagttgatgatcccggatattttcaacggcgaggatacgttatcttttcaaattggcgtgctgatgccagtgtaatcgacccttacactattgattggaacgtgattacgcctgctaactttccttatcgaatatggcaagctccggggccgactaactcattaggccgttataaatttaatatgccaaattctgatgctatctatttgcatgatacgccgaaccataacttgtttaacaaagacatccgagcgatcagctctggttgtgtacgggttaacaaggcttcagaattagcaagtatgttattggaagatgtaggttggcatcagagtaaagtgaataataccctgaaacagggcaataccgtttatgttaacatcccacagcgtattccagtttatttgcattatttaactgcttgggtagatgagcagggggtacctcagtaccgtaccgatatttatgattacgacaatagtgtgagacaaggtgcccagtttttgtcaaagttgttacctttacaaaactaa

SEQ ID NO: 7120 - DNA, 1617 bp, Photorhabdus luminescens
atgtccacacctatacctgccattaaacgtctcgatcatcttggccttatcgccgctttttgtcatgaagccggtttaccccgcatgattgatgccattatcccaaaatattcatcgcatactgtctctcacggcgacgcttttctggcgatgatccttaacgggctggggtttcacagccggacattgcacatgttttccggcttttttcaacataagccgattgcgcgtttaattggtgctgacattgaagctgaacaccttaatgatgatgtgctcggccgtacactggatgccttatatgaagcgggggtgtcggaagtttatcaggtgcttgctgagcaagtggttgataaattagggttaaatcccgattccgttcatttggatatcacgagttttcatgtcgatggtgactatgacagcgcattgggagatgacacaaaacgtattgcactggtgccgggttatagccgggatcaccggcctgaactgaaccaggttgtccttgaactgatttgcgaaaatcaggcaggtatccctgtctatatgcaggctatgagcgggaatacgaatgatgccaaagcctttgcccagacgatcaaaacccatattcaatgcctgaaagcagcacaaaacagccgctactttgtggccgatgccgccctttatactgaagccgcgatcgcttcgcttcatcagcaaaaacaacgatttattacgcgtgttcccctgacgatcaaggaagctaaacagtctctcctgaacgtgacagcggagcaattcagccccatcagtgagggctattcaggctgctgggtgacgtcatcatatggcggcgttcctcagcgttggttactggtgaacagtacggcggcagaaaaacgtgaaaaccagactttccggaaaaacacactcagggaaacagaaaacgagtctaaacagttcgacaaactgggcaaaaagccctttgcctgccgggaggatgccttacaggcactgcatgattttgagtctcaatgccagtttatcggcatcgcctcgccggaaattcaggcgattaccgcgtatgcggggcgcgggaaacccggcaagcatcaaccccccaaatcggttcattatcaattagccggtcaggcttatacccggttagacaaggtgaagcaggccagattgcgggtcgggaggtttattttagcgaccaatgaacgggatgaaggacggcttgatatggcggcgttactggctaattataaggcacaacaaaaggtggagcggggttttcgcttcctgaaaagtccggaattcctgacgtctgccattttcctgaaaaaaccggagcggatagaagcgctgttaatggtgatgacatgttgtctcatggtttatgcggcgctggaacataaaattcgccatgaattgaaacaaaatgtgccgtttttccccgatatgaagaacaaaccgacacaatcccccaccgcgcgttgggtatttctggcctttgaagggatcagcacctttgaatttcaagaacataaaatggtgacaggaatgcaatcttaccaccatgagcttttgagtttattaggtgcacaatataaagcggtttattcctga

SEQ ID NO: 7121 - DNA, 366 bp, Photorhabdus luminescens
atggtaaaaagagcgataaagccactgtgtatttcggttatttgtagcacattgataatagctggatatgctttagctaatcatcagaataggcttattgaaggtgatattcaaaatctgccaaaaatgcagattgaaaagatatctgagacaacaacacctgaacgcgtacaaattcaaactgctacaatttcagaaacagaacgccgtaaaatgctgcgaagctggttaccggcaaaaattaagccggttttctttgaccgattggttagtttgtactcctctaaccagatgcaacctttgtggcaagataaaatcgcggttcaacgctttgaaccgtcattccgcaccgtatttctgatttaa

SEQ ID NO: 7122 - DNA, 675 bp, Photorhabdus luminescens
atgacaaatacacctaaagcccaaacagatcacaaaagaacccgttcgtactctagaatttcaggagaacgagttaacgagctgttaaaaattgctgctcaagtatttgcagaacggggttttgatggtgccagtatcagtgagatggcgaaacgtgctaatgcttcgaagggaacctattatagtcgatttccttctaaagaagagctgttagtcgctgttgttaggcagagaatagaagaagttgaaggcggtcttgacaagaccatgaatcccgaacccgatattgggaaagcattaaccatttttgcagaggaagttttctcggtaattctttcagaaacaatgattgcgaattatcgggtagtcactctggaggcccaacgttttccgcaactaggtaaaatctattatgaaaaaggggtcaaaaagatagtagattttcttgtcgaatatctggtacgaaagatggaggaaggaaaattgagcatagtagacccgaaaatctccgcggaggtgtttatcgatggcatcattggaacgccaaggcttaaggctactttgggcattggtttacctactccagaggagaaatctcagcgaattgctatcgctgttcagtcatttctcgctgcatatggtacttcctcatgtgatagcacttcttcatcatga

SEQ ID NO: 7123 - DNA, 1314 bp, Photorhabdus luminescens
atgaacgttggaataattggctcagggattggtggagcatgcctggcacatggcttgcgcaaaaacggaataaaggtgaaagtctatgaacgaggctctgctacatcatccatacttcccggttatggaatttacgtcgatacattcggtcagcaagcaatgcaggaatgcctcccagaaaccaactggctaagctttaaaaagatttcaaagcctgttggtggacagacaagattctatgatgaacatctgcatcttcttctcgcagctcagagagatatttaccaagaaaatggggaaatcattaccgaggatcggatgtcaattagcagatctgaacttctagaagtactcaatgagggactctcagataccgttcaatggaacaaaacgttcgagcgttatgaacacatgccaagcggtaaaatcaggctttttttcacagataaaagtcacgaagatgtcgatgttcttatcggtgcagatggaagcaattcaaaagtacgcaagcagtacctccccgcgataaaaaggctggatattggcgtcacgctcaccgttggacgtgtgcgccttacccaagctcttgctgactcattgcctccctatttgctggatggttcgcccaacaatattgtgccgaaaagccccggtggattgtttgtctctctatggcgtgctccaatcaatactcaggtaaaagccacatcgacagaaattggcgattttgtcatgtgggcctatgcagcagcaacgaacagctatccgaatacgattactgattttcctgcgaaatctctgtgtgatctgatctgctcccgcattgcttcatgggacccaaacctgcataccctgattaaacaaagtgatatggaaaacctctctgtgattccgttacgcagtatggatcacctcttaccctggcgttccagcgctgtcacgctacttggtgacgctattcacaacatgacgccaatggtcggaatgggagcaaacatagcgcttcgagacgcacttttgctcactcaaaccctgactcgggtagcatccggtcatgaagatttaatcaaagcgatttcagattatgaacaacaaatgcggacatatgcgaatgaggcggttgagatttcattacgtaccgcgttaaatgcagccgatcgttcgatgatcaagagaatactatttcgaactgtacttcgggttgcacaaactttaccgccaataaagcgagtgctattcccgataacaaaatctgcgcaacaccagggaaaaataaaattaggtactacacactcttttagtagtacgcaataa

SEQ ID NO: 7124 - DNA, 1098 bp, Photorhabdus luminescens
atgtcaatgaccgattttgttgccagactgaattatcgaatggcgaagatacagttcagtaagaaagtgcgggtccgtttctatgagcatctgattatgatgctagagaatcgtgtcatgctgattgatgcattacgtgaaatgtacaatattgccagcgacgaaggccataagcctaatggtggttatgcgttggtgttgagtagttgctatgaatctgtgagccagggcagcactttgtcagagagtttgctgcaatggattggtcctaatgaagtggcggtgattgccgcgggtgagcgctccggtgatatacgtagtgctttcatggatgcgatcgccatgatcgaagcgggtagtaagatccgtagtgcggttattggtgcatctatttatcctgcggtgctcattgggatgatatgtgtattgttgcacattgtagcaggcagtttggtaccgaaattggctgcggtttctaagccagaaacctgggatggtgcggcttataccctatatttgatggggacatttgttaatgactatgggctctattcactgatatttctggtgatattgttcatattagtagcattatcgttaccttttcttggggggcgattgcgaacggggcttgaccggtttccaccgtggtcactgtatcgaacgattcatggcagtatgttcatactgaatgtgtcgttgttgatccgctcagggatgatgttgcaatctgcgttagaattgttgctggaacaggcgggttcacgctggttgtatgtgcgtatcgcggccacgcttgaacacatctcaatgggagccggttttggtgaggcgttgcgcgataccggttaccgttttcctgataacgaggcgatcagttatctgcggctgttgtcgcggttacagggatttgatcaatcaatggcaaagttcgcccggcactggctggatgaaacgatcattaaagtccagatcgtgacgcgtgggtttctgttcgcttcgatcctcatgatcggtggtatgttgatgctggtggttaccgcggtgtctggcattgagaatgccattgagcagtcgttatctctgccctctgtttaa

SEQ ID NO: 7125 - DNA, 1563 bp, Photorhabdus luminescens
atggaaataacaagctccgatctgctgtgtatggtcaggcagggcgcaaaagttttatccgccctgagcggtgcacttgaaatcgagttagcgaaccgtagtttgatctgtctgattgagttgcctctgcaaaaggggcagtgtgtgctggcggtgtctgcttcccatcgccttgatccccatgtgctggcctatgaggaaacggttaaaagacacggtttcatctatcagattgtcacctgtggaatggggagcatattggaattataccgtcttaacaaaagccacaatcatagtcatggattaggcggaacggaatccgatgttcagcgttatatcattcgcttaattggcgaagccactgaggaacgcgcgtcggatttacatattgtcgctcgtcataattattgtgagatccgttgccgtattgatggttatttacggccagtaggacagttgcgcccggaggaaggattgcggctgtgtgcgacgatttaccaaagtatgtgtgatgtggcggagccgacgtttaagccgatgcaagcacagcgtgcgcgaatgaaggatgaatttcttgccgagtgcgggctttctggggcacggattaacacacgtccccttgatcgtggcatgttaatggtgttgcgattgctgtacgcggatagccccggtaccgtgtgcaccctaagcgatcttggctatttgccggaacagtgtcagatattggaagagctgatggaccatcgggccggtgtggtgctgctatccggcgcgacgggtagcggcaagagcaccactttgaaagtcgtgatgcagaagatgataaccgagcaggccggcattcatctgctgacacttgaagaccctcccgaatatgagattgaaggggctaatcaatcgcctatcaccggcgatcggggtgatagcgtggttatcgagcaagaatgggcaatggcaatcgctgatgcaatgcgactcgatcctgatgtaattatggtcggtgagatacgcgatgcagtgacggcaaagatgactttccgagccgccatgaccggccatcttatttggaccacgatacatgcaaacgatgctttagcgattttgccccgcttgcaggatgaggcggtgatggcgtcactattaatggattcgcggctggtgattggtttggtcagccaagcgctgattcaggtgttatgtcctcattgtaaagttcccctgcaagggcatgagcaagaagtctccgagcgtttgctgaaacggctgaatctttattgtcagccggaatcggtttgtctacagggggagggctgtgactattgcaaacagtgcggcaccgtgggccgaaccgtcgtggcggaagtggttcagacttctcctggcttaatgcaagcttatcgaaccggtcatcatcatgaggcaacccgatattggattatggagatgggcggtatcagtaagatcgatgcacttattcgcaaaataaatgacggaatgattgatccccgtgccggagagcgtgtgatggggccgattgtcccggtgagctatcaaatcgagtaa

SEQ ID NO: 7126 - DNA, 543 bp, Photorhabdus luminescens
atgcaaaaaattagtcagtttatgatcagtctgttgatggtgccggtattttcgttggcatatgcacaagtatcatccactgagcgttcagcaattcaggcgaaacctgttgcacagaaaccggtattgtcagaggtgacggcgaacaatagcgttgcggcgcagttggagaaattacagacagatttgatgttacttagagccgaaactgcaagggcaaatgcgcaggctgaactcgataaaatttccagaatcgtgaatagaggcagtgctgttaataacgatttgcctttagttaagtcaatctttggacgtaacggtgggttgattgccacgctccggtttcgtttggggggcattatggatgtgaaagcgggtgattggttaccgaatggttataaggtgatccgcattaatacgggggtggtgacttttgctaaacaaggacgatgctatgacgtgggccttaccgcaactaacgatgcatcgttgttggatagtcttgattttatggtagcgccaccgttgccgttaagtcgttaa

SEQ ID NO: 7127 - DNA, 1293 bp, Photorhabdus luminescens
atgaccgaaataggcgtggagcatgtcatgcaaatcaagttatatggtaagactctggtggctggcatcatctggcggccaccggtagctgtactggcgcgggctaacatgcgcagaaatgggattgcagcggggtttaccctggccgttcgccatcgtgttggacgaggtgttcaggttggttatgcgccgaaggaggcaggagaacccggttattattcattggctgctgttttggctaaagtggtggataaatctaactggatcggcgcgtttcgtttgtctgatgcgtgttatgcgttagtggcagtacatcagggtgcaatcatggctggacgtgatttgatcggaacgcgcgaagagatcgagacgaagttgcgtgagacggtacagttagtagaggacgctaatggggtgtggcatgccatctatgcaccgaaggagtttgaatcgctgtggccggagatgccattagagcagctattatcgaaatcgatattgaaaaagtctgtcggtcagctagaaagtttaaccggtgaaatgtcgaagtatcaaattaagctctttgccatgaccaccggtttaacacttttgttggggggcggttggtggatgtggcatacctataagcagaatagggtggtggaagtgccggatttaccccgtgaggtggtggaaaccctaccaccgcatccgtggcttgcacaaccgcaaatggcacggcaattctctatatggaagagagtgttagccagagtgcccttgtcgctggcaggttggcaggttgaatcgataagtttggatactgatacagtttccgtgagttatcaacgtcatgaaggcatgccgatcaatatttttcaggttgctgccatcaatattttccgggctggtccggtgatctccaatgggggagaacaggcacaggtattgataccgattgagcagcagagtgaggatcaggcagataatgatgatgtattgcagtcgtccgatcaggcgttgattgaattgatctcttattttcaggcgctagatttgccccctccggttttgactgagagtgcttccgttttgccaccaccaccgcctcccagagcagagggagagacacaggtgtgggccaatcccgattggcagacttatagttggacgctctcttctcagttacctccagatgctttgttttcaggtaagccttttcctggattgagggtcactagtgccaaagtggtgttagctgatggttttcctcagtgggaactcaatggagttttctatgcaaaaaattag

SEQ ID NO: 7128 - DNA, 1605 bp, Photorhabdus luminescens
atggctattcagtttttgacgttttacagatggttgttgttgccctgcgtagccgctggactgtcaggttgtgcagcaatcgagaaggtcgatcagcaggcagataccgagatggcgcaagcgactgagattattaaaggattacgtaatagtgccgccgcaatgtcggtacatgtgcatgaacatggttattgggtgtcaactaaggagatcccctcgaagaaggagagtgaaaccgtctcttgccggttgacccttgaggaagctgagccaattaccttgggtgagtttgcagataagatcaaacgtatttgcggtgtaccggtggtgatcagcgccgatgcccggcttgctgtctatcccggttcggcatcgggtgaaagagggagtgaacgaggtgttgtggtggtcaattcaggcacaccgccggtatctggagagggggagccggaagtgttgaaaattcatgtgaattggcatggatcgctagtggggttgctcgattcggttgtttcgtcgtccggtttgcattggaaagtacataatggtgcagtgcatattttcaaaacagagacgcgggtgtttcaaatatatgcattgccgggtacggatgcattgtcttccagcgtgaccgcgacgacgagtgcgacgttcggcagtggcgtaagtgagggcgatagtggtaatagcggtagtactcaaaccctggcaacttctttgacccgttcggtgatggatgagatccaaaaaacggtatcagccatgctgacgccgggggaaggtaagctaacgctatcaatggcgacagcatcgctggcggtaaccgattcgcccgaagtactcgataggattaaggattacattgatcaacagaataaattgctgaccacgcaggtggtgcttaatgtcaagatcctgaatctgactttcgatcgtgctgatcagtatggtgtcgattggtcgctagcttataaaagtgctcgtataggattgagtaatgagagtgggaatagtgttattgatgacggcggagtcagtaccaatattcatatcctcaaaggaccattcagtgacagcactttgctaattaaggcgttatcagcgcaaggcaaagtatccatagtgacgcaaccttcggtgactacgttgaatttgcaggcagtaccgatgcaggtggcaactcagaccggttatgttgcatccatttccaatacttcaacgccacaagtcggtacttcggtggggattgagcccgcaacagtgacgacgggttttaatatgttgatgctgccttatgctatggctgataagcaaatattgttgcagtacaacattagcttgagcgatttaaagaggctggagaaatttggcaaggaagagaccggtcaggtgcagttgccgacgatagatttacgcgcattcagtcagaaggtgcggctgcattcaggtgaaacgctggtgttatcagggttcgagcaacagtcagataccagtgatcgcagtggtttaggtagcccggataatcagctcttgggagggagccgtcagggtaaaaggaatcataatgtgatcgtggtcatgattacgcctatagtggtagattaa

SEQ ID NO: 7129 - DNA, 342 bp, Photorhabdus luminescens
atgaataaattaatcgcatctgtttttatggcgcttgtctctctgtcaaatgtcgccgtttacgccacaccagtgccaacatcggttcctctggcggtagtgtggacagcaacgtcggggcaaacgctgcgtgatgttatacaagtgtgggccagtaggtccggttatgaggtggtgtgggatgcctcctatgattttccgatccgggctaatctgcgtttcagtggcacgttcattcaggcggtgagtgcgttgttcgacgcttacacaatggcgaatcgtcctttcagcgtcgatatttatcaggaacagcggcttgtccatgtacaggctcaggggtaa

SEQ ID NO: 7130 - DNA, 93 bp, Photorhabdus luminescens
gtggttgctattccgcaagcgggctttctttgggtgactgacccattaatgggttgtttggctgctgattttcctttggagaaagatcgatga

SEQ ID NO: 7131 - DNA, 525 bp, Photorhabdus luminescens
atgtggccattagcgattgttagcgttgtcgttgtgttttttatgcaattgatttttggtcagttgttgcatgaagtgcgtgtgcagtcagtgcgtgccaggaccgatgtcgcagcgctgtttcgtagttatgcttcagccggtgtgcaattacttgatcatcatgctcaaggaaaggtcaggcgtcggaatatgcagcaggcattaaccactttgcatatggagtgggtaaacaccgatgcttggtgtgacaatttttccagtcaatgtctctgggggggatttatttcaggggctcatgtctatattttccgcaaaaatatcagtgccggtgacaatgtgttgttgcacggggctttcgcggaattgctgagatggggagcagaacccgatcaaatcggtttcaagcgtggctcttggcttatcgatggcaaaggaaaacgcatagaaaaccaacttgccagacgattaccgggtgatgttcgggaatttgtttctgacggggcgctggtggaaatattgtag

SEQ ID NO: 7132 - DNA, 1176 bp, Photorhabdus luminescens
atgcatgatggtaagtctgtatctgtattgatgatacgccgccgtaatgccggtttcactctgttggaagtgacgattgcactcatggtactggcgtcaatgatggtggttggtgtgatttatctgaataggcagagtgacatgttggtaaatcaggtggtagccgggcaaatccagcacctcggcgatgccgtggtggattatgtcaataataattacaccgctttaactcatgggcccacgtcggcaccaatccattgggcggagatgcgcccttatttgccacccggattggatcaaaatacggtcaatccgcttggtcagaaatatgatggcgtattacgtgtcgttgtgctgcctaatggcaaaaaacgcatcgatccgctgatttataccgttccagcaatagaaggcggaaaacagccggatgtggcggaacatgcaatgaaaatcgtgcaattgattggcgttggcggcctctatctcgattaccaagatcgtgacagtaacaatccagtcacttattggaacagttatggtcaggtcaatgtaccgaaatcttttgccggttttttcaatcaacaacctactgaaattgggcgtattttttacgccccatttgttagagatgcatcaacttatggtcccggtactttggccggtgatttgcttcatcggcaaaaaatagatgggcatccagagtggaataagatggagaccagcatcaacatgagtggcaatcgccttgatcaggtcgatacgctgtcgatgcaaggaaccggtatggttgagggggtgaataaggtcgctttcgcttcccgttttcagcaaaaacaatcttatatcgcgcaaggtaatgatggtgcaatggttgttaatccaacacatggcacgttgtttattttggatggtaatgctaatcccgcgaggaaaggcaccttggctgccggtgatgttcatgcagataaaaacgtggttgttggtaataacttggtgataagtacgaaaacaggcagttttgccggtgggggatgtccagcgttaggtagtgtatccatgagtaaacagggagagttgttgatttgccagcatgcgggttttggtatcccaattttgcaatggaaagatgccgcagggcagaggacagaaggcagaggacggagtatggaaagatag

SEQ ID NO: 7133 - DNA, 795 bp, Photorhabdus luminescens
atgatgatagggtggttgcaatcttctactgggtgtttggtgctggcatcagggttgctagggttgtgcgtcggaagttttcttaatgtggtgatctgtcgcctgccgatgatgattttctctgaaatcaataatgaggttgccagctttaatctctgttttccccgttcccattgtccacgttgcagccacgtgttagcggcccgcgatattattcccctgttgagctatttgcaccaaaaagggctctgtcgatactgtaaaggtgtgatttctatacgttatccactggttgaaggcgcagtagcggtgctcttttccttactggctttggagttggggtggagttattcgttgttggggtttttagtgctcagttcgatgttggtcgtactggcagtagtcgatttcgaatatctgctgctgcccgatcaactgacactttctttgttatggctagggttgctgtttaatttgccatccgccggttttgtcgcgctgcctttggctgtcgttggcgcagtttgtgggtatctgtttttccggctggttgagtggatcgcccggcgattgactcggcgcgatgcattaggcatgggagatgccaagtttctggcggcgctcggtgcctggctggggttggaagcgcttccagttgtgattttgctggcggtggagttcacgctggtaagttatctggcaatgcggtggttacgcagaattaaaacaccacagatacctttcgggccgggtctggcagtggctggattaattgtcgcgctttgtcatcggtag

SEQ ID NO: 7134 - DNA, 573 bp, Photorhabdus luminescens
atgaataagaaagtcaatgtattgcgtggtgccaagcgtcaattaggttttacgctgattgaagcattagttgtgatgattgttggtattgtgatattagccgccgccgccgcggggattggtaagttgtttcgggcttcggaaatctcaaccgaatcgtcgaatattactcagatggccgcaaatttgaagtcaattaaaaatggtgccaaaggctatgacagtttggataacaaaattgctattaattacaaagtggtgccgaccaatatgactcaggatggtaagtccgggattatttttaatagttggaatggcaaggtaaccatttctccgggagataccaccgctcagacttttaagattgagtatcaaaatgtgcctgatgaggcttgccagcaactttcgctgaaattgcgagtggcgggttggtcgaaaatgaccgtgggtggtggaggtgggaaagggcaacagtcagccacggaaattaaatcagattcgactttggcgcaaattgaagcggcatgtaatgccaatgatgcgaataccgtgacgctggtttctgccagttag

SEQ ID NO: 7135 - DNA, 1788 bp, Photorhabdus luminescens
atgactctatacaaaagaatatttattttttttaccatactgctcacccctataatctcatgccttgctgatacgaaactggatacgttatctatagaggataataaggctatatctgaacttttagaaagcattaagacacctaataaacctaaagtgatcaatttaactattccttcacatgaggggggctatagagcactgttacgctacagtggtattactgaacagaagcatcctgatgtttttaaagatattgagacgataaaagcaaagcaacatgcactgattaagagtgggaaatcgcttgaaatacatcgctcgaataaagatcctgagaattttttcgggcagcctgtaatcataccttctaaagattataaatcaatttcagctacagtttttaattctctttactatcctgatccttcccttccttcatcgttccaagactcacttgtggtttttgcacttgataaagataaaaaatctagacaggtaatcgcatcaggttcaagcagtatagagggtaaggaagtacggagccatacaacggaagccgtttctgaagaagatatacttgatggtattaataatcctaatcaatcttctgttatcgctgttgcaacatatcagggaaaaataaatggaataagtctcagtgacgggccaattatcatgaaatcaaatatactttatttcgacgatgttccaaaagagatgtgtaacacgtcacctaatgcacctgattatgtaaaaaagaagatatgtaacacggaccctggttataaggagtatttacagcatatgcgcccaataatcgtttgcttaaatagatcaaatcctgaacgcggagctcccgatgcttgcgattatggtccaatgacgccagagataccatatagtaatacacatatcaacatggaaatcattggcagtgttgaattcgatgactatatcctgattgatgagaatagaaagcctaagggaaccaagagattaccaataggcgcggatttgacgctggttggccttgatactggtggtggatgtaaagcaagagaaattgataaaaatatattttgggaacatgtgacggttgatgaaagcggtaaaagattgacatgggatttctccaaaggctcaggttacgctaattttgggtcaatatgctggaagaataacgagaggtatgtattggatttacaggctagtattctcacaactcctgatgagactgataagcaagcatatcctattcaattcacttatactaataagggcggaagtactccgtctgatttacaattcatttacccacccattaacatccaatatggttgtattgctgaaggtacattaatagatatggctgatggttctaagaagaaggttgaagatatacgttcaggcgataaagttctaacaaagcaaggtggtgtattacaagtgaaaagccgtattgtaggtcacgatactgaatttgttgatttaatttataataacgatgaaaaagtttcactgactccaacgcatcctgttgcaacattacgaggaatagtcaaagctgatgaacttaagatcggtgatacaatatatacacgtgatggtcaaactacccttagctcagttaaattaagaaacactgatccattaaacgtatataatttcgtgttagaaaaaacagatgataaaagtgaattgttacttgaagatgctttgctttttgctggcggcattttagtcggtgataataacctgcaaagaaaggtatcgatagcaaattga

SEQ ID NO: 7136 - DNA, 450 bp, Photorhabdus luminescens
atggctataactccagaacaaatcgctgttgaatatcccattcctacttatcggtttgttgtttcagtcggtgacgaacaaatcccatttaacaacgtttccgggcttgatgttcattatgatgtcatcgaatataaagatggcatcggtaattactataaaatgccgggccaacgtcaatcgatcaatattaccctgcgtaagggggtcttccctggcgacaccaaactgtttgactggattaattctattcaacttaatcaagttgagaagaaagatattgcaattagcctgaccaatgaagctggcaccgaaatcttaatgacctggaacgtggcgaatgcattcccaacgtcattcacctccccctcttttgatgccaccagcaatgaaatcgctgttcaggaaatagcactgacagcagatcgtgtaaccattcaagcagcttaa

SEQ ID NO: 7137 - DNA, 1065 bp, Photorhabdus luminescens
atgaccacaataacaacctaccccggtgtttatattgaagaagacgcttcgctgtcactctccgttagttccagtgcaacagcagtgcctgtttttgctgtcgcaggtgacaatccattaatatcaggtaaaccctatattcgcattagtaactggctggaatatctgacactaaaaaatgaacaatttgatcctgccaatacacttgatatctcactgcgcgcttattttattaacggtggtggatattgctatctggtccaaaccacagatttagaaaaacaagttccaaagctggatgatgtcacattgctggttgctgccggagagaatattactactgctgtaagtacactttgcaaaccgggcaaaggtttatttgctatttttgatggtcctaccacagagttaaaatccgatggcacatccaacagcgattatgacccaaatccttttgctgccgtttactacccctggttaaccgccgattggactactactatcgatattcccccaagtgctgctattgctggtgtctattgctctgtcgatagcacccgtggcgtgtggaaagcaccggctaatgtccctattcaagggggattacaacctaaatatccggtaaccgatgacctgcaagcacaatacaaccaaggtaaagcactaaatatgatccgcacctttcctaagagcggcacactggtatggggcgctcgtactcttgaggacaacgataactggcgttatatccctgttcgacgcctgtttaacagcgcggaacgggacattaaaaacgccatgagcttcgcggtgtttgaacccaacagccaaccaacttgggaacgggtacgcagtgccgtcaataactatctgtatagtttgtggcagcaaggtggtttagcgggaaataaaccagatgacgcttactttgttcaaattggcaaagatatcaccatgaccgatgacgatatcaaacagggaaaaatgatcatcaaaatcggtatggcagcggttcgtccagcagagttcattatcttgcagtttacacagaacaccgctcaataa

SEQ ID NO: 7138 - DNA, 1392 bp, Photorhabdus luminescens
atgccaacaataccaacttatcctggtgtctatattgaagaagatgcgtcattaaacctttctgttaatcaggggaacacggcaatacccgtttttattggcttgttttcgccaaaaaacaccaacctaaaatcacaagtaacacgcgttaatagctggctggattttactaatctgttcaatgcgggttgtattgcaccaatcacaattaaatcaacaaaacgggcttcaatgcctgccccaactcttttagagaacgttaaaggtgatacagcagttgttgctactcctggtatctctgttgatgcagacaataaagatcccacttacacttacaaggtaatagttaactacacgaccagtagtgatgccctaaaactttatttccaaaatggtggcgggccttgttatatcctgccacaactagataggttaactcagggatttctggactcaatccctgagttaattaagcaggctttagaaattaccttgatcgtctgccctgaatgggattctggttaccagagcaaaatatataacagtctgacatcttcattattaaatgccggctatttccttatcgctgacaaccaggataaaaacactgcactcattactgaagtagcatcacaaactgcgacgtattatccggcagttaaagtctcacaacttatccaagcagaagatagccagatagcagtatcaggttatgaagatgcaaaaacaaaatccgatgaagtcaaaaacctggcgcaactcaaagagaaaaacccaactgtctaccaacaagcggttcaagcaatacaggacgaaatagccgccaacggcaacatcattcctgtcagtgctgtcatggctggcatatattgtgccactgatgccagccgtggcgtctggaaagcgccagctaatgttgtactgagtgggatcagtgatgtggccgaacggcttactgatgatgaacaaggagagatgaattccaaaggcatcaacgctattcgctatttcagccacaaaggttttgtcgtatggggcgctcgtactctgcaaaacgatgacaactggcgttacattcccgttaggcgtctctttaatgcggcagaacgggatatcaagcaggccatgcaatccgttgtctttgaacccaatagccaacccacctgggaacgcgtgaagtcagccattgacaactatctttattccttatggcaacaaggggcattagcgggaaataaacctcaagaagcctacttcgttcagataggtaaagatgtcaccatgtctgacgacgacattaaacaagggaaaatgattgtcaaagtgggcatggccgcggtacgtccagctgaatttattatccttcagttttcacaacaggtagcacagtaa

SEQ ID NO: 7139 - DNA, 1185 bp, Photorhabdus luminescens
atgataatggagataacacagccgagcgtcaccatcacagaaaatctgatattcccaaagcaaaatgactcgtttatcggtataccggtttttatcggttatacctcatcgccggtcgataaaaccgctatcaagctccacagcctggccgatttcgcccggtcatttcctgagtcaggattaatgtactattccgtgcgccatttctttgaaaacggcggtcagcaagcttatgtgctgtcactgggtacggagcaacaattaagcgatttttcgtcattaatcactgcgctgcaacaagcgtggctggcacaaacgattgccgcagagaacgacattaccctgattatcaccccagatgttatccgctttgatcagacagaaatctccgatactcaacgcgatctctggttacaactttggcaatcggtgctcaatctttgcaagagccggcgcggtatcatggggttattggatgccccagacgatcccacattagccgctaagtgtttacaacagttttcttccgctgatcgacaatggggcgtcgtatactggccgctgctaaaaagtgcctatcaggataatacacaaaaccctatcgtgctttcaccaaccgccgcagtggctgccgtcatccagcgtaacgataaccaacaaggcgtctggaccgcaccggccaacatcgcgttaagcaaagtgatcagcccggtacgcgcttatatcgaagcgaatgccctgtttaacccggatggcacctcactgaatctggtccgcagctttcccggcaaaggcatcaggatctggggatgccgaacgttggaaaatacccacgactccccctggagttatattcagacccgccgtctggtttcctatatcgaagcttatatgactcaacttggccgagccttcgtctttgaacccaacaacgctatcacctggatgaaattcaaaggtcaagcccacaactggctacgtcagttatggctaaagggtgggctacggggcacccaagaagatcaagcatttgaagtattactgggcgttgacgaatcaatgagagaagcggatctgcgggccggaaagatgatcatcaagatcagactggccgtgttaattccggcggaattcattgagctgaatctgacatttgatactcgtaccggtaccatacctagctaa

SEQ ID NO: 7140 - DNA, 459 bp, Photorhabdus luminescens
atgcataacctctataccccgtcagtatcacaccgttttatcgccagttttctgtttaacaatatccctagcccactggatattgcctttcagcggatatcgggcctgagccgcgaactgcaaacgacccaatacagtcaaggtggagaaaacgccagaaatgtctggctggccgaaaaaatccagcatggcagtctgcatctggaacgcggcgtcatgacggtgacaccactcactctgatgtttgatcgcgtcctgcggggcgaaaaagcggtttatgccgatgtcgtcatcatgctgctgaatgaaaattcagtccccgtggcaagctggacgctaagtaacgccctgccggttcgttggtccactggcgactttgatgccaatagcaatgccgtcttggtgaattccctagaattacgttatcaggatatgcgctggttaggagtgaaagtatga

SEQ ID NO: 7141 - DNA, 684 bp, Photorhabdus luminescens
atgagcttaattgaacgcggcttgtccaaactcaccctgactgccttcaaagaccgggaggggaaaatttccgtgggaagtttacaggcgatgtataaccccgatgccattcaactcgattatcaaacccattatcaacaggataaaagtgttaaccataccagaaaaagtagtcactatgtgtcatcgccaccggctggcttgtcattagtcctgctgtttgatgcttccatgccaggcaataatatcccagtagaaacacaactgacgaccctgaaagccttatgcgccgttgatgccagcacccatgtgccccacttcctgaaaatcaaatggggcaaaatgcgctgggaaaacaaaagctatttcgctggccgggccagtggccttaccattaattacaccctgtttgaccgggacgccaccccactgcgagccagtgccactttatctttggttgcagacgaaagctttgttattcaggctactgagcagcagttaaaatcaccaccggtcaccacaatcagtgtgacagatatgctcaccctgccgttgattgccttaggcgctggcgcttctctggcaagcgacattgattatctctcccttgcctggcaaaacgatctggataatcttgatgacttcaccccagggcaaacactgcaagcacaggagaaggcatga

SEQ ID NO: 7142 - DNA, 1602 bp, Photorhabdus luminescens
atgaaaatacctgagataaccatcaagataagcggcaaaaccctcaatcaatttacggctatcaacctgacagtaaaccactacatcaatggtattccctcggttaacatcactctgggtatcgccggcgatgctaactatatttttgatgccaaagcacaggctgaactggcaaactgccgccccaataatgaacttattgtacagatccaaaaaaccatattgtttaaagggatcattgttcggcaagcacttaagttcaaaggccaggatagcctgatgaccttgacggcaaaacatccattgcaaaaattaacagatggcctccactcacagctattcagcaaacaaagtgatgaagcgattatcaagaagctattcagtcaggccggtatacaaacgacgataaaacaggcccctcagctcaaaaccgtgcatgagcaaatggtgcaatttcgctgtaatgactggacattcttaaaaagccgacttatcgccactaatacctggctgctgcccggcaatgaagtcgttacactgataacacctaaagcgctgaatcaatcaactgtacatacgatccatcagagcaccaacgatcaggacattgtactgtttgaagcaaacttgcaatgggataaccagcgcagccccaaaacggtcagtgtacagtcctgggacattacccaacaaaaactgtctcagacaattcaggtgaagaatagtgggcttggcagtaataaactagcggtagacagcataactacactgaccaataaagactggcaatgggtttttaactatccactggataatgagcaagctaaatatcttgctcaaggcattatggataacctgcgaagtgataacgtctccggtagttttgaagtcgaaggtgatagctgctatcagccgggtgatgtcctcgcgctgaatggctttggtcaggggatggatggtcaagggattatcaccggcgtgagccagataattaatcagcgtcaaggctggcgtacccggttaaccttaggtatgccgccagatgcagaacaggcagttcctccggttaaagagttgcatgttggtattgttgaaaaataccaaccagacagccagtcactgggacgtattccggtcaagataccggcgttaaacttaaccaacagtgtactttttgcccgcctgggtaagccttatgccagccatgaaagcggattttgcttctaccctgaaccaggagatgaggtgattatcggtttcttcgaatgcgatccgcgcttcccggtgatattaggttccatgcacaacccgaaaaataaagctccggtagaacccagtgaaaaaaacccaatgaaaaccttagtcatcaaacaaggagatcatcaacaggccttagtgttcaataatcaagataaaactgtcgcgctcaatagcggaaaaaacacgttatctctgcaacaagataaagatatcacgcttaattcagctaacaacctcatcaccaatgctcaggaaattaaaatacaggccgaaaaatccctgtccgcctcaggaaaatcgggggtagatattaaaggagcaaagattaacttaacacaataa

SEQ ID NO: 7143 - DNA, 720 bp, Photorhabdus luminescens
atgacaaacaaaatattagccgatatttatggtcggggctgggcatttccgccacagttttttataggtgaacgtattccttatgaagattatagtagtgatctgaataaatatctgagtgaaaaaaaaatcgaagctgaacagatagtgaaaatccaagcttgtataaaagagagtgtaatgtgctacgacttccacgcaaaaatcacatctactcaggtaagtaagcaaacaaatttacctaatcccctgaatatattggttacctataccttaggagacagcgaaatcagccaaaaaattcaaggtgtccttcgtgttagccaagatgatccgccacagttttctataaaagacaactctcggactggcatagcaatagcagaaggcacccaaaatgttctccagagtataaatattctttttctgacggaacccggtgaacgaattatgcgtgaagactacggctgtggtctgaatgattacctgtttgccaatatcagtgatgaattgatgacagacattcaaacccatattgaagaacgggtattacgctatgaaccacgcgcagaaattacctcgattcaagtgaaccagagaacaaacttgcccagcactctacatgttcaggttacctatgcgttgagaggcagcgacatcaaccaacagattgaaggcgtccttgaggttaatgaaggccgggtacaggtgagcttatga

SEQ ID NO: 7144 - DNA, 417 bp, Photorhabdus luminescens
atgagtaaacaactggtgattgatggcgacaacctgctattcgaaccattgtttggcaaccggcaagtcacaattctgggacctgcgaccattcgaggcagcggacacgccaaaatccaaggcaaaaaaatcgttattgtgggtgacgaaaaaaaagtacagcttcaagcgcaatatattacccctagccatccgatacctggcatgggcatagtcaccattgcccagttagacgcgaaccagcaggtaaacttttgtcgtactcccgccacggcaattgttgtcgggcaacaatttatcgcccgttttaccccgacccaacctgctaataatccgtcaactggcccagatgtgacaacgccgagtatgggcaaaggccgctttattgccagccaatatgcggtcagtgccgggtaa

SEQ ID NO: 7145 - DNA, 2718 bp, Photorhabdus luminescens
atgggacaagccgagttagataataaactctctgctattgtgccagatactgtatttaaacttgatgaaagaagtacactggatattttaaactggcttaaagcttatgctgaaaaaatccctttcgatcaagataaaaatcaattctgggatagtttttactttattcaggaaaatactcctgaagaattagaggatatttaccaacatgctaataaagcagatggccttttaccgccacatcaagcttttgtttttgcttttttaaagttattagaaacatccaaccgattattaaataccttcccggcccgacaccgcgatctttattaccgggaattactgggactaagccccagaaaagcccaagcggatagcgttgctttaggcattaccttaaatacagataacgcagaatatcttatccctaaaggaaccctgtttgatgccgggcaggatagcgtcggcaacccattacaatatacatcagaaacagatttactagcgaatcaaggggaactgaccgacctgcgttggtatcggaaagataaggatagctggcaatcgacaatacctcttagcctctcagataacattgcattacctgaaaatggtattcaactttttagcccgacagccaatgatgtggcagtgctatccggttatctgattaaatcatctttattttctatgcccgaaggagaacgccatatcacattgacgctggaaaacgattgggaaggtcaagctgaacatctcaccgctaaaatcagtacaggagatcactggttatcgttgtcggtaaatcctaatcgtactaacaaaaacactattgagcttgaattatcatccactgatgatcctatcagcccgccagataatcttgatggcatgacattcgacataccggtattaaaactaggcactactcagaaacccatgttgcccaaaattaccgggattgaaatcaatattaacggcaaccgcagtgtgcgctatgcctctgatggtggtatcgaacagacggataccaccagctcccccttcggtcaatcaccatcactgggttctggttttaatctggttgccccagaatggtatggcactgaaaacgcaacattgacgatgactcctcaatgggttggcttaccgacaagcagtttttcaacatggtatgacaaatataatccgaaacctgccagtaatggggtgttcaaagtacaaggttacttagtcacatctcaaaagagagacgttcttaatgatgctaaatctcagccattatttgatggaacaggtgccccacaagggcaaagcctgacatttatcttgccagcaatgcattatcccctcacagacagcccatcgcccaacgaatggcctgcatccgtgcgcatagaattggccgaacaggattttatgcacgcccagtactggcaaaatcccacggataaaaatgttccttatacaccacaaatcagtgcattgcagattcaattcagcactacagctaaacctgaacaattcaccgtttacccgctgacgccttttggttgggcaaacacaaacgaagatcccccttcattcactaacgacgcactctatttgggtttcactaatgtgttaccgggacaaactttatcgctatattggcagttagagggctttaaagcgctcaacttatcctggttttatctcaatcagagcaacacttggggttcattggatcagctagttgacgaccagacccataacctgtttgaccaaggtacctggcgcacactactgccacaggacgcgtcaaatcaggcaactctgatgccaacaggacgatactggctgaaagcagaaataacccatcaggctgaatctcaggattacccaaaaattaaaggcatactgtacaacgccgccacagctaccttaatcaatgcagaactcgttgaaactgaccactttatcaatggattacccgccgacagtattacacaaccggtcaatgcgttagttgctatcgatagtatcaatcagccttgggtatcctggaacggccgcccggaagagacagaacaagcctttctgacacgggtttctgcccggttgtcccaccgtaaccgggtactgagctgggataacattgtcactttattgaaagaacaattcgtcagcttatttgatgttaaatacccttctgccagtgagttaactaaaatcccggcacagaaagaacaacaactgattgcgatccccgacagtcgctacaaagataacgatgatgcgctacgcccgattctgaatccggcccgactggcggaaatggtcgactggataagccaactcagcagtccctggaccaccctcaaaatcaacaacccgacctacgttgacgtgctgatcagctatcaactggtgtttgtcacagggattaatcccgactacggccgtcatcagttacaacaggaactcagtcgaaaatatatgccgtgggcagaagatagcgctatcggcgtcacaaccggtaatcgcattgattactacccattattagccacgattcagcagtcacctttagttgaacgagtcaccaacttaacgttgaaaaaatcgtcccaaaccgcaggagcagtcggcgacagtgtagaagctgctgataatgaagtactgattttggtttggtcagaaaatagttccactaataaaggagcagacagtgaataa

SEQ ID NO: 7146 - DNA, 2907 bp, Photorhabdus luminescens
gtgaataatcaagacgccctgtttcccatcgttaaagacgatatcgcctttgagaccttactcactcaagctaagacggtcattgagcaacagtctgggcaactctggagcaataccgaagaaaatgatcccggtattaccttattagaagcctgttgttacggcgcatctgatctcgcctatcgccattcgctacccctgcgcgatttgcttacccccgaaaaacaagagcagacactgggtgatggcatttttccacaggaattcggcccacaacaaatgctgacctgtggcccgatcactgcggaagattatcgccgggctttactggacttacatagcagcgacaccgacaatgaaacaagtgaagattattttttctttaacgatgtacggcttatttgcgaacctgaaagtgaacgttataagtactggtataacaaagaaagccgtgaatacagttttattcaagaacaagaacaagaacaagaacaagaacaattacagttaacactaagaggaaactattggctttatttacttcccaaccgggaaacggaagatgataaaacactgactcagaaaaggctcaatgatttcctaaaagataaccgtaatctgggggaatccgtcagtaaaattatctggctgcaacccgtggatttcttattgcagcttgatattgaacttgatgatgatgtcagtgatcttgctgatatatttgcccaagtttatatgacaacggaacaaatggtgcttacaagcccattacgctatagcacccaagctatgattgaacaaggttacagtaatgaagagatatttgaaggcccttatttacatcacggttggataccggaattatcggcggctaaagattacaccaagccgacagaattaaagctcagccatctggctaatcgtttactggctattcccggagtacaaaatattacccgattggcattaggcaagcatgatgaaaacatttctccgctggcggacgatagttggtcctggacaatcgctcaaggatactatcccaggctatggggtaacgatcccttagacttaatttcctcatcagcaagcccactcactattaccgccaaaggcggagtaaaaatcactgtttctaaacaagatatagagaacaaaatcattgcagaacccttgattgaaacacagcccgaattactaaactggggcaaacatcgtaaagtcctggattactatccagtcagcaataagttacctgcctgctatggattacagacctatgcggagactcaacaacaagtgcacttgcaccaatttatgttgccttttgagcaaatgctggctaatggctgtgctgaactcgctctcttgccgaaactgttagcatttaaacaacggggaaatacggtatacggtacacaatggccttttaaagcgaatactgtcggtcagcaagtccatcaggaaatcatgcccgatttaatcaaacaactaaataatgattcccaaattaacagtgatgacggtatccattcacaaaattacacaaaagaactatcaatcctgaattacttattggaatattttggtacccatcgtgcggccagaccactcactctggattcactggattttctctctactcaacgtggctatttggcacagcaacccgaattaacctatcaacgtaataacattcgtattgataaagtatcagcgcttcagaaacgtattgctgcccggcttggtttgggaggaaagtgtttcgaggaaacctcaaagctggatgaacttcctttctacctgattgaacatcgacagttattaccggtaaaacctgacacgaaattcgacaaggagcaaaaacccgataagctgaaaataaaaagcgtacccaattctaaaaaccaacaattaatcattacccaaaatgggacaacgggccagctattgtatggtcaggtcattaatctaattattaaagaaaaagaaaatcaagatattagagtaaaattcatattacgaggccaaatgatcacagatattacaggagagtcatttattcttgacacccgtaatagcacggctttagcacgtagtttgatcgacgtacagaacgcatataatgacggtaatctatactggtgtaatagcccggtatggatggaagatatggattatcaactggtttatgccagtgagatatatcaaacgggaacagaaaatgaacgctggattacctccagcccccaaagtcccttccctgccatgatcgaagaaaatgatgaaattacactgaaatatgtaattaccccatccgggccgaagaaatctgatcatgaactcaaggcaaacgtcattaaatttgatcgtattcaaggcaagatattaattaaactcacccaggactcacaggataattttccattagcggcagacgcctggcgctatcgttggtatttctccagcgaaaaatatgctttagccgatcgcttttcatttgtagtcagtatggtgattaatagccaactcgttaaaaatgacgacgttgatccttacaaattggaatcttgggcgaaaaccgaaattttggctgaatttcccgctcatctttccatgattatccactggctgtcaccggaagattttaaagattttgtcagtacctatcaacgctggcaaaataatggcgctcccttaggggacgaggcataccatgttttagaaactttaaccctgggaagattaccttctgccgcaacaggtattggtaatatgagaattgctaccgcacagcaacgtattggtgtggttggtgaatccggtaaagaatggaatacagaagtgattattagtaatcagttagtgtatgtaccttatactggagaaaatttaaataaacgctga

SEQ ID NO: 7147 - DNA, 1305 bp, Photorhabdus luminescens
atggaaaaagaacataatccatataattcagaaaccaatttagaaaccaatttagaaaataccaatattaaatcaacgggtccttcagccgatgatttaaaaagccgttttaaagaaggcagtattccattacaaaccgattatgccgacttgattgatattgcggatattggccgccgggctgtaggcaaagcaccagatcaaactaataatccaaattcagcgttggaactagatgacaactctgggctaaaaataaaaattaactccaccggcggtttaaaagcagatcaagacggattaagtgtaaaacttaaggataaaagcttattagctgaccctaacggattagcagtcaatgccggtagaggggtaaaaattaataacgatcagcttgaagtcgatggttatcatggtattgaaatagttaacgaaggtgtaaaagttaaagcaagtaatgggattaatgttaatagcgatggtgtttcagttaaagcgggtaatggcatttctgttagtggaaagggagtggaagttaaggctaaagataaaggtagtatttccgttgattcggatggtatagctgttaagtattgggatggtggaggtattgtagcaactgataattccggtctctatttgaaattagaagggggaaatacaaacaatggttggagtggtgtaagtggtttgagcctgagtaaaaatggtgtaaaagtcaaagcgggtaacggtatcacggttgattcaagcggcgtcagtattgatcccaaaacagtactccctaaaggaatgattgtgatgttttctggtagtagtgctcctactggatgggctttttgtgatggtaatcatggaaccccagacttaagaagccgttttgtcatgtgcagtgaaactatttctgaaacagggaaaagcagtaataaagctagtgggagtggaaatggaaaaaactattccagaaatacaacatcaacgacggtttctgttagtgttactgtgaaaaatacgacattaacagaatcacaaataccttatcattaccatattggaggtatgggttattggactaataagggaatgaaatatggtaccgaatattacagcgagtatgcttcatatatacgtaatgatctggatagtgtaatgcaatcagccaatggcgcgagatacgcatacacatcaccctcaggaggaggacaaggacataatcacccagcaacagcatcatccccttcacatgatcatagcgttaatgtaattccaccttattacttattagcctttattatgaaactttaa

SEQ ID NO: 7148 - DNA, 1656 bp, Photorhabdus luminescens
atgacttcggagccaaatctgttaaatcggattaccattactattgaggctaacaatcagcaggtagctaagaaagtattgcatggctccctgcttaatcaagccaatataaataacttattcaatacattattcactcaatatcctattaataaggatatctatttagaaacattaaccttggatcttggcgaaataaattttcacgactttaattcattgtttcctgctcgcctcaaggttgcactgattaaagcactaagccaatatcagataaataataaggaagaaattcacctgaatgcaccaataccaaataaaatcacccataattcttctttatctggtgataataactttattaatgcagagaatttcattcacttcttatatcaaaaagatccccaattaaatccagcggaggcaatagcgaataataaaaacagtgatatcaagattaagaaattaataaatcaattaacacgaatagacaacaaatcagcattactattagcaaaaagctgtttatctgaacatagcctgcaacggcttttaactatcaaacaacccgctttattgagcgccatcaaccgcagattatccgaaaacataaataaaccacaacaccaagaggcgcttgcctcctccgggcaactgatactcaatgcactggaatatatacagcgacataatgcacaggaactagttaaacccgatgcaaaaatcatctcgcgtattacaactgagctcaataacggtacacttaatgccgcgtctgttattacattatttcgccaggctatgaccgacaatatcccattaaatagttggctaaaacaactctggcaaacagttgctatttcacagctttgccaacagcacctgtcggttgaagaacaccaatatctattggcatgctttataccaaaccacacggataaaaatagatctgagataaaaccctccatgggtggcgataactcttcaaacgatcagaaatatcaacatccgacaaatcaaaaagtaattgccgaagatccgcaagcattatcaatatcagataacccatcggttattagaggaaataacctcaacccacttcaaaccatcaacaaaccatactctgaacagactttattacctgaacacctttttccacgcccagtaaataatgccgggatattaattttgtggccgatgctacccgcactgtttaatcaacttggcctgctcgaagcacagaaatttatccatcatcaggctcagttcaatgccgttgatttacttgactacctgatttggggcaccgaagagagaccagcagaaagaaaagtactgaataacgttctgtgtggattaatggccgacgaaatgattgaattaactcctgttgagccggaaaaacagttgataatagatcaatggctggatgccgttatcagccaacttcccggctggaaaaaattaagccgtaatgatgtccgtcaactgtttttacaacgaccgggtgaattactggcagacgagcaagaaatcaaaatctccatccagcatcagccatttgatgcgctgttggctgattggccgtggccattaaatatcgccaaacttccctggctggatcgccctttaaagattgactggaaaaatatttag

SEQ ID NO: 7149 - DNA, 2085 bp, Photorhabdus luminescens
atggattacccgctgataaataaccacgatataacggcaaaatcacactggatttatccccatttagaacgtatcgatttgcggttacagcattactattatcaaaaatgtgataaatacgattccttaccggaaagttttttactcgcagaagataaattagaacaacgtctggcaagaccacagggcattccccattggctaactaaaccagatgatattatcagccacccagcagcaaaggaaaatactgtccctgatgcattgtcattattagtcgaacgtttcgaactgactgaatttgaacgggataccttgttattaggtttattgccgcattttgacagccgttatcatgcactatttgctgctctcaatggtaacagtaaaaaacagtggccgagttttgctttagcgattgaattatttagccaatgtcaaagtgatcgacaattactgcaaaacagttttttaccgcaaacaccattaatcaacaaccaactactacggcttaataatcaagaagaaccaatctggttacaaacacaatttttaactcataactcggtatggcattttttatcggggcaacgagttattctaccgccattaataacctgtgctaattggcatactccagccccacataattggtatccgcaaactctttatcattcatttaagaaaatattattgaatgacaccaacgaaatacagccattaatcatactcagaggaaaacaggacagcgccagagaattagcagtcagtaatattatggcatctcatggcatcaataccttaacgcttgatttagcccttctgccagatgacgagaacccaacggaaataactcacttgctagcggatacaatccgagaaacccggctacataacgcttgtttattaattcgcaatttttctttgcttacagaggcaaagaaaatattacatcgcaatttatctattttgttgaatcagccgaaattacgtgtggtttgcttggcagagccgggagatatattagtctggattaagcaccaaccaatggtacaaattaatatgcccattgcgacattggcggataagcaaaccttgctaaaagcaagcttaccggagaatatcgcgcaaaaaattaatattactcggctttgtcagcgcttctcttttaccgcggaaacattaccactcattgttgaagaagcacatcaataccaaatgattcggcaaccagaaggccagctggaagaaactgatttacgtaaggcattaagtttccgtgctcaacaaaattttggtaaattagcccaacgaatcaccccaaaacgcagttttagcgatttagtggtttcagatatgttagcgcaacagttaaaagagatcgtcgcagccattaattaccgtgaccaaattctaagcgctggatttcaggaaaaaatcagctacggtaccggtattagcgcgctattttacggtgaatcaggtaccggcaaaacaatggccgcagaagtgattgccgggtatcttggcgtcgatttaattaaagtagatctctcaaccgtagtgaataaatatattggcgaaacggaaaaaaatatctcccgtattttcgatctggccgaagccgattccggggtactatttttcgatgaagccgatgctttatttggcaaacgcagtgaaactaaagatgcccaagacagacatgccaatattgaagtttcttatctgctacaacgactagaaaattatccgggattagtgattttagccaccaataaccgtagccaccttgacagcgcgtttaatcgccgctttacttttattactcgttttacttaccctgatgaaaaattacgtaaaaaaatgtggcaaaaaatctggccggaacaattgacactatccaatgaaattgacttttcccatctggctaaacgggctgatttaaccggggctaatatcaggaatattgctttattgtcatcaatattatcagcagatgataactgtcaacaaatcgaaaataaacatatagaacgagccgtgatacttgaattaaataaaacgggacggctagctttttaa

SEQ ID NO: 7150 - DNA, 903 bp, Photorhabdus luminescens
atgacaatcataattgcttctgataacgcgattatcgaaattaatcaagcattaaataccattttatcccaatatttaaatattactggtcagaatattgatattcgttttgatctacccgaaattaattccattcaatcagaaccgacggtcagtgtatttctttatgagatacatgaagatctacaattacgttctgccgaatcaagacgttataacccatcaactaacacattattaccgggatgggtcaatatcaattgtaactatttaattacctactgggatgccagtaagccctccagtgacagctccagcccagacagccaacccaataatcaagcggcacaagtgatgactcgcattttaaatgcattaattaacaaccgtcaattaaccggtcttcccggtgcctataccagaattattccacaacaagaaaacctaaacagtctgggtaatttctggcaagctctcggtaatcgtcctcgcctttctttactttattccattactgtacctatgaaattgaaaaatattgaagacaatgtaatcccagtcagtaaaatatccgcttctgtggaccaaaaacccaatctggataactcacaaataaaccaggctttaatagataaattatgtgtagaattaggcggtacagaagatgtacgtcttgccttggctaaagtgaatctgacaaccaaacctgatacagaaaataatcaaaatcaggaaaatgaaagtgttattgttgaagtttcgggtattactagcgtaacttatttaccacaaataaaagatacacttaccaaatggaaaagcagtcaagaggctattgttaagataaatggtgttagcattgttgtttctaaagaaaatgctgataagctaattgggatttaa

SEQ ID NO: 7151 - DNA, 483 bp, Photorhabdus luminescens
ttgaaaaaagaagacacagaaccattggaacttataggcgttactgttgaaggaataatcgaggaaatgaaaaaaactgatgaaaaatatggacaatatgaatacaaagatgaagatataacgagttatcctatagcttggacgaatcctgataatggaaaaatttatataggaataaattctccagaatactcgcatttgaataataaaggagaatctgagctcaatttggcaaaaataatatctacaataattcatgaaagccttcatgcgtcatcacatcagcataaaggcttacagtctcaaactgatacaggagcagacaacctaaactatgatgaatatgtgacagactattttgcaagagaagtttataaacaaatattacccgataaagactatgttgccaattgttttactaagggattaggcggtgaaaataaaatatggggaggaaacattgttgaatttatgattcaataa

SEQ ID NO: 7152 - DNA, 843 bp, Photorhabdus luminescens
atgttcagcacatattctagtaaaaatgacaaccaaacaataaataaaataaacacagaagaaaaacatgaaaacacagaaaccgataatcacttggaaataaacttagagcatacagggaaaagtaaaccggatatagaaccaaaagatgtcactacaggtaccattaatgcaggtactcttctatataaaacgaccgctatcccagagtttttagacaacgcaaagagcctgggtttagcagaatatgagaaacgacataaagatatacaagattacttaaacctaggtaaagctgaggatgctgagaaactcaaaaataagtcacagtgggcagggcaatatttcgccttagaaaaaagttatgatgaatatgcaaatgaagcgccagatagctacaataacctactgaaaaacgctggaaaagacctgctggaaaatacagaagaagtcaaagttttcttgtacacatttaaagtaacaaaagatatcaaagttctcaaaccacacaacaattctaattcttactatgtaggcgatacagaaggttgggaaaaagcaaaagagataatgaatgatgttcaatctcaatccgaaaagaatgacaatccatttcccgagttaaaaaacctagaagacaaaaattttctcctggaagaacttggagagaaaggatatgcatggatggggccactccatgcaaaagaaggagcagagaaaggaactgaattctcttacgagctcgcaatcagtccaaacttattacgccagcacctcactttggaatcagaagaattacttggtacctacaagaaccgatatggttattgggacaagaagtga

SEQ ID NO: 7153 - DNA, 1023 bp, Photorhabdus luminescens
atgccaagatattctaattctcagagaacccctacacaaagtactaaaaatacccgtagaacatctccatcatcaaactcttctactgaacatctttcactttcaaatgctccgactaatgactcctccgttcgccaagaagttaaggaaaaatttatttgggaaggtcattgggaaggtcatatggaggcaattgaaaaagcgtccatacttggtaattttgctgtcagttttcgggccgcaggtaaaccaacactcgaagctttgggtaaaggtgccgcagctaagggccatgatattctggaaaaaaccattaaacccggttcaattgaaaaagcatatcctgaaaacgaagcttcagatgtcataaagaaagtgcgggaagcgggtattgaaggttatgtcggtcactggaataaagaaacgggacgtctcgaaggtatttatatgagcagcggtcacggtttaccaaatggacaggtcaatgggaaaatttatcccatagatttaaacaacctcgaagcaagtctggctcctttaaaagaaaaaaagaactgggctgcgctgcctttcaccggtgattatgatatgcatgacatgattagtttcaccactcagccacattcagtgccatccaattcatcagaagaaaaaaaaattatcgatcgcattaacgaatatatcgctaaatctgattcaaaccggccatttgaagatatagaacataatgttatcaggcatggtcctcaagtaagctatcctgcttttgcgatggataaagaaaaaaaagagataaaggaacgcgggggaattgttaaagccgttgctgaacccggcgaatttccggttgctatcgtcagtaaagggaaatggacaattgccaataatatcaatgaactggagcaattctataatagtattggcgcaaaaatgaaagcaagctggaaacccggcgctggaaatcccggattcgtttccaatccacaaaaaccaggaatggcccgatttagccggaaaaaataa

SEQ ID NO: 7154 - DNA, 1023 bp, Photorhabdus luminescens
gtggcaaagaaagaaaaacggcctcaccatgacgcgctattcaaacattttttaacacagcccgaaacggccagagaatttctatccctttatttgcccgaagagatccagttgttgtgtgatttagccacattgaaactggagcccggcagttttgtggatgagcatttacgtcaactgcacagtgatgtgttgtactcggtcgaaacggcccggggacagggctatatctattgtctgattgaacatcaatccacccctgacccgttgatggcctggcgactgatgtattacgccatgttagcgatggcggctcacctgaaaaaaggccatactgaacttcctttggtggcacctctgctgttttatcatggtgagattcggccgtatccttactcaaaccggtggctggattgtttcacgctccccgaacaggcggctcgcttataccgtcaggcgtttccgttggtggacgtcagtgtgctcagcgatgaagagatcctgacgcataaaggggttgccctgatggagctggtgcaaaaacatattcgctgtcgggatatgcaggaatggctcctccaattggtggaactcttgaatgcggggtataatacaactgagcagcgcaatgtggtgttacgctatattttactgaatggacatacgccggatctctcacaatttgtccatcaactgattgaacaatctccggagcatgaaacgatgttgatgactattgcagaacagcttgaacaaaaagggcttgagcgaggtatcaagcaaggcattgagcaaggtattgagcaaggtattgagcaaggcattgagcaaggtattgagcaaggtattgagcagggtattgaacaaggtattgagcagggtattgtgcaaggccgagaggaaggccgagcggaaggtaaactggaaacggctcgtgccttattacggcatggcgtgagtttggacattattgtcaccagtaccggactgagccgggataaaattgaaacgttaaagcattaa

SEQ ID NO: 7155 - DNA, 402 bp, Photorhabdus luminescens
agcattaaattaatcttctctttgtacagcaaaatgccgatatttaagatcggcatttttgttcttattcaggatgatggttacttttacgtttgcccggcgaagctgaaaccggtcagactgaaacagcaatctccggagcatgaaacgatgttgatgactattgcagaacagcttgaacaaaaagggcttgagcgaggtatcaagcaaggtattgagcaaggtattgagcagggtattgaacaaggtattgagcaaggtattgtgcaaggccgaaaggaaggccgagcggaaggtaaactggaaacggctcgtgccttattacggcatggcgtgagtttggacattattgtcaccagtaccggactgagccgggataaaattgaaacgttaaagcattaa

SEQ ID NO: 7156 - DNA, 171 bp, Photorhabdus luminescens
ttgcttttttatgaactctgttcggatgcaaaaatcaataataaacggttacatcaggcgcatgaacatcaaggttttgacgaaacagaacaagttattttgtttccgcaaacagctcacctaatcgcattccccatgctcttaaggtgtcatttctctccctataaataa

SEQ ID NO: 7157 - DNA, 450 bp, Photorhabdus luminescens
atgtctacaactccagaacaaatcgctgttgaatatccaatccctacttatcggtttgttgtctcaatcggtgatgagaaagtcccctttaacagtgtttccgggctcgatatttctcatgacgtcatcgaatataaagacggcaccggtaattattataaaatgcccggccaacgtcaggcgatcaatattacgctgcgtaaaggtgtcttctccggtgatactaaactttttgattggcttaattctattcaacttaatcaggtcgagaaaaaagatatttcaattagtttaaccaacgaagccggcactgaaatcctgatgacctggagcgtggcaaatgccttcccaacttcattaaccgctcctgcttttgatgccaccagcaatgaagtcgcggttcaggaaattagcctgaccgcagatcgagtcactattcaagcggcttaa

SEQ ID NO: 7158 - DNA, 1077 bp, Photorhabdus luminescens
atgccaacatattcctatcccggcgtttatattgaagaggacgcttcacccgcactctccgttcgttccagtgcaacggcagtaccagtctttgctattacaaacaacagttcattaatatcagataaaccctatattcgtgttagtagttggatgaactatttaacactaaaaggcgaaccatttgatcccaagaatatccttgatgtttcactgcgtgcctattttattaacggcggtggatattgctatctcgtcaaaactaaagagttagaaacacaagtgccaaaacttgacgatgtgacattattgattgctgccggagaagagatcaacgaggtggcaggaaaactttgtcagccgggcaaagggttatttgccatttttgacggcccacaaagtgataccgatataaaagaaccagaaaaagctctcaagccttattcccctacgccttatggcgcagtttattacccttggctaaccgctgaatggggagaaaataaagccgccattgatattccacccagtgcagttatggccggtatttatgccagtgtcgataacagccggggggtctggaaagcgcccgctaacgttgctattcagggcggcttacaacctaaatacccggtaaccgatgatctgcaaacgcaatataaccaaggcaaggcattgaatatgatccgtacctttcctaagagcggcacgctggtttggggggctcgtacacttgagaacagcgataactggcgttatatcccggtccgccgcctgtttaacagtgcagagcaaaatattaaaaatgccatgaatgccatggtatttgaacccaacagccaacccacttggaaagccgtccacagcgctatcgataactatctccatactttgtggcagcaaggcgggttgatgggcaataaagccgaacaagcttatttcgtccaaatcggtaaaggtctcaccatgaccgatgacgatatcaagcagggcaaaatgattgtcaaagtgggtctggcggcggttcgtccagccgagtttattatcttgcagtttacgcaaaacatcgctcaataa

SEQ ID NO: 7159 - DNA, 1485 bp, Photorhabdus luminescens
atgccaactacaccaacttatcctggcgtctatattgaagaagatgcctcactggctctctccgttagccaagggaacacggcaatcccggtttttattggccgtttctcaccgaaaaaaatcagcgcaacacctgaaataacacgcgtgagtagctggttggatttcactaatctgttcaatgtgggttgtattaggtcggtagcaatcaaatcaactgagtctactccacccccttccctttctgttcctgagaaaagcgaaggtaatgcagataacaaacacaataatgtagaagacaaaagcaatgcaaaaatcaaacacattgcagaaaccaaaaacaatgcagaaactaaagctaatgcagaagtccaggactatgcagcagttgtccctgtaacaaagcctactcacatagacggtaaaagcacccattacattcatcaggtgattaccgtaacctacacgacaagcagtgatgccttaaagctttatttccaaaatggtggcggaccttgttatatcctgccaatttctaattcagaagataccaacacgctggcattaatccctgagttaattgagcaggctttagaaattaccttgatcgtctgccctgaacaggatcctgcttatcagagtgcaatatatggcaacctgacccctttattaaaggccggatattttcttatcgcggataatccgaataaagaaactgcacttagcgttagcctgcaatcacaaaccgcgacttattatccggcagtaaaagtctcacaacttattcaggtggaggagaataccgtcacggtttcaggctatcaggatgcaaaagttacccatctggcagagctcaaacagcaaaactcaggactctataagcaagttatcgaggcaataaaacaaaaaattgctgataacaaaaaactcattcccgccagtgcaatcatggctggtgtctattgtgctaccgatgctcgtcgtggcgtctggaaagcaccagcgaatgtggttctcagcgggattagtgatgtagcggatcgactcacggaagatgagcaaggcaccatgaatcaaaaaggtatcaatgctattcgctatttcaccaacaaagggtttgtcgtctggggcacacgtactctgcaagatgatgacaactggcgctacattccggttcgacgcttattcaatgcggcagaacgggatatcaagcaagccatgcgatttgccgtttttgaacccaacagtcagcccacctgggaacgggtccgctcagcgattgataactatctccatcaactctggcaacaaggggcgctggccggtaatagcccgcaggaagcctattttgtccagattggtcaaggtgtcaccatgtccgacattgacattaaacaaggcaaaatggtggttaaggttggaatggcggcggtccgtccggctgaatttattatcctgcaattttcgcaaaatgtagcacagtaa

SEQ ID NO: 7160 - DNA, 1206 bp, Photorhabdus luminescens
atggaaataaaacagccgggcgtcaccattacggagaacctgatatcccagcaacaagatgaggcgtttatcggtgtaccggtttttatcggctatactcaaccgagtaaaaacaatcgtgctagtgacaaaaccgccgtcaagctccacagcctgaccgattttaccctgtcatttggtgaatcaggattaacatactattccgtgcgtcacttttttgacaacgggggtcaacaagcctatgtactgtcgttaggatcggataaaccacgaggcgattttcactcattgaccaccaccctacaacaagattgggttaaacaagcgatctcggcacagagtgctatcacgctgattgtggtccccgatattgtctatctgaatcagatggatgatcccgattcagaaatcgatcaatacgacaaaatccagttctggctacaattttggcaatcagtacttagcctctgccagtgccgacgcggcatcatgggattgctggatgcccccgatgatcccgctctggccgagaaatgtttaacgcagctctcttccagtgatcggcaatggggcgcggtatactggccaagattgaacagtgcttatcaggaacaaaatcagcctgttgttctttcgccgaccgccgcagtggctgccatcattcagcgtaacgataaccaaatggcggtctggcatgcccccgcgaatgtcgcgttagccaaggtgataagcccaatacgctctcacattgaagccgataccctgtttaaccagaatggcccttcgttgaatctggttcgcagcttccccggcaaagggatcaagatctggggatgccgcacgctggacaatacccccgattctccctggcgctatatccagacacgccgtctggtttcctatatcgaagcccatatgactcaactgggccgggcctttgtgtttgaaccgaataacgccatcacctggatgaagtttaaaggtcaggcttacaactggttacgtcagttatggctaaacggcggactgcgcggtacgcaggaagatcaggcatttgaggtgttactggggattgacgagtcgatgagcgaagcagatccacgggccgggaaaatgatcatgaagatcaggctggcactgttaattccggcggaatttattgagctgaatctgacatttgatacccgcaccgggatcagccattaa

SEQ ID NO: 7161 - DNA, 459 bp, Photorhabdus luminescens
atgaacaatttatacaccccgtcggtatcacaccgttttatcgccagttttctgtttaacaatatccccagcccactcgacattgcctttcaacggatatctggcctcagccgtgagttgcaaactagccaacatagtcagggtggggaaaacgccagaaatacctggctggccgagaagatccagcatggcagtctggtactggagcgcggcgttatgaccgttacgccactcactctgacgtttgaccgcgtcctgcgtggtgagaaagccgtgtatgccgatgtggttatcattctactgaatgaacattcaattcctgtggcaagctggacattaagtaacgcgctgccggttcgctggtccaccggcgaccttgacgccaatagcaatacggtgctggtgaacgctctggaattacgttatcaggatatgcgctggttaggagtaaaagcatga

SEQ ID NO: 7162 - DNA, 180 bp, Photorhabdus luminescens
atgactgttgaaattaaagagctgattattcaggctaaagtgaccgattcagccagtcattcggtcactccacgaacactagcgcaggaagtgctggataacgccgacctgattgaaaaagtgaaacaagcagtattagatgccttgcgcgaaacaggaggtcattatgagcttaattga

SEQ ID NO: 7163 - DNA, 684 bp, Photorhabdus luminescens
atgagcttaattgaacgcagcctgtccaaactcaccctcaccgctttcaaagatcgtgagggaaaaacctcggtaggcagtttacaggcaatgtataaccccgataccatccagctcgattatcaaacccgttatcagcaggatgaaagcgttaacagtgccaaccaaagcagccgctatgtgttatcccaaccggcgggcctgtcattagtcctgttatttgacgccaccatgcccggccataacaccccggtagaaacgcaattagcaacgctaaaagccttgtgtgccgtggatgccagtactcacgttccccactttcttaaaatcaaatggggcaaaatgcgttgggaaaacaaaggctattttgcctgtcgggccagtggtctcagcattcattacactctgtttgaccgggacgccacaccgctgcgggccagcgctaccctatctctggtggcagatgaaagctttgtgattcaagctaccgagcagcaattaaaatcgcccccggctactgcggttaacgtcacggatatgctctccctgccgttgatcgccttaggtgccggcgcttctttggcggggggtattgattatctctcgctggcttggcaaaacggcctggataatcttgatgactttacccccggacaaatgttgcaagcacaggggaaagcatga

SEQ ID NO: 7164 - DNA, 1602 bp, Photorhabdus luminescens
atgaagataccgacgataacgatcaaaatagacggcaaagtcctcaatcaatttacggttatcactctgaccgttaaccatcatattaatggcatcccctcggccaatatcaccttgggtatcgccggtgatgcccgccatatttttgatgccaaggcacaagctgaactggcaagttgccgccctaatcatcaacttagcgtgcagatcgaaaaagccgtggtgtttaaggggatcatcgttcggcaaacattggggcttaaaggtcaggacagcatcattactctgaccgccaaacatgcgttgcaaaaattaactcacaacttccactcgcaactgttcaacaaacagagtgatgaggcgattatcaagaagttgtttagccaagcgggtatccctgtcacgataaaaccagcccctcagcttaaaacggtgcatgaacaaatggtgcaattccgctgtaatgactggacgtttctaaaaaatcggctgctcgcgacccatacctggctgctgcccggcaacgatagcgtgacgctggtcaccccggaatccctgaatcggtcaaccgtgcatactctccaccagcgagccaaccctcaggatgcggtgttatttgaagcgaatctgcaatgggataaccaacgcaaccccaaaaccgtgaatgtacaatcttgggatatcgcccaacagaagctgtctccagcccatcaggtaaaaaacagcggccttggtcgcaatcaactcgccacagacaacctgacatcattgaccagccaaccatggcagtgggttttcagctatccgttggataatgaacaggccaaacagcttgctcaaggcatcctgaataaccgccgaagccacaacgtctccggtaattttgaggtcgaaggcgataaccgttatcaaacgggggatgtgctggcgttaaacggctttggtcaggggatggatggtcaggcgattatcaccggtgtcagtcagaccctcaatcaacggcaaggctggcgtacccggctaacgctggggctattaccggaaacagagcaagttgtaccgcaggcaaaagagctgcatatcgggatcgtggaaaaataccagcgagatagccaatcattgggccgtattccggtcaaaatcccggcgttaaacttaaccaacggcaccctttttgcccgcctaagtaaaccttacgccagtcatgaaagcggtttctgcttttatcctgaagcgggggatgaggtgattatcggcttctttgaaggtgatcctcgcttcccggtgatattaggctcgatgcacaatcctaaaaacaaagcgccgttagaaccgagtgaaaaaaacccggtgaaaaccttagtgattaaacagggagaaaatcagcaagcattactctttaatcataaagataaaaccctcgcattgaatagcggaaaacataccttatctctgcaacaggataaagatatcacgcttaattccgctaagaatcttattacccatgctcaggaaattaaaatagaggcgcaaaaatctctgtccgccgccggtaaatctggcgtagatattaaaggtgcgaagattaatctaacccaataa

SEQ ID NO: 7165 - DNA, 492 bp, Photorhabdus luminescens
atgacaaataaagcactagccaataaagtattaaccaacaaagtattagccgatatttatggtcggggttgggcctttccgctgcaattttctattaaagatagtacgtataaagatagcgctcatcctgaaatacccacgggcgtcaccatggcggaaggggccgaaaatgtccgccaaaatatgaaaattctttttctcaccgaacccggcgaacgaattatgcgagagaattatggttgcggcctgaatgattatctgtttgccaatatccgtgacgaaatgatggcagaaattcagactcgaattgaagaacgggtattgcgttatgaaccccgcgccgatattagcgagatccaggtcaaccagagaaccgacctgcccaataccttgcatattcaggtcacctacacgctgagaggcagcgaaatcagccagcaaattgaaggtgcccttgaagtgaatgaaggccgggtacaggtgagtttatga

SEQ ID NO: 7166 - DNA, 417 bp, Photorhabdus luminescens
atgagcaaacaactggtggtggatggcgacactttgctgttcgagccgttatttggcaaccgacaagtcaccattctggggccggcaaccatccgcggtagcggacatacccaaattcagggcaaaaagattgtcatggtcggtgatgaaaaaaaggtgcaacttcaagcgcaatatatcactccaagccacccagttcccggcatggggatggtcaccattgctcaattggatgccagccagcaggtaaacttctgccgtagtccagtcacggtaattgttgtcgggcaacaatttatcgcccgatttaccccgacacagccagccaataatccatcgagcggcccggatgtgaccgcccccagtatgggcaaaggccggtttattgccagccaatatgcagtcactgccggataa

SEQ ID NO: 7167 - DNA, 2703 bp, Photorhabdus luminescens
atgggacaagccgagttagaaaataaactctctgctattgtgccggatactgtatttaaacttgatgaaagaagtacgctagatattttaaactggcttaaagcttacgctaaagaaattcctttcgatcaagagaaaaaacagttctgggacagtttctactttattcaagagaataatcctcaacaactagcggacatttaccaaaatgtgaataaagccgatggtcgattacccgcacatcaagcttttgttttggcttttttaacgttattagaaacaactaatcgattattaaatacctttccggcccggcaccgtgatctttattaccgggaattattggggctgaaacccaaaaaagcgcaagcagataaagttgcgataggaattaccctcaatcccgacagcacagaatcgctgatagctcaaagcacgctatttgatgcggggcaagacagcgccggcaatccattacactatgcgtcagatacagatttattggcgaaccaaggggaattaaccgacttacgttggtatcggaaaaaaaataatggttggttatcggcaatcgcattaaatcttgcagataacatggcattgcctgaaaacggtattcgactttttagcccaacggccaatgatgttccggttctatccggttacctgatcacttctcctttatttgccatgtcagcaggagagcgcacgattaaagccacattagcccgcgaatggacaggtaatgctgagaacatcaccgctaaaatgagttcgggcgatcactggctttctttatctgcaaaaaaaggacagagcaacaatacccattatcttacactttgtttatcagctaataatgaccctatcagttcccctgatggcttggataatatggcgtttgatataccggtgttaaagctaggcaccactcaaggcccgactctacccaagattaccgacattgaagtcagcattaacggtaaccgcagtgtgcactatgcctctgatggcggtattgaacagacggataccaccagcttcccgtttggtcaatcaccgtcgttaggctccggttttaatctgattgccccggaatggtatggctctgaaaacgcaacattgacgattacgcctcaatgggtgggattacctcaacaaaacttttcaaaatggtatggaggatatgaaactaagcccgacaatagtgcctttaaagtacagggttacttaatcacacctcaaaagagagaaaagcttaatgaggtgcaagcattattcaatggaaaagaggcaccacaaggacaaaacctgacatttaccttaccggcaatgcattatccccttgcagacagcccatcgcccaacgaatggccggcatccgtgcgcatagaactggccggacaagattttatgcacgcccaatattggcaaaatcccacgggtaaaaatgtcccctatacgccacaaatcagtgcattgcagattcaattcagcgctaaagctaagcaattttccatctatccactgacgccttttggccaaggcgaggcaacagcagaaacacctgcattaacccatgaagccttctatttaggctttacgggcgtatcaccgggacaaactctatctctctattggcaattagcaggcattaaatcgctcgcgttatcttggttttatctcaacaacagcaatagctggagcaaattagacaaattagttgacgaccaaacccataacctgtttgaccggggtatctggcgcactttattgccacaggatgcggcaaatcaggcggccttgatgccgacaggacgctactggctgaaagctgagataacgcaacaaaccgatccgcaagattacccacgcattaacggtctactgtataacgctaccaccgcgacgttgatcaacgcagaagccgttgagcagacgcactttatcaacggattagccgccgacagcattaaacagccggtaaacacggttgttgccgtcagcaacatcacccaaccttgggcctcttgggatggtcatccgcaagaaaccgagcaagccttcctgacgcggctcccgcctcggttatctcaccgtaatcgcgcgctgagttggggcaacattgtcaccttattaaaagagcaatttgtcagcctgtttgatgtcaaatacccgtctgccagtgaattaaccaaaatcccggcaccggaaaaacagcaactgattgtgatccctgacagccgttacaaagataacgacgatgcgctgcgcccaaaattaaatcccgctcggctggcagagatggtcgaatggatcaaacaactcagcagcccttgggcaacccttgagatcagcaatcccacttacattgacgttaatgtgaactatcaagtgacctttatcgcaggtgttaaccccgactacggatatcatcagctacaacagcaattaagccgaaaatatatgccgtggggcgaaaataccgctatcggcgtgacaaccggtaatcacattgattactaccccttgttagccacgatccagcaatcttctctggtggaacgcgtcaccgatttaagcctaaccattgctaaccgaaccaccggtgccgtgggtaaaagtatcgaaaccgccgataatgaagtgctgattttagtctggccagaacagcgtcccttaaaccaaggagttaacccatga

SEQ ID NO: 7168 - DNA, 2907 bp, Photorhabdus luminescens
atgagtcatcaggatgccctgtttcccatcgtcaaagacgatattaccttcgatgccttactcgctcaggccaaaaccgtgattgagcagcaatccggccaatgctggagcaataccagtgaaaatgatcccggcatcaccttattggaagcctgctgttatggtgcctccgatctggcctaccgccacacattaccactgagagaccttctaacgccaaaaccagaagaccaaacatccggcgacggtatttttcctcaggagttcggcccacaacaaacactgacctgtggcccgatcaccgcagaagattatcgccgggctttattggatttacatagcagcgacacaattaataacacccgcgaaggttattttttctttaatgatgtccaattaattcgtgaacctgaaaatcaacgttatcagtattggtataacaaacagaaacgtgaatacagctttaaaaactccggctcagatagccaattagcactaagaggaaattattggctctatttacttcctagccgggaaactgaaactaatacaacactggctgaggagagtctgaaaactttcctaaaagataaccgtaatctgggggaatccgtcagcaaaattatctggctgcaacctgccgatctccccttgcagattgatattgaacttgaagataacgtcattgatcttcctgatatcttcgctcaggtttacatgacggcggaacagatggtactgcccaagcccgaacgttataccactcaggccatgaaagatcagggttaccatcatgaagagatatttgccggcccttatttacatcacggttggataccgaccttacctcaaaccaaagattacaccggcgatacggtattaaatctcagccatctggttaatcgattattagcgattaaaggtattcagagtgtaacccggctagcattagctcatcacgacacaactattacgccattgtcgaacgataattggtcttgggaaatcgctcaaaaatattaccccagattatgggggagtgatccactggcattaattacctcagcaaacagcccgcttaccattaccgccaaagggggcgttaaaattggtgtttctaaacaagatatcgaagaaaagcttattgcagaaccactgattgatatacagccggaattactgcattggggtaaatatcgtaaagttctggattactatccggtaagcaataaattacccacttgctatggattgcagacctatgccagcaaccaacagcaaatacagttacaccaatttatgctcccttttgaacaaatgttggctaacggctgtgccgaactcgcccttttaccgaaattactggcctttaaacaacggggagaaacagtacacggtgtgcaatggccttttaaaacgggtacagtcagccatcgtgttcaccaacaagtcattcctgatttaaccgcaaaactaagccgcgattcacaaatctatattgataaccatattcagaagccaaactatataaaagaggcgacaattctgaattatctgttgggctattttggcgctcaacttgccgccagaccacttacatcgaactcactactgggtttcaaagactttctgtctactcagcaaggctatctggctcaacaacccgaactaacctatcaacgtaataatattcggattgataaagtgtcggcactgcaaaaacggattgccgcccgcttaggtttgggtggagaatgtttcagtaaaacacctaatctggatgacctgcctttttatttaattgaacatcgtcaacttttgccgataaaacccgacacgaaattcgacgataaacaaaaacctgacgatctaaaggtaattgaagagaattcaggctctaaaaatcatcaactcatcatcacacaacaaggtattgcaggtcggttattacaaggtcaggtgattaatctgattattattgaagatgatagagagtttatattacggagccaaatgatcaccgaagtgacaggagataccttttcccttagtacccgtaacagcagcgatttggaacgcaatctggacagaataagacagaaatttaatgatggtaatctgcgctggcaaaatagcccagtgtggctggaagatatggattatcaattggtttatgccgatgagacatataaaaatgctaccgacgatcaacgttggattacttccagtgctcaaagccccttccctgctatgattgaagaaaatgacgaaatcaccctgaaatatgtgattactccctctgggccagatctaaaaatatcacctcgtacagttatccctgaaccgagaaccgaatatgaactcaaagcacgagtcgttaaatttgatcgtattcaaggcaagatattaattaaatgcaaccaagactcaccgaataaaaactttccaaaagaggccgaagcatggctttatcgctggtatttctccagcgaaaaatatgctttggccgatcgcttttcatttgtggttagcgtagtagtgaatcgtcggttaattcagaatggcaaagttgatccttacaaactagaatcttgggtgaaaacagaaatattagctgaattccccgcgcatatttcaatgattatccattggttatcaccggaacattttaaagattttgccagcacctataaacgctggcaaaacaatgacgcccctttaggagacgaagcataccatattttagaaaccttaaccttgggacgcctaccttctaatgcaaccggtattggtaatatgcgaattgccactaaacagcaacgtaccgaggtcattggtggatctggcaatcaatggaatgcaacagtcataacaagtaatcaattattatatgtgcctaagccgtag

SEQ ID NO: 7169 - DNA, 951 bp, Photorhabdus luminescens
atggaaaaaaaatctaatctatctaatgcaaaatccaatatggaaaatatcaaatcaaatggcccatcagcagatgatttaaaaaagcgctttaaagaaggcagtattccattacaaaccgattatgccgacctgattaatattgctgatatggggcgctgggctgttggtaaagctcccggtcaaacagataatccaaattcagcgctgaaactggataatggcggtgcattagcggtaaaaattaacgacaacggtggtttaaaggcagatgagaatggattaagtgtaaaaatcaagaataaaagcctgtcagttgataataacggattagcagtcaatgccggcagaggattgagaattaacaacgataagcttgaagtcaataatcatcacggtattgaaatagttaatgaaggggtaaaagttaaagctggtgaaggtattaaagtagacagtaacggtgtcagtttaaaaatgggaaaacctatcagtaatgccttttctccattaatattagaacccaaaaatgatgttttatctgtaaagataggcaatggcctgtttgatagagacaatggaatatcagttaacccaggtaatggcattgatgcaggttacgattatgtggctgtcaaggctagtaatggtattactgttgataatagtggtgtttcagttaaagcaggcaatggtattacagttaattcaaatggtgtaagtgttaatattcaacaaattgcatcagcactcgcggacttaattattccttcaggaacaattgtaccattttatagtaatggcagtttacctaatggttggctatggtgcgatgggaataatggcacacctaatctaaacaagggtataccgaatgagatcaccttagttgcaggttggataaaaaaaataaatagtgcttattttatcttaaataatatatacccgtaa

SEQ ID NO: 7170 - DNA, 1026 bp, Photorhabdus luminescens; identical to SEQ ID NO: 6127

SEQ ID NO: 7171 - DNA, 1563 bp, Photorhabdus luminescens
atgtcttgggcaccaaatctgttaaaccggattaccattactatttcaactaataatcaacagctagctaaaaaagtattgcatggctccctgcttaatcaagacaatatacataaattactcagctcatactttgatgaatataacattcatcagcatatctctttagagacattaacccttaatcttggtgaaataagttcctatgaatttaactcattattccctgttcgtctcaaggctgagctgaataaagtacttaaccaatatcagataaacaaccatcaggaagaaattctactgaatgaaccaatatctaataaatttaccgataattcttccgcattctgcgataattatttaattgatgcggagagttttattcattttttatatcaacaagattcccaattaaatacactggagacaataaccaatcataaagagattaatattaataaacttattcaccaattagcacaaatagagaacaaatggatattgctattagcaaaaagctgtctatctgaacatggtctacaacgacttttggctatcaaacaacccgctttattcattgccattaatcgcagattatccgaaaaagtaaacaaaccacaacatcaggaggagcttgtctcctccacacaactgatactcaacgcactggaatatctacagcggcataatattcaggaaatacctaaacccaatacgaaaatcatttcacgtattatcactgaacttaataacggcgtacttaataccgatcctattattaagctatttcgccaagctatgaaccaaaacacgccattaaatagttggctgaaacaactctggcaaactgtttctgtttcacggctttgccaaaaacatctgtcggttaaggagtaccaatatctattggcatgctttatgccaaaccatatagataaaaatacacccggcaaaaaatcagctacgaataacattaatttttcagatgttcggcaacatcaacctctggtaaatcagaaggttattaccgaagatcagaaaatactatcaacatcaaactctccatgccaagtcaataatgccggcatattaatgctctggccgatgctacccgcattgtttaatcaacttggcctacttgaggggaaaaagtttatccatcgtcaagcccaataccatgctgttaatttccttgactatctaatttggggaaccgacgaaacaccggcagaacgtaaaagactcaataacattctgtgcggacttatgatcaatgaaaataccgaatcaatctctgttgaaccagaaaaacaattaaccaccacgcaatggctggataccattattactcaacttcccggctggaaaaaattaagctgcaatgacgtccgccaattgttcttacaacgaccgggtgaattattggtaaacgagcaagaaatcaaaatcaccatccagcaacagccatttgatgcattgttggctgactggccgtggccattaaatatcgccaaacttccctggttggatcgctctttattaatcgactggaaaaatatttaa

SEQ ID NO: 7172 - DNA, 2067 bp, Photorhabdus luminescens
atgaacgctttacttaaaaacaaccatgatatggcgacagaatttcactggatttatccccatctggaacgtattgatctacgattacaacattactattaccaacatggagaaaaatacgattatttaccggagagttttctacttaccgaagatgaattaaacccgcggctggcaaaaccacaaggcattcctcattgggtcaccaaacaagatgatattattaattcccctgaaatcgacgaaaaccccaatgcattatcacaattaattgaacgttttgaactgactgaatttgaacgagatgttttattattaggtttattaccccatttcgatagccgttatcatgcgttatttgcggctctgcacggtaacagtagaaaacagtggcctagctttgacttagccattgaattatttagccaacgccaaggtgatcggccattacgacaaaatagctttctaccgcaaacaccgttaatcagtcatcaactattacggcttaataaccacgaagaatctatttggttacaaactcaatttctaactcacagcgctgtctggcatttcttatcaggccaacgggttattttaccgccgctgacaacttgtgcttattggcactcttctgcctcacatcgttggtatccacaatccctttacccttcacttgaaaagatattattaaataaaactgacgaaatacgcccgctggtaatactcagaggaaaacaagatagcgccagagaattagcggtaagcaatatgatggctcttcatgatatcagtacattaactctagacttagctcaactgccggaagaaaataactctaacttgctaatagatgcagtccgggaagcacgattacatgatgcctgtttattaattcgcaatttttctttgctcaaagatgaaaagaaaatattacacagtgaattttccacgttattgaaccaagcaaaattacgcgtggtttgtctggcagaaccacaagattcattagtgtggattaaacacttaccaatagtgcaaattaatatgccagccctgactctggcagataaaaaagccatgctggaagccaatttatcggataatatcgcccagaaaataaatatcactcaattatgccaacgtttttcatttaccgcagaaacattaccgcaaattcttcaagaagcaaatcaataccaaatactccgacaaccggaaggtcaattggaagaaaccgatctgcgtaaagcattaagtttccgtgctcaacagaatttcggtaaattagcgcaacgaataacccccaaacgcagccttaatgatttagttatttcagacgtattaacgcaacaattaaaagaaattattgccgccattcattaccgtgaccaaattctggctaccggctttcaggaaaaaatcggttatggtaccggcattagtgcgctattttatggcgaatccggtaccggcaaaaccatggccgccgaagtgattgccgggcatcttggcgttgatctgattaaagtggatctctctaccgtggtgaataaatatattggcgaaacggaaaaaaatatctcccgtattttcgatctggccgaagcagattccggggtactgtttttcgatgaagcggatgccttatttggcaagcgtagtgaaaccaaagatgctcaagaccgacatgccaatattgaagtttcttacttattacaacgattggaaaattatccgggattagtgattttagccaccaataatcgtagccatttagacagcgcctttaatcgccgttttacctttattacccgttttgcttatcccgacgaaatgttacgtaaaaaaatgtggcaagtcatttggccggaacagattaaattatccgataccattgattttacccatctggctaaacgcgctgatttaaccggggctaatatcagaaatattgcgctattagcctcaatgttagcgaaaaatgaccactgtgaccaaatcgaaaataaacatatcaatcgagccattacactcgaattaaataaaactggccgattggttttctaa

SEQ ID NO: 7173 - DNA, 903 bp, Photorhabdus luminescens
atgacaatcctaattgcttctgacaatgcgattattgaagtaaataatgcattaaatactattttatcccagcatctgaatatcaatggcaataagattgatatccgttttgatctacccgaaattaactccattcaatcggaaccgacagtcagtgtatttctttatgacatcaatgaagatttacaattacgttctgccgaaccaagacgttataacccgatgaccagcacattattaccgggatgggtcaatatcaattgtcactatttaattacttattgggacgctaataaaccatcaagcgacagttcaagcccggatagccaacccaataatcaagctgcacaagtgatgactcgtgttctaaatgcattaattaacaaccgtcaattaaccgacattcccggtgcttatacccgaattattccccaacaggagaatttaaacagcttgggtaatttctggcaagctctcggtaatcgccctcgcctctctctaatgtattccattaccgtaccgatgaaactgcaaaatattaaagacaatattacacccattaaccaaatttccgcttctgtggagcagaaacccaacctaaataattcacaaatcaatcaagctctggtagataaattatgtgccgatttaggtggtacagaagatgctcgtcttgctttggctaaagtcaatctggtaactaaatttgtcacagacaataatgatagtaatgaaaataaaagcattattctggagatttctggcattacctattcaacttatttacctaaaataagaaatattatttcaatatgggtaaatagtcaaaaatccgttgttaaggtaaatgggatagatattaccatctcaaaagaggactctaaagaattaatagaaatataa

SEQ ID NO: 7174 - DNA, 930 bp, Photorhabdus luminescens
atgccaaaactaacagagcttttaagccgtttcgaaaatcccattcagaatcaaccaaatcatataagtaaaaaaaatcccatctctaattccaaagttttaaataatagtgaagaaaaaactgcccccctcgaattaaaacatgatgacagtaaaataaaatcacaggtatctataccaaatttagtgaaaaaaaatgaaaaaccagcagcatcgaatacgccaaacaattcacatgaaaaagtcaaagctgaagatattttcaaccgatttaaaagtaaatttgatccttatgacagagaattacctttcgacataatgaataaaataaccaataatgaaataaaattttcttctgaaaaatcgaaagatgattatttagctaaagtaaaagacaagaaattcacactgagacattatactgccggcactgggcaagaaaaacctacatttgatgagattagctcaaactttaatttggtaaataagggaataaaaacattaaatcgtactcaaggaagtaacaccaatgaagatgattggaaccgtttaggaaatacggcgtttactttctacttgctagcaatagatggagaagtatccaatagaaaattcttatctaatacaactcattttgcagaaattaatatagaagattcagaagaacttaaagaacttggcttagatcaagctgaattctttgcttctcctgatttacttcacgaaaaaaatctttcacaagcccctgcggtaaaaggaaaactgtctgatttgaaatcattattattaaaacgatctggcataagttcagttcaattagggcgtttagatgcgaaagcaattttaaaaagcatagacaatgaatttgggaatagtctcgaaatcaaaatcccagggaatgttaaagtgaacaaatggaataaaatttaa

SEQ ID NO: 7175 - DNA, 948 bp, Photorhabdus luminescens
atgccaaacagcaaatatagtgaaaaagttaaccactcagcaaatggagcggaaaaatgctcgatacattctaaccaatataatataaataactgtacattggggttaggattggatttaaacaaaaaattaagaacagggaatgaacgaaatatagaaggtgcacaaccttttattccattcccttcgaaacaaaaacaatatagtaccagccccatagcaatggctgatatattaaatgaaagcgcactgacttcacaaccaattattaccgatttaattaatccgcaaaagataaaaatgtcagacggcgtaaaaaatattttaaataacaaagaaggaggcggagatctagtgttcaaggcactacagattaaaccatcggatgaaactctgccattcaatgcattaaaaattgtcgatacctatcaagaagaaatgccgaataaagacatgtctatttcagcttattgggccccacaaggaggatatgttgatatcccggcccaacccgatatcagccgccatccacagtatgtatttaccccaaatttcagtggatgttcatttgtagtcgataaaatgaatgaagacactctccgggttcggcacgtacaaggtggtcaagaagatgttgaatataataaccaaaatattgatcacggaatgggtatgattacggcaatggaattccgcgattatggatatcacgaggctgatgacaaagttatagaaaatacctatggttttgcattcttaaaatttaaccaagagaaaaaacagtggcaacttcactatcagaaaatagccgcagcccctaatatcataaatataaaaactaaatctagttggttgccattcagtaagccttcaattgaagccgatacctttaccttcaaaaatatgaaagtccctggatatagtaggaagaatatcaataacaattaa

SEQ ID NO: 7176 - DNA, 450 bp, Photorhabdus luminescens
atgactataactccagaacaaattgctgttgattatcctatccctgcttatcgatttgttgtctcggttggtgacgagaaaatcccttttaacaatgtttccgggcttgatgttcactatgatgttatcgaatataaagatggcaccggtaattactataaaatgccgggtcaacgtcaatcgatcaatattaccctgcgtaaaggggtcttccctggcgacactaaactgtttgactggattaattctattcaacttaatcaggttgagaaaaaggatattgccattagcctgaccaacgaaaccggctctcaaattctaatgacctggaatgtggcaaacgcctttccaacatcattcacctccccctcttttgatgccgccagcaatgatatcgctattcaagaaatagcactggtcgcggatcgagtcaccattcaagcaccttaa

SEQ ID NO: 7177 - DNA, 1206 bp, Photorhabdus luminescens
ctgacggtattaattaccaatatgccaacccatgatgaccaacattatcatggttcatccatccaactaaattcatcattccacagtttacgtagaatatcgcatcataactcggagacaataatgccaataaccccaacttatcccggcgtttatattgaagaggacgcctcaccgtccctctccattcgctcgggtgcaacggcagtgcctgtttttgccgtcgcaaataataattcattaataccagacaattcctatattcgtattagtaactggttagaatatttaacactaaaaggtaagcaatttgatcccactaatacacttgatatcgcactacgcgcctattttattaatggcggtggatatgcttatctcgtcaaaaccacaaatctagaaagtcagatcccaaagcttgacgatgtgacactactgatcgccgccggagaagatattacgaccgctgtaggaacactttgccaattaggcaaaggattattcgctatttttgacggcccaacaacccaaatagcctcaacacaagcaccagatgatgtacttaaaccttatccagcaactcaatatggcgcagtttactatccctggctgactgctgaatggggagaaaataaagcctccattgatattccaccaagtgccgtcatggccggtatttatgccaatgtcgataacagccgaggcgtctggcaggcccccgcgaatgtccctgttcagggcggattacaacctaaatatccgatgaccgacgacctgcaagggagatataaccagggtaaggcactgaatatgatccgtacctttcctaagagcgggacgctggtctggggagccagaacccttgaggacagcgataactggcgttatatcccggttcgccgcctgtttaacagtgcagaacgagacattaaaaacgccatgagtttcgcggtatttgagcctaatagccaacccacttgggaagcggtgcgccgggcgattgataactatctccatgccctctggcaacaaggcggattgatgggtaacaaagctgaacaggcttattttgtgcaaatcggtaaagacgtcaccatgactgatgacgatatcaagcaaggcaaaatgatcgtcaaaatcggcatggcggcagtgcgtccggccgaatttattatcttgcagttcacccagaataccgctcaataa

SEQ ID NO: 7178 - DNA, 1386 bp, Photorhabdus luminescens
atgccaacaacaccgacctatcccggcgtttatattgaagaagatgcatcattatcgctctctatcagccacgggaacaccgcaatacctgtttttattggccgcttccagcctaaaaaagccagcgcaactctaaaagcgatacgtgtgagtagctggctggattttaccaatctgtttaatgtcggttgtattacgtcaatcgccatcacatcgactaaaccaacgccaacgccaccgcctcccccttctccttccgggaaagttgcaggcgatacagccactgccgatattgctcttgacgccgacgatacaaacacagattacacttacgctataaatacagttacctctacaaccagcagtgatgcgctaaaactttatttccaaaatggcggcggaccttgttatatcctgtccattgccgattcgggaaatagtgaaactacggcattactccctgaattaattgaacaagctttggagatcaccctaatcgtctgccctgaacaggattcttcttaccagctcgcgatatacaacagcctgccccccgcattattgaatgccggctatttcctgatcgctgacagccagggtaaaacaactaaacctacagttaatgtgccatcacaaactgcgacttattatcctgcggttaaaatctcacaacttatgcaaacggaagatagcctgatcgcagtttcaggttatgaagatgcagcatcaaacgaagtcaaaaatctggcacaactcaaacagaaaaactcaactgtctaccaacaagctgtccaagcaatacagggcaaaatgaaatccagcagcaacactattcccgccagtgctgtcatggcgggggtctactgcgccacggatgccagccgtggtgtctggaaagccccggcgaatgtcgtgctaagcggaattagtgatgtcactgaacgacttaatgacgatgaacaaggtgccatgaacctgttaggtattaatgctattcgctatttcaacgggcgtggctttgtcgtgtggggcgctcgtacgctgcaagatgatgacaactggcgctatattccggttcgacgtctctttaacagcgcagagcgggatattaagcaagctatgcgcaccgccgtttttgaacccaatagccagcctacttgggaacgggtgaagtcagccattgacaactatctctattccttatggcagcaaggggcattagcgggaaataaaccgcaggaagcctattttgtccagattggtaaaggcatcaccatgtccgacgacgacattaaacaagggaaaatgattgtcaaagtgggcatggccgcagtacgtccggctgaatttattatccttcagttttcacaaaatgtagcacagtaa

SEQ ID NO: 7179 - DNA, 1176 bp, Photorhabdus luminescens
atggagataaaacagccgggtgtcaccgtcaccgaaagcctgatatccccagaaccggatgatgtattcatcggtataccggtttttatcggttataccccctcgccggtcgataaaatcgctatcaagctcaacagtctggccgactttgcccggtcatttcctgaatcaggattaatgtactattccgtgcgccacttttttgaaaatggcggccagcaagcctatgtgctgtcactgggtacggagcaacaattaagcgatttttcgtcattgatcaccgcactgcaacaaacgtggattacccaagcgatttccgcggagaacgacattacgctgattatcaccccggatgctatccgatttaatcagacagaggtttcctatatccaacgtgatctctggttacaattttggcaatcagtgctcaatctttgcaaaagtcggcgcggcattatggggttattggatgccccggacaatcccacattagccgcagagtgtttaaaacagtttgcttccgcagatcaacaatggggtgccgtatactggccgcggctaaaaagcgcctatcaggaccaagcgcaaaaccctattgtgctttcacctactgccgcggtcgccgccgttatccaaaataacgataaccaacaaggcgtctggaccgcccctgccaacgttgcgttagccaaagtgatcagcccggtacactcttatattgaagcaaatgccctgtttaacccgagtggcacctcgctgaatctggttcgcagttttcctggcaaaggcataaaaatctggggatgccgaacgttagaaaatacccccggttccccctggcgctatatccaaatccgccgtctggtttcctatatcgaagctcatatgactcaactcggccgggccttcatctttgaacccaataacgctatcacctggatgaagcttaaaggccaagcctacaactggctgcgtcagttatggttaaacggcgggctacggggtactcaggaagatcaggcgtttgaattgctactgggtgtgggtgaatcaatgagtgaaaccgatatccaggccggaaaaatgatcatgaaaatcagcctcgccgtgttaattccagcggaatttattgaactgagcctgacatttgatacccgtaccggcaccacccgctaa

SEQ ID NO: 7180 - DNA, 459 bp, Photorhabdus luminescens
atgagcaacctctataccccgtcagtgtcacaccgttttatcgccagttttctttttaacaacattcccagtccattcgatatcgcctttcaacggatatcgggcctcagccgtgagttgcagaccacccaacacagccagggcggggaaaatgccagaaatacctggctggccgagaagatccagcatggcagcctgttgctagagcgtggcgtgatgacggtgactccgctcacgctagtgttcgatcgcgtcctgagaggcgaaaaagcggtctatgccgatgtcgtgattatgttactgaatgaacattcattacccacggcaagttggacattaagcaacgcgctaccggtgcgctggtccaccagcgactttgacgccaatagcaataccgtcttggtgaactcgctggaattacgttatcaagatatgcgctggttaggagtaaaagtatga

SEQ ID NO: 7181 - DNA, 180 bp, Photorhabdus luminescens
atgaccgtcgaaattaaagaactgattattcaggccaaagtcactgattccacgagtaattcttcctcaccaccaaccttagcccaagagacgctggataatgcccgcctgattgaaatagtgaaacgggaagtgttagaagcgttgcgtgaagcaggagtccattatgagcctaattga

SEQ ID NO: 7182 - DNA, 684 bp, Photorhabdus luminescens
atgagcctaattgaacggagtctatccaaactcaccctgaccgcctttaaagaccgagaagggaaaatttccgtaggcagtttacaggcgatgtataaccctgatgggattcagctcgattatcaaacccgctatcaacaggatgaaagcgttaataatgccagccaaagcagccgctacatgctatcgcaacccgccggtttgacattagttctgttgtttgatgcgactatgccgggcaacaacatcccggtagaaacacaattggcaaccctgaaaaccctgtgtgcggtggacgccagcaccagtgtgccccacttccttaaaatcaaatggggcaaaatgcgttgggaaaacaaaggctatttcgcttgccgagccactggtctcaccatccattacaccctgtttgaccgggacgccaccccgctgcgagccagcgccactttatcgctgatcgcggacgaaagcttggttattcaagccacggaacagcagttacaatcaccgccggttatcgcagtcaacgtgaccgatatgctctctctgccgttgattgcattaggcgtcagtgctgctctagttggtggtattgattatctcgccctcgccagacaaaacgatttggacaatctggatgatttcactcccgggcaaacgctacaggcacagggggacgcatga

SEQ ID NO: 7183 - DNA, 1602 bp, Photorhabdus luminescens
atgaagataccggcagtagacattaaaatagcgggaaaaaccctcagccagttttctgtgataagtttgaccgtcaaccatcaaatcaacggtattccctcagccaagatcactctcggcatagccggtgacgccaacgcaattttcgccccccaagctcaggctgaactgacaagctgtcggcccaaccaagaactgatcgtgcaactgcaagaaaccgtgttattcaaggggatcattgttcgacaagcacttaagttcaaaggtcaggacagtctggttaccctaacggcaaaacattcactgcaaaaactcactgacggtttccattcacagctattcagccaacagaatgatgaagacattatcagaaagctattcgatcaggcaaagataactgtcacgataaaacaggtgcctcagcttaaaattaaacatgagcaaatggtgcagtttcgctgtaatgactggaaattcttaaaaagccgactggccgccgccaatatctggctgttgcccggtaatgaggccgtcacattagcgacgccggaatcacttaatcagtcaaccgtgcatacaattaaacaacgtgccggcgatcaagacattgtgctgtttgaagcggatctgcaatttgataatcgacacagccccaaaacggtgagcgtacaagcctgggatatcacacaacaagaactgtctcaggccaatcaggcagaaaacagcggggttggcagcggtcaactcgcgtcagacagtttagcgacgttgaccgatcaggcatggcagtgggttttcagctctccccaagataatgaacaagccaaataccttgctcagggcatcctgaataacctgcgaagtgataacgtttccggcaatttcgaagttgcaggggatagccgttatcagccgggcgatctgcttgctctaaatggctttggtcaagggatggatggtcaaggcattatcaccggcgtcagtcagaccatcaatcaacggcaaggctggcgcacccggctaactttgggtttgttgctggaaacagaaccggtggtcccgcaggttaaagagctgcatgtggggattgtggaaaaataccaacaggacaagcagtcactggaccgaattccggtcaggataccggcgttagatttaaccaacagcgtgctttttgcccgactgggtaaaccttatgccagtcatgaaagcgggttctgtttctatcctgaaccgggggatgaggtgattatcggtttctttgaatgcgatccgcgctttccggtgatattaggtgctatgcacaacccgaaaaataaaacaccaatcgaacccagtgaaaaaaatccaataaaaactctggtcattaaacaaggggataataaacaagcattagtgctcaatcatcaagataaaatcgccgccattaatagcggagaacattcgttatcattgcaacaggataaagatattacgctaaagtcggcgaagaatattatcaccacaggtcagaaaattaatatacaggctaaggaatccctatcagccactggagaatccagcgtcgatattaaaggtaaggaaattaacctaacacaataa

SEQ ID NO: 7184 - DNA, 447 bp, Photorhabdus luminescens
atgacaaataaaatattagccgatatttatggtcggggctggacatttccgccgcaattttttgtcaaagataattctcatcccaaaatacaaaccggcgtaacaatggcagaaggtgcagaaaatgttcgccaaagcatgaaaattctttttctcaccgagccaggcgaacggattatgcgtgaagattatgggtgcggtctaaatgattatctatttgctaatatcaatgatgaattgatagctgaaattaaaacccggattgaagagcgcgtactgcgctatgaaccgcgcgcggaaatcacggtgattcaggtcgatcagagaacagacttgctaaataccttacatgtccaggtgacttacgccctgagaggtagcgatatcaaccaacagcttgaaggcgtccttgaagtgaatgaaggccgggtacaggtgaacctatga

SEQ ID NO: 7185 - DNA, 417 bp, Photorhabdus luminescens
atgagcaaacaactggtggtggatggcgacactctactatttgaacagtttttcggcaaccgacaggtgacaatcttggagccggcaactatccagggcagcgggcatgcacaaatccagaacaaaaaaattgccattgtgggcgatgaaaaagaggtaaagctccaagcgcagtatattactcccgattacccaacgcccggtacaggcatagtcaccattgcccagttagatgccagccaacaggcaaatttttgtcacagcccggccgcggtgattattgtcggtcagcaatttaccgcccgtttcactccgacacaaccggcgaataacccatcgagtggcccggatgtcaccacacctagtatgggaaaaggctattttattgccagtcaatatatcgtcaacgccggataa

SEQ ID NO: 7186 - DNA, 2703 bp, Photorhabdus luminescens
atgggacaagccgagttatataataagctctctgctatcgtgccggataatgcatttaaacttgatgaaagaagtgcactggatattttaaactggctcaaagagtacgccgcaattattcctttcgatcaagagaaaaaacagttctgggacagtttctactttacgcaggaaaatagcactaagcaattagcggatctttaccagaatgttaatcaagcgaatggtcttttaccggcacatcaagcttttgtattggcttttttaaaactgttagaaacacccaaggtattatttaataccctcccggcacgacaccgtaatctttattaccgggaattattaggactgaaccccaaaaacgctcaggcggatagcgttgctatcggcattaccctgaatacgaataacacggaatttctggtcgcacaaggcacgctatttgatgccgggcaagatagcgccggtaatccgttacactatgcatcaaacacggatttactggcgaatcagggagcattaaccgacttgcgttggtatcgaaaaaataacgatggttggcaatcggcaataccacttagcctctcagataacattaaattaccgaaaaacggcatccagctttttagcccaacagccaacgataccccggtgctatccggttatctgattacctcctctttgtttgctatgcccgcaggagaacgtcatattacattaacgctggaaaatgattggcagggtaaagctaaaaatatcaccgctaaaatcagcgccaaagatcactggttatcgttgtcggtaaatcttatcgacaaaaagaatatcaaactgggtttactctccactgatgatcctatcagcccgccagataaccttgacggcatgacattcgacgtaccggtattaaaattaggcaccattcaacaacccactttatccaaaattatcggtattaaaatcaatgttaacggcaaccgcagtgtgcgctatgcctctgatgacggaactgaacaaacagataaaaccagttttcccttcggccaattgccatcgttgggttccggttttaatctggtcgcccctgaatggtatggttctgaaaacgcgacgcttaccttgactccacaatgggttggcttgccgacaaagagttttaaagcgtggtataaagggtacacccctgaacccgataacagcgtatttaaagtacagggttatttagtcacacctcaggaaaaaaagaccattgatggcctccagtcattatttggcggaaccgatgcaccacaaggacaaagcctgacatttactttaccggcaatgaactaccctgttgcagacagtccatcccccaatgactggcccgcgtcagtacgcatagaattggcagggcaggattttatgcatgcgcaataccggcaagatccgaccggtaaaaatttaccctacactccgcaaatcagtgcattacaagttacatttaacgccacaatgaaagctgaacaatatgccgtgtatcctctcaccccttttggttggggaaatacgaacgctgaaacgccttcattcgctaatgacgcactctatttaggcttcaccaatgtgtcaccgggacaaaccttatccctatactggcaattggtcggtattcaagaacttgcgctattctggtcttatctgaatcaacaaaacacctggcaaccattaaaccaactggttcacgatcaaactcacaacctgtttgaccgggggacatggagtacgctgttgccacaggacgcatcaaatcaggcagccttgatgccgatagggcgatattggctgaaagcggagataattcagcagaccgcccctgagaattacccaaaaatgcaaggcatactgtataacgccaccactgccacactaatcaacgcagaaactgttgaaaatgatcattttatcaatggattggccgccgacagcattaaacagaccgtcagcgcgtccgacgccatcagtcatgtgacgcaaccctgggcatcctggaacggtcgtccgaaagaaacagaacccgcgtttctcgcgcgaattccacctcggttgtcccatcgtaaccgtgctttaagttgggataacattgtcacgctactgaaagagcatttcatcagcatatttgatgtcaaatatcccgacgccaataaattaactagaatcccggcaccgaaagaacaacaactgattgtgatccctaacagccgttacaaagataacgatgatgcgctgcgcccaatgctcaacgctgcccggctgacagaaatggccaaatggttaagccagttaagcagtccctggaccacgcttaaaattgacaatcccagctacactaacgtgctgatcagttatgaactggtgtttgctgcggggattaatcccgattttggtcatcatcagttacagcaagaactcagccggaaatatatgccgtgggcagaagacgctgcaattagtgtaaccaccagtaatcgccttgattactacccgttattagccacgattcaacagtcgtctctagttgaacgagtcaccagcttaacgttgaaaaaatccacccaaaccacagaagcagtgggtgacagtgtagaagctggtgataatgaagtgctgattttagtttggtcaaaaaagaatccatcaaatagaggagctgaccatgagtaa

SEQ ID NO: 7187 - DNA, 2880 bp, Photorhabdus luminescens
atgagtaatcaagacgccctgttttccatcgttaaagacaatattgcctttgatactttactcactcaagctaagacagtgattgagcaacaatccggccaactttggagcaatacaggtgaaagcgatcccggtataactttattagaagcctgttgttatggcgcgtctgatttggcctatcgcctttcgctgcctctcatcgatctccttacccctgaacagcaagaacagacaccgggcgacggcatttttccacaggaattcggcccacaacaaatgctgacctgcggcccaattactgcggaagattatcgccgggccttattggatttgcatagcagcgataatattaacaacaaaagtgaaggttattttttctttaacgatgtacagctagttcgtgaacctgagaatcaacgctatgaatactggtataacaaagaaaaacgtgaatacagtttcactcaaactccagacagtcaacagttgacactaagaggaaactactggctttatttactcccgaaccgggaaactcagactgacaatacactggctcaacaaaatctggccgctttcttaaaaaacaaccgtaacctgggggaatctgtcagtaaaattatctggctacaaccgacggatttcttattacagcttgatattgaactgaatgatgatgttaaagataccgctgacatctttgctaaagtctatatgacaacagaacagacggtattagcaaaaccattacgttataccacccaagccatgaaagaatcaggttacagtaatgaagaaatatttgccggaccctatttacatcacggctggatacctgaattgcccacggccaaagattacaccacggctacagaattaaaactcagtcacttagttaatcgcttattggctatcccagggatacaaaatattacccggttagcattagataaccacgataaaaacatttccccgctgtcaaatgacaattggtcttggacaatcgctcagggctattaccccagattatggggtaatgatccattaagcttaataacttcaccaacaagcccgctcattattactgccaaaggtggaataaaagtctccatttctaagcaagatatagaaaataagatcattaaagcgccattaattgaaacacagccagagttattaaactggggaaaacatcgtaagatcctgaactactatccggtcagcaataaattgccggcttgctatggattacaaacctacgctgagacccaacaacaaatccacttgcatcaatttatgctgccttttgaacaaatgctagctaatggctgcgctgaacttgccatcttgccgaaactgttagcctttaaacaacggggaaatgcggtatatggcgcacaatggccttttaaagacaatactgttggttataaagtccaccagcaaatcatgcctaatttaatcaaacagctaaataatgatgcccaaatcaataatgatgacggtatgcattggcaaaactatgcaaaagaattgttaatcctgaattatttgctggagtattttggtacccatcgcgcagccaggccacttaccatagactttctggattttctctctactcaacgtggttatttagcacagcaacccgaattaacctatcaacgtaataatatccgtattgatcaagtgtcagcactacaaaaacggattgccgcccgtattggtctgggaggagaatgtttcaaagaaaaacccaacttggctaatctacctttctatctaattgaacatcgtcagctattaccggtcaaacctgacaataaattcgatagtgaacagaagcccgataagctggaaataaaaagcgtacccaattctaaaaaccaacaattaatcattacccaaaatgggacaacgggccagctattgcatggtcaggtcattaacttgattattattgagggtgacagagaatttacactacgaggccaaatgattaccgatattacgggagataccttctcgcttgacactctcaatagcactgatttagagcgcaatctaaatcgagtagaacaagcatttgagcaaggtaatttacgctggcgcaatagcccagtatggatggaagatatggattatcaactggtttatgccagtgacacatatcaaactggcgcaagagatgaacgctggatcacctctagcacccaaagcccctttcccgccatgatcgatgtgaatgacgaaattacgctgaaatatattatttcacccgatgagtcatccacaaaaatattggctaatagtaattctcccaccgattatcagcttaaagcacgcgtagtccaattcgaccgaattaagggctggatattaattaaaaaaatatcagggcaacaatatgatttcccaaaatcagaagacgcatggcgttatcgttggtacttttccaatgaaaaatacgcattggctgaccgcttttcatttatagtcagtgtagtgattaatcgtcagcttattgagaatgataagatcgacccttataaactggaggcgtgggtaaaagtggagatcttagctgaattcccggcacatctttccatgattttccattggctatcaccggaacaattcaataattttgctgatacttataagcgttggcaaaacaatggcgcgcctctgggtgatgaagcctataatattttagaaaccttaacgttagggcgtttaccttcagcggcaaccggtacgggtaatatgcgaattgccaccgaacagcaaagaatagaggtaattggtgagtcaggtaccgaatggaatgaaaaggtaataaaagacaatcagttattatatgttccaaaaatctaa

SEQ ID NO: 7188 - DNA, 1032 bp, Photorhabdus luminescens
atggaaaaagaatataatctatccaatatagaaaacaccaatcctgaatcaataggaccttcagtagatgcattaaaaaatcgctttaaagaaggcagtatccccctacaaactgattattcagacctgattaatattgctgatatcggtcgccaggcagttggtaaagcacccaatcaaatcgataatccaaattcaggcttagtgctgaataatgatagtggattagcagtaaaggttaacattagcggcggtttacaagcggataaagatggtgtcagtgtaaaaatcaaggataaaagcctattagctgataataacggattatcagtaaattatggcaaagggttacaacttgataaagataatgacaataagcttacaatcaatagtcatgacggtattgaaatagttgccggaggtgtaaaagttaaagctgggaatggtatcacggttaattcaagcggcgtcagtattgatcctaacacagtactccctagaggaatgattgtaatgttttctggtaaaagtgttcctacaggctggacattatgtgatggtaataatggcacaccaaatttaattgaccgatttattttaggaggaaatttttctggtattgatggaaagagcagtactaccgtttcaggtcctaaagacagcaaatcatttaattttaactctaatgaagctacattaaatatcaatggtaaaacaagtgagagatcattatctattggacaaatacctaatcatagccatcttagtggaataaatattgatacaaatatcatggctcaatatggcgctactcagatcggcaaaacagatagagctgtagcctcatcaaagaataccagcgagagatatctctattattcatcaggaatactctcctctaatggaacgatcggccaaaacagtcctgaaacacacgatcatgatattaatttaacaaacacaggcaatcatttccacaagaaccaaataacaactccttattatatacttgctttcatcatgaaaacttga

SEQ ID NO: 7189 - DNA, 1680 bp, Photorhabdus luminescens
atgacttcggagccaaatctgttaacccggattaccattactattgaagctaataattcacaggtggctaaaaaagtattacatggctccctgtttaatcaaaccaatataaaaaatttatttaatacattctttactcaatatcccattaatcaggatatctatttagaaacattaactctggatcttggtgaaataaatttacataatttcaattcactattccctgtaagacttaatattgcactaaataaagcattaaaccaatatcaaattaataatcaggagagaaaaatatccctaataaaatcacaatcacaatcacaatcacaatcacaatcacaagaaataaccaacaaaccttatttattatatgtcaataactcaattaatattgaagttttcattcattatttaaatcaaaaaaactccgcattcaatttagtagagattaaaaataatcataaaaatattgatatcaatattcaacaattaattaatcaattagctggaatagaagataaatggactttgtttttagcaaaaagctgtttatctgaaccaagtctgcaacggttattagcgctcaagcaacccgccttattaagcgctattaacaacagactatccgaaggagtaaacagatcacaatatttgggggagcctgtctcccccggacaactgatactcaatgcgttgcaatatatacagctaaataatacacaggagatacctaaactggatgcgaaagtgctatcacatatcacctctgaattagataacggtacacttaatgcaacatctattattacgttatttcgccagattattactgacaatattccattaaataattggttaaaacagatctggcaaactattactgttgcaaaatttagtaaaaaatatctatcagctaaagaatatcaatatttatctgagcattttatttcagaccatgcagataaagataaatctagcaagaaattagccgtaactcatgttgatattaaaaatgttcatagatataaatattcaataaatcaggagacaatatcagagaaccagaaaatattttcagcatcgaataacctacatattacaggaaataactctaacccattacagactaccaataaagcacgcgataaatcggttttattatccgaacaaactcttccctatcaggtaaataatgcggggatattggttttatggccgatgctacccgcattatttaatcaacttggcttacttgaagaacaacgatttattcatcatcaagcccaatttaatgcggttaatttacttaattatctgattttgggagataaagaagtacagataaaacaaaatatattgaataacgttctgtgtggattaatggctgacgaagtgattgaattagcccccactgaaccagaaaaacaattgatcatagatcaatggctagatgccgttatcagccaacttcccggctggaaaaaattaacccacaatgacgcgcggcaactgtttttacaacggcccggtcagttactaatagacgaaaaggaaatcaaaatcacggtacaacatcaaccgtttgatattctgttagccgattggccgtggccattaaatatcgccaaacttccctggctggattgccctttaaatattgactggcaaaacatttag

SEQ ID NO: 7190 - DNA, 2085 bp, Photorhabdus luminescens
atggactacctactgacaaataccccctgtattgtggctgaatcacactggatttatccccatttggaacgtatcgatctactattacagcaatactattataaaaagagcgaccagtacgattcattaccggaaagttttttattgaccgaagatgaagtcgaacaatgtttaatatcaccgcaaggagttcctcattggttaactaaagtcaataatcctatttgttatccagaaattaaggaaaacccttcccttgatgcattatcattgttggtcgaacgttttgaactgactgaatttgagcgtgatgttttattattaggtttattaccccattttgacagtcggtatcatgcgttatttgccgcgctaaatggcaatagtaaaaaacagtggcccaatttcgcattggcgattgagttatttagccaacaccaaaatgactggcaattactacaaaacagctttttaccgcaaacaccgttaatcaataaccaactattacggcttaataatcacgaagaagttatttggctacaaacacaattcttaactcataacgctatctggcattttttatcgggacaacgaacacttttaccacctttgataagctatgctaattggcatactcccgcctcacataattggtatccacaaactctttatcattcactggaaaagatattattgaatgaaaccgataaaatacgtccattggtcatactcagaggaaaagaaggcagcgccagagaattagcggtcagtaatattatggcatatcatggtattcataccttaatccttgatttagcctgcctgcccgatgaagaaaacagtgtcaaaatatccagcttattagcggatgtaatacgggaaactcggttacatgatgcctgtttattaatccgcaaattctctttgcttgcagcggaaaagaaaatattacaccacgaattatctattttactgaatcagccaaaattacgcgtggtttgcctggtagaatcgggaaatggattagcttggcttaaacatctaccaatggtgcaaattgacatgccagtaatgactttagcagagagaaaaacaatactgaaagcaaatttaccggagaatgtcgctcaggaaatcaatattactcagctctgtcagcgcttttcctttaccgcggaaacattaccgctcattcttgcagaagctcatcaatatcaaataattcgacaaccagaagatcaaataaaagaaatagacctgcgtaaggcattaagttttcgcgcccaacagaatttcggtaaattagcccaacgcataaccccaaaactcagtttcaatgatttagtggtttcagaaacattagcgcaacagttaaaagaaattatcgctgccattcattaccgtgaccagattctaagcgcaggatttcaggaaaaaatcagttacggtaccggtattagtgcattattttacggtgaatcaggtaccggcaaaacgatggctgctgaggtcattgctggttatcttggggttgatttgattaaagtggatctctctaccgtggtaaataaatatattggtgaaacggaaaaaaatatctctcgtattttcgatctggccgaagcggattccggggtgctgtttttcgatgaagcggatgctttatttggtaaacgcagtgaaaccaaagacgctcaagacagacatgctaatattgaagtttcttatttattacaacgtctagagaattatccggggttagtgattttagccaccaataaccgcagccatttggacagcgcgtttaatcgccgctttacctttattacccgttttacttatcccgatgaagcattacgtaagaaaatgtggcaaaaaatttggcctgaacaactgacattatccgatgaaattgattttgaacatctggctaaaagatctgatttaaccggagcgaatatcagaaatatcgccttattatcatccatattggcagcaaatgacaatattggacagattgaaaataaatatatagaacgtgccgtgatacttgaattaaataaaactggccgcttggtattttaa

SEQ ID NO: 7191 - DNA, 693 bp, Photorhabdus luminescens
atgacaactataattgcttctgacaatgcgattattgagattaatcaagcattaaatgatattctaattaaatatttagacattcccggtcaaaacattgatattcgttttgatctacccgaaattaattccattcaatcagaaccgacagtcagtgtatttctttatgaaatacatgaagatctacaattacgctctgccgaatcaagacgttataatccggcaaccaatacattattaccgggatgggtaaatattaactgcaattatttaatgacttactgggagccgaataaaccatcgaacgacagcgccagcccggacagccagccagataatcaggcggcacaagtcatgacgcgtgttttaagagcattgattaacaatcgccaattaaccggtattcccggtgcttatacccgggttattccccaacaggaaaatttaaatagcttaggtaatttttggcaggctcttggtaatcgccctcgcctctctttactttattccattactgtacctatgaaactgaaaaatattgaagacaatgtaatcccagtcagtaaaatatccgcttctgtggatcaaaaacccagtctggataattcacaaataaaccaagctttaatataccctatggatttcaagatgcatcgcgacggcaagggagtgaatccccgggagcatagataa

SEQ ID NO: 7192 - DNA, 237 bp, Photorhabdus luminescens
gtgcgtcttgcccttgctaaagtgaatctgacaattgaacctgatacagaaaacaatcaaaacctggaaaatcaaaatgttattgttaaagtttcgggtattactagcgtaacttatttaccacaaataaaagatacacttaccaaatggaaaagcagtcaagaggctattgttaagataaatggtgtcggcattgttgtttctaaagaaaatgcggataagttaattgggatttaa

SEQ ID NO: 7193 - DNA, 1011 bp, Photorhabdus luminescens
atgccaataaatgaccttaaaaaaaaattcgaaattagccctcaagcagctcaagctattggtgctcctgcaagatcaaatagcagtaaacaagctgagcaccaaactgaacaccttgaacttgatacatctaaaaatagaagagatagaaaagatttaaatgcacaagccaccccaaatcaacagcacaccaaaaaactggaaaccgaagtaaataatggtggcaataaaagtaaagcacaggcgcatacaccagatttggtgatgaaaaaagaaagctcagtaacaccgaacactcgcaaaagtccgaatgagaaaatcaaagctgaagatattttccatcggtataaagatagattttctccttccgatagagaattaccatttgaaataatgaatgaaatcaccaataatggaatagcattctcctctgaaaaagcacccgaaagtcatttagataaagtaaaagataagaaattcacgctgaggcattatacttctggaaatgggcaggaaaaacctacatttaatgagattggatcaaactttaatttggtaaatgaaggaataaaaacattaaagcgtactcaaggaagcaacactaatgaagatgattggaaccgtctaggaaatacggcatttactttcttcttgttagcaatagatggagaagtatctgatagaaaattcctgtctaatacgactcactttgcagaaattgatatagaaaaccctgctgaacttaaagaacttgggttagatgaaactgagttctttgcttctcctgatttgcttcacgaaaaaaatctttcccaagcccctgctgtaaaagggaaactatctgacttaaaatcattattattaaaacaatctggcataaaaccagttcaattacagtctttaggtgcaaaagggattctggaacgtatagatagtaagtttaatggcagtcttgaaataaaaatcccaggaaacgtgaaagtgaaggaatggaaaaaagtcgagaaataa

SEQ ID NO: 7194 - DNA, 975 bp, Photorhabdus luminescens
atgttatccacagaaaaacacaataaagatactaaacacccaagaaatagagaaaaaaaattctcaatacaaccagaaaactctactcaagatgatgaggatataaaaaataattccttaggagttgggctagatttagatcaaatgataagaaatacgtcttccaccttaacaaatgcccctcaaaaacccgaagatggatattactatcatatttccagaggaaataatttacaaagcttcctacaaaacggatttaaaccgcaaggctcacctggcccaaccttatctgaagaagatttttcacgtagaaaaattggtatcataaagcttatctactctattatagccacgactattaataaaaaccgtaaagcaaagaaaatctctaaagataatttccttatgcctcaagaattttggcatgagttcaaaaatttttatcagaacatccccactcaaacaaatatcgatgatcaattattaaaaaaatccattacggaaagtatcgacaaacttgaccaaaataaatttatggagaagcacagtgaccgtaagcaaactattatcaacaatgagagagaagctattctgcaacaagatgaaaggattaacgaaattatttcaagcagagcaaaaatgatacagcaacgagaagctgaaaatacagaaggatatatctatcttgccccacacaaaaacacacttttggaatatatgaaacatttacaggaagaaaaaaatctatttcttatattagcagtcaaagaggacatattcaccgaaaaaggattagaacaagatccacaagaacctcatggggccgtcagatataagggagcattatctacagaagaacttaattttgttaatcaagaaggtcaaatctgtgcaatacctgcatctattggggaaatggattatggcgattttattttaaatcagcagcaagtcatagatttttgtaagaaataa

SEQ ID NO: 7195 - DNA, 138 bp, Photorhabdus luminescens
atgacctatcaggagatggaagaaattattaattccccggattatcatgttattttaggctatttttttagtcgcaatgatcaggctttgcgcttttataccaatacaaatccagtaacaagttatgttgataattaa

SEQ ID NO: 7196 - DNA, 927 bp, Photorhabdus luminescens
atgaagaaaaaaaacacaccaacgccacatgacgctattttcaaacagtttttaagtcatattgatacggccagagactttctggagatacatttgcctgcgacattacgggcagtttgtgatctggatacattgcaattagcatcagggtcgtttattgaagacaatctgcgtgcgcattattccgacattttgtattcactgaaaacggtgcaaggtgacggttatgtgtactgcgtgatcgaacaccagagttccccggacaaaatgatggcatttcgattgatgcgctatagtatttcagccatgcaacggcatctggagcagggacatgaaaaattgccgctggtcattccggtgttgttctatcacgggaaaatacagccgtatccctggagtaccaattggctagactgcttcgatgatccagctctggcgaaggagctctattccggtccattcccgttggtagatgtgacggtaattccggatgatgaaatcctgacgcataaacgggtcgcgctactggaaatggtacaaaagcatatctggcagcgtgatatgatggggtcactgcaaaaactgtccatattgctggcgtatggttaccatacggaagagcagctaaaaagcgtgctaaactacttattacaggcgggagataccgccgatccagagggttttatccggcgactggcagagcagtccccgaggtatgaggaggtactgatgacaatagcgcaaagattggaacataaagcacgtcaagaaggacaccaagaaggacgccaagaagggcgtcaggaaggacgtctggaggcaacgttaaaaattgctcatgcattgctgaacagcggaatcgatcatgaaacggtgatgaaaaccaccggtctaagtcagaacgaacttgagcaaatacgccactaa

SEQ ID NO: 7197 - DNA, 102 bp, Photorhabdus luminescens
atgaatctcgaccgtgaaacggtgatggaaatcaccagggtgaatttgaacaaacgtccgacacacttactattaatacgttatcggcataaaaatgcttga

SEQ ID NO: 7198 - DNA, 450 bp, Photorhabdus luminescens
atgtctacaactccagaacaaattgctgttgaatatcccattcctacttaccgatttgttgtctcgatcggtgatgagcaaatcccttttaacagcgtttctggcctcgatatttctcatgatgtcatagaatacaaagatggtaccggcaattactataaaatgcccggtcaacgtcaggcgattaatatctcactgcgtaaaggggtattctctggcgatactaaactttttgactggattaactctattcagcttaatcaggttgagaaaaaagatatttcaatcagtttaaccaacgaagccggcactgaaattttaatgacctggagcgtggcaaatgccttcccaacctcattaatttctccttcttttgatgccaccagcaacgaagttgccgtgcaggaaattaccctgaccgcagatcgagtgaccattcaagcggcttaa

SEQ ID NO: 7199 - DNA, 1083 bp, Photorhabdus luminescens
atgccaacggtaccaacctatcccggcgtttatatcgaagaggacgcctcacccgcactctctgttcagtccggtgcaacagcagtacctgtctttgccgtcgcaaaagacaattcattaataaccgatgattcttatattcgtgttaacagctggctggaatatctgtcgctcaaagggggacaatttactgccaccgataagcttgatatcgcactacgcgcttattttattaatggcggtggatatggctatctggttaaaaccgcagagttagaaaaacatgtgccaaaactcgatgatgtgacattgctggttgctgccggagaagaaatcatcactgccgcagacgccctttgcaaatctggcaaaggattattcgccatttttgatggtccaatcgctcaaataaccccagaccaaaaacccgatgacgtacttaaaccctataccgctacagcctatggcgcagtttattatccctggctgatcgctgaatggggagaaaataaagccgccattgatattccacccagcgccgtcatggccggtatttatgcccgtgtcgataacaaccggggtgtttggcaagcgccagcaaatgtcgctgttcaaggcggattgcaacctaaatatccgatgactgacgacctgcaagggaaatataaccagggtaaagccctaaatatgatccgcacttttcctaagagcgggacgctggtctggggcgctcgcacacttgaggacaatgatcattggcgttatatcccggttcgccgcctgtttaatagcgcagaacgggatattaaaaatgccatgagtttcgcggtcttcgaacccaatagccaacccacttggaaagcggtccaccgtgctatcgataactatcttcacaccctctggcagcaaggcggcttgatgggcagcaaagctgagcaggcttattttgttcaaatcggtaaagacgtcaccatgactgatgacgatattaagcagggcaaaatgattgtcaaagtgggtctggcggcggttcgtccagccgagtttattatcttgcagcttacacagaatatcgctcaataa

SEQ ID NO: 7200 - DNA, 1434 bp, Photorhabdus luminescens
atgccaacaataccaacttttcctggcgtctatattgaagaagacgcatcactggcactttctgttagccagggaaataccgcaatacccgtttttattgggcgtttcttaccgaaaaaaaccagcgcaacacctgaaataacccgcgtgagtagctggttggattttactaacctatttaacgtaggttgtgttagatcaatagcaatcacatcaaccgaacccacgcctcccaaacccgaaccgactcctcctgaaaaacctcaaacagtcgaagacgatgtatcagtcaaaaacaacgaaggagttgaaaacgatacagaagttgcggccacgacacaggccacaacacccaatgcagatgaaactcctcccggctacacttaccaggtcgccgttgatatctacacagtaagcagtgatgctttaaaactttatttccaaaatggcggcggaccttgttatatcctgccaattgctgataccagcaaggctaacacgctggcattaatcccggcgttgattgagcaggctttagaaatcacgttaattgtctgtcctgaacaggatgctgattatcagagccagatatataacaacctgaccccttcattattaaataacggctattttcttatcgccgataaccaagataaagcaaccgctatcagcgctaatgtctcctcacaaactgcaacgtattatcccgcagtgaaagtctcacagctgatgcaaacggaagaggctctcgtcgctgtttcaggctataaagatgccaatacaaccccagacaaagtgactaatctggtacagctcaaagagaaaaatcccgatgtctatcagcaagcggtgattgcaatacagaacataagtaaaacgattcccgccagtgcagtgatagccggtgtctactgcgccaccgatgccagccggggtgtctggaaagcacccgctaatgttgcgctgagtgggattagtgatgttgcggatcgactcacggaagatgagcaaggcaccatgaatcaaaatggtatcaatgcgatccgttatttcagtaacaaaggttttgtcgtctggggtacgcgtactctgcaaaatgatgataactggcgctacattccagttcggcgtttatttaatgcggcagaacgggatatcaagcaagccatgcaatttgccgtgtttgaacccaacagccagcccacctgggaacgcgtccgctcagcgattgataactatctccatcaactctggcagcaaggggcactggccggtaacagcccacaggaagcctattttgtccagattggtcaaggtgtcaccatgtccgacgacgatattaagcaaggcaaaatggtggtgaaagttggcatggcggcggtccgtccggctgaatttattattctgcaattttcgcaaaatgtaacaccgtaa

SEQ ID NO: 7201 - DNA, 1236 bp, Photorhabdus luminescens
atggaaataaaacagcccggcgtcaccatcacggagaacctgatatcccagcaacaagatgaggcatttatcggtgtaccggtttttatcggctatacccaaccggctaaaaacaatcatgctaaaaagaatcatgctaaaaacaatcgtattagtgacaaaacccccgtcaagatccacagcctgaccgattttaccctgtcatttggtgaatcaggattaatgtactattccgtgcgccacttttttgaaaacgggggtcaacaagcctatgtgctgtcgctaggatcggataaaccacgaggcgattttcaatcattgactaccaccctacaacaagattgggttaaacaagcgatttcggcacagagtgctatcacgttgattgtggttcccgatattgtttatctgaatcagatggatgctcccgattcagaaatcgatcaacacgataagattctattctggcaacagttttggcaatcagtactcaacctttgcaacagccgacgcggcatcatgggattactggatgcccccgatgatcccgccctggccgctgaatgtttagcccggttctcttccaatgatcggcaatggggtgccgtatactggccaaggttgaacagtgcttatcaggagcaaaatcagcctgttgtactttcacctaccgccgcagtggccgccgtcatccagcgtaacgataaccaaatggtcgtctggcatgcccccgcgaacgttgcgttagccaaagtcatcaacccgatacgctcttatattgaagctgatgacctgtttaatcagaacggcacttcgttgaatctggttcgcagcttccccggcaaagggacaaagatctggggatgtcgcacgctggacaatacgcccggttctccctggcgttatatccagacgcgccgtctggtttcttatatcgaagcccatatgactcaactgggccgggcctttgtgtttgaacccaataacgccatcacctggatgaagtttaaaggtcaggcttacaactggttacgtcagttatggctaaacggtggactgcgcggtacgcaggaagatcaggcatttgaggtgttactggggattgacgaatcgatgagtgaagcggatctacgggccgggaaaatgatcatgaagatcaggctggcactgttaattccggcggaatttatcgagctgaatctgacatttgatacccgcaccgggatcacccattaa

SEQ ID NO: 7202 - DNA, 459 bp, Photorhabdus luminescens
atgaacaatttatacaccccgtcggtatcacaccgttttatcgccagttttctgtttaacaatatccccagcccactcgacattgcctttcaacggatatctggcctcagccgtgagttgcaaactagccaacatagtcaggggggagaaaacgccagaaatacctggctggccgagaagatccagcatggcagtctggtactggagcgcggcgttatgaccgttacgccactcactctgacgtttgaccgcgtcctgcgtggtgagaaagccgtgtatgccgatgtggttatcattctactgaatgaacattcagttcccgtggcaagctggacgctaagtaatgcgctgccagtccattggtctaccggggattttgatgccaatagcaatacggtgctagtcaataccttggagttacgttatcaggatatgcgctggttaggagtgaaagcatga

SEQ ID NO: 7203 - DNA, 198 bp, Photorhabdus luminescens
ctggttaggagtgaaagcatgaccgtagaaattaaggagctgattattcaggctaaagtgaccgattcagccagtcactccagcacaccacgcacgctggcgcaggaagcgctggataacgcccaactgattgaaaaggtgaaacaagccgtgttagatgccttgcgtgaaacaggaggccattatgagcttaattga

SEQ ID NO: 7204 - DNA, 684 bp, Photorhabdus luminescens
atgagcttaattgaacgcagcctgtccaaactcaccctcaccgctttcaaggaccgcgaggggaaaatctcggtaggcagtttgcaagccatgtataaccccgatgccatccagctcgattatcaaacccgttatcagcaggatgaaagcattaacagtgccagtcaaagcagccgctatgtattatcccaaccggcgggtctgtcattagttctgttatttgatgccaccatgcccggcaacaacaccgcagtagaaacgcagctggcaattttgaaagccctgtgtgccgtggatgccagtaccaacgttccccactttcttaaaattaaatggggcaaaatgcgttgggaaaacaaaggctattttgcttgccgtgccagtggccttagcatcagttacaccctgtttgaccgggatgccacgccattgcgggccagcgctaccttatccctagtggcagatgaaagctttgtgattcaagccaccgagcaacagttaaaatcaccacccgtcaccgcagtcaatgtaactgatatgctttccctgccgttgatcgccttaggtgccggcgcttctttggctgggggtattgattatctctcgctggcctggcaaaacggtctggataatcttgatgacttcacccccgggcaaacactgcaagcgcagggggaagcatga

SEQ ID NO: 7205 - DNA, 1536 bp, Photorhabdus luminescens
ctgacaattaaccatcaaatcaatggcatcccctcggctaacatcacgctggggatcgccggtgatgccagccatatttttgacgccaaagcgcaagctgaactggtaagctgccgtccgaatcatgagcttagcgtgcagatcgaaaaaaacgtggtgtttaaggggatcatcgttcggcaaacattggggcttaaaggtcaggacaacctcattaccctaaccgctaaacactcgttacaaaaattaactcacaacttccattcgcaactgttcaacaaacaaagtgatgaggcaattctcaaaaaactattcagtcaggctggtatccctgtcacgataaaaccagcgcctcagcttaaaacggtgcatgaacaaatggtgcaattccgctgtaatgactggacgtttctaaaaaatcggctgctcgcgacccatacctggctgctgcccggcaacgatagcgtgacgctggtcaccccggaatccctgaaccggtcaaccgtgcataccctccaccagcgagccagccatcaggatgcggtgttatttgaagcgaatctgcaatgggataaccaacgcagtcccaaaaccgtgagtgtgcaatcctgggatatcgcccaacaaaaactgtctccagcccatcaggcaaaaagcagtggtctgggtcgcaatcaacttgccacagatagtctgacatcattgaccaaccaagcatggcaatgggctttcagctatccattggacaatgaacaggccaaacagcttgctcaaggtatcctgaataaccgccgaagtcacaacgtctccggtaattttgaagtcgaaggcgataaccgttatcaaacgggggatgtgctggcgttaagcggctttggtcaggggatggatggtcaggcgattatcaccggtgtcagtcacaccctcaatcaacggcaaggctggcgtacccggctaacgctggggctattaccggaaacagagcaagttgtaccaccggttaaagagctgcatgtcgggatcgtggaaaaataccaaaaagataaccagtcgctggggcgtattccggtcaaaatcccggcgttaaacttaaccaacggcaccctttttgcccggctgggtaaaccttatgccagccacgaaagtggtttctgcttctaccctgaaccgggagatgaggtgattatcggcttctttgaaggtgatccacgcttcccggtgatattaggctcgatgcacaatcctaaaaacaaagcgccattagaaccgagtgaaaaaaatccggtgaaaaccttagtgattaaacagggagaaaatcagcaagcattactctttaatcataaagataaaacactcgcattgaatagcggaaaacataccttatctctgcaacaggataaagatatcacgcttaattccgctaagaatcttattacccatgctcaggaaattaaaatagaggcgcaaaaatctctgtccgccgccggtaaatccggcgtagatattaaaggtgcgaagattaacttaacccaataa

SEQ ID NO: 7206 - DNA, 492 bp, Photorhabdus luminescens
atgacaaacaaagcactagccaataaagcatcagccgataaagtattagccgacatttacggtcggggttgggcctttccgccgcaattttctattaaagatagtacgtataaagatagcacgcatcctgaaatacccacgggcgtcaccatggcggaaggggccgaaaatgtccgccaaaatatgaaaattctttttctcaccgaacccggtgaacgaattatgcgagaaaattatggctgcggcctgaatgattatctgtttgccaatattcgtgacgaaatgatggcagaaattcaaacccggattgaagaacgggtattgcgttatgaaccccgcgccgatatcagcgaaatccaggtcaaccagagaaccgacctgcccaataccctgcatattcaggtcacctacacgctgagaggcagcgaaatcagccagcagattgaaggcgtcctcgaagtgaatgaaggccgggtacaggtgagtttatga

SEQ ID NO: 7207 - DNA, 417 bp, Photorhabdus luminescens
atgagcaaacaactggtggtggatggcgatttcttgctgttcgaaccattatttggcaaccggcaagtcaccattctggggctggcaaccatccgcggtagcggacacgcccaaatccagggcaaaaagatcgttatgatcggtgatgaaaaaaaggtgcaatttcaggcgcaatatattactcccagccacccggtgcccggcatggggatggtcaccattgctcaattaaatgccagtcaacaagtcaacttttgccgcagccctgccacggtaattgttgtcgggcaacaatttatcgcccgatttaccccaacccaacccgctaataatccatcgagtggcccggatgtaacggtccccagtatgggtaaaggccggtttattgccagtcaatatgcggtcactgccggataa

SEQ ID NO: 7208 - DNA, 2709 bp, Photorhabdus luminescens
atgggacaggccgagttagaaaataaactctctgctattgtgccggatactgcatttaaacttgatgaaagaagtacgctggatattttaaactggctacaagaatacgctaaaaaaatccctttcgatcaagagaaaaaacagttctgggacagtttttactttattcaagcaaataatccgcaacaattagcggatatttaccaaaatgtaaataaagccgatggccgattacccgctcatcaagcttttgttttggctttcttaacgttattagaaacaaccaaccgattgttaaatacctttccggcccggcaccgtgatctttattaccgggaattattggggctgaaacctaaaaaagcccaagcggataaggttgcgctaggaattactctcaatcctgacagcacagaatcgttgatagctcaaggcacgctatttgatgccgggcaagacagcgctggcaatccattacactatgcatcagatacggatttactggcgaaccaaggggaactgaccgacctatattggtaccgaagagataaagatggctggcaatcagcaaccccactgaaccactcagataatttggcattacccgaaaacggtattcgactttttagcccaacatcccatgatactcctgtgctgtccggttacctgattacctgctccttgtttgccatgccggcaggagaacgccgcattaaagtgactctggcaagcgaatgggcgggtaatactgatcacatcaccgctacaatcagcgctggagatcattggctctccttgtcaataaaatctatcgacaaaaccacgatagagcttggattatcatccagtgatgccgctgtcaccgcccctgatgccctagataatatggcgtttaatgtaccggcattaaaactgggtaccactcaaggccctattctgccggagattaaaggcatcgaagtcagtgttaatggcaaccgcagcgtgcgctatgcctctgacaacggtattgaacagacggataccgccagcttcccgtttggtcaatccccgtcgctgggttccggttttaatctggttgccccggaatggtatggctctgaaaacgcaacattaacgattacgcctcaatgggttggcttaccgacaagcagtttttcaacatggtatgacaaatataatccgaaacctgccagtaatggggtgttcaaagtacaaggttacttagtcacatctcaaaagagagacgctctcaataacgctaaatctcagtcattatttggtggaacaggtaccccacaaggacaaagtctgacattgaccttaccggtgatgaattatccccttgcagacagcccatcccccaacgaatggccggcatccgtgcgcatagaactggctgaacaggattttatgcacgcccaatactggcaaaatcccacggataaaaatgtcccctataccccgcaaatcagtgcattgcaggtacagttcaacgctaaagccaaacctgagcaattcaccgtttatcctctgaccccttttggccgggccgaggcaacagcaaaaatgccgacactcacccatgaagccttctatttaggctttacaggcgtatcaccgggacaaactctatccttatattggcaattagcagggattcaagccctcgctttatcctggttttatctcgacaagagcaatagctggaacaaattagatgaattagttgacgaccaaacccataacctgtttgaccggggtatctggcgtaccttattgccccaagatgcggcaaatcaggccgctctgatgccgccgggacgctactggctgaaagctgagataacggctcagaccgatcctcaggattaccccagcattaaaagtccgctatataacgccacgacagcgactttagtaaatgcccaagccattgaacaagctcattttatcaacggattggccgctggcagcattaaacagccaaccagcacattagtcgcaatcagcaacgtcacccaaccttgggcctcctggaacggtcgcccgccagaaaccgagcacgctttcctgacacgtctgcctgcccggttatctcaccgtaatcgggtactgagttggggcaacattgtcaccttattaaaagagcaatttgtcagcctgtttgacgtcaaatatccttctgccaatgaattaaccaaaattccggcaccagaaatacaacgactgattgtgatccctaacagccgttacaaagataacgatgatgtactacgaccaaaattaaaccctgcccggctggcagagatggtcgaatggatcaaacaacttagcagtccctgggcaacgattgaaattaataaccccacctacgttgacgttaatgtggactaccaagtgacctttatctcagggattaaccccgactacggccatcatcagctacaacagcaattacgccgaaaatatatgccgtggggcgaaaatccgactatcggcgtgacaaccggtaaccatattgactactaccaactgttagccaacatccaacaatccccgctggtggaacgtgtcaccaatttaagtataaccattgctaaccggaccacaggtgccataggtgaaagtatcgaagccgccgatgatgaagtgctgattttggtctggccagagaggcaccccttaaaccaaggagttaactcatga

SEQ ID NO: 7209 - DNA, 3354 bp, Photorhabdus luminescens
atgagtcatcaggatgccctgtttcccatcgtcaaagatgatattaccttcgatgccttactcactcaggccaaaacagtcatcgagcagcaatccggccaatgctggagcaataccagtgaaaatgatcccggtgtcactttattggaagcctgttgttatggtgcatctgatctggcttaccgtcattcattacctctgaaagatcttctaacccccaaacccgcggaacagatacccggcgacggtattttccctcaggagttcggcccacaacaaacactgacctgtggcccgatcacggcggaggattatcgccgggctttattggatttacatagcagcgacacagttaatgaaacaaacaacggttattttttctttaatgatgtccaactgatccgtgaacctgaagaacaacgctataaatattggtataacaaacaggaacgtaaatatacctttaacgatttgggtgccgacggcaaattaaccttgagaggaaattattggctttatttacttcctggtcaggaaactcaggccgataataagctggctcagcagaagctcaacgatttcctaaaaaataaccgtaacttgggggaatccgtcagcaaaattatctggctgcaacccatcaatttcctcttgcagattgatattgaacttaatgataacgtcatcgatattcctgatatcttcgctcaggtttatatggcggcggaacagatggtgctggaaaagcccgggcgctataccactcaagccatgaaagatctgggctacagtaatgaaaagatattctccggcccttatttacatcacggctggataccgacattacctcaaaccaaaaattacaccggcgctacggtattaaatctcagccatctggttaaccgattattggcgattaacggtattcagagtgtcacccggctagcattagctcatcacgacacaactattacgccattgtcgaacgataattggtcctgggagattgctcagggatattacccgagattatggggtaacgatccactggcattaattacctcaccagatagcccactgactattaccgccaaaggcggcgttaaaattgttgtttctaaacaagatatcgaggaaaagcttattgcagagccgctgatcgatacacagccggaattactggattggggtaaatatcgtaaagttctggattactatccggtgagtaataaattacccgcctgctatggattacaggccaaaaaacctacgccacagcaagtacaactgcaccaatttatgcttccttttgaacagatgttggctaacggctgcgctgaacttgccctcttaccgaaactcctggcttttaaacaacggggggagaccgtatatggtgtgcaatggccttttaaagcgggcacggtcaattacaacgttcatcaacagatcacctctgacttaaccgcaaaactaaactacgattcacaaatctatattaatgatgacattcagaggtccaactatataaaagagctggaaatcttagatcatctattgggttattttggcgctcaacttgccgccagaccacttaccctcgattttcaggattttctggatacccaacgcggttatttagcccaacaaccggaactgacctatcaacgtaataatattcggattgataaaatatcggcactacaaaaacggattgctgcccggttaggtttaggcggggaatgtttcagtgacacgcctgatctggctaatttgccattctatttaattgaacatcgccaattactaccggcaaaacccgatatccaatttaatactaagcaaaagcctgattctctggtggttgaagatgatcaattaagaatcacccaaaaagggacagcaggccgcttattgcaagggcaggtcattaacctgatcatcactgacaatgatagagaatttaccttgcggggtcagatgatcactgaagtgtcaggagagacattctcccttaacacacgcaatagcacgggtttaaagcacaatctggaaagaatactggaggcatttgagcaaaacaaattgttctggcaaaacagcccagtgtggttggaagatatggattatcaactggtttatgccgatgccacatatcaaaatgctaccgaagatcaacgttggatcacctccagcgcccaaagccccttcccggccatgattgaagaaaatgacgaaatcaccctgaaatatatcattacgccatctggaccatcccaaaaaacattagcccgtacagttcaagctgaaccgaaacccgaatatgaactcaaagcacgtgtcattaaatttgatcgtattcaaggcaagatattaattaaacgcaaccaagagtcacgggataattttccttccgagacagaagcatggcgctatcgctggtatttctccagtgaaaaatatgccctggctgatcgtttttcatttgtggttagcgtggtagtgaatcgcctgttaattgagagcaacaaagttgacccttataaactggaagcttgggtaaaaacggagattctctctgaatttcccgcacatatttcgatgattattcactggttatcaccgaaacattttgaagattttgccaatacctataaacgctggcaaaacaataatgcgcctttaggggatgaggcataccatattttagagaccttaaccctgggaagattaccttccgctacagccggtattggcagtatgcgaattgccaccgaacagcaacgtattgaagtcattggtgaatcgggcgatcaatggcatgaagacgtgataaaagataatcagctattatatgttccttatactaaaacggtagtattggtaaatattgacttcaataaagagaataataaagaaacgactgtttcagaacttctgtatcaaccggtagagaataaaggaaaattggtatttttaactgataacagtcaaataggccctgaatatgccgtactgaaatcagataatgtatggacagattaccatatcaaagtgaaaaagaataaaaatggggttattaccgatgaaatattgcatattaaaggaagaaaaaaagttggacttaatttatcatggacagcaatgaatttatatgatcttgatgcagatagtcgctggtcattctattatggatttgtattaggcgataacccagatctgtctggtgcattattccacaccgaagaaccgcttattttatcactcaattacatatctgaccctaatgaccttaaaggagaaatacggacaaaattcagctttaattttacttatgatggcaataacccttaa

SEQ ID NO: 7210 - DNA, 1218 bp, Photorhabdus luminescens
atggtaaaaaaatataacctatatagttcagacgctaatctggaaagtacgaacattcaatcaacaggaccttccgtcggtgatttgaaaaaccgttttaaagagggcagtattccattacagaccgattatgccgatttgattaatattgccgatatcggtcgtaaagcctgtggtcaggcaccacaacaaaatgggccaggagcaggattaaaactggctgatgacggtacactgaatttaaaaatgggcacgctttccagcccagacttttctccattaatactcgaaaaggatattttatctgtagatcttggtagcggtctgattaataaacccaatggaatatgtgttggtcaaggtaatggtattgttgtcaataatgataatgtcgcggtcaaggcggctaacggtattaccgttaatggtagcggtgtggcaatcaaacccaataatggcatcaatgttgatactaatggtgtctcggtaaaatcaaaaaattccacgattaaagtcgaatcctcggggatatcggtaggaattggttggggagtaaaaatagggggtgaaggattagatattaaagccagtaatgggattaaagtcgatggtaatggtgtttcagtcaaagccggtttcggtatcacggttaattcagacggtgttaatattgatgccaataaattactctccaaaggaatgattgtgatgttttctggtagcagtgctcctagcggctgggctttttgtgatggtaataacggaaccccagacttaagaagccgttttatcatgtgcggtgaaactgtttctgaaacagggaaaagcagtaataaagccagtggaagtgggagtggaaaaaacgtttccagaaatacaacatcaactgcggtttcggtcaatgttagcgtgctaaacacaacattaacagaatcacaaatacccaagcataaacacattgagagcctgccttattataccactctgggattcgcatatgatcatacgactataggagcaactaacaacaaaatagataactcagttaacggacttatatggaaaaggacatctgggccagactatcatccatacacatcagatataggaggtggacaaggacataatcataatgcatcagcatcatcgccttcacatactcacagtgttgatgtcgttccgccttattatattttagcttttattatgaaactctaa

SEQ ID NO: 7211 - DNA, 1965 bp, Photorhabdus luminescens
atgacttcggagccaaatctgttaaatcggattaccattactattgaagctaataatcaacaggtggctaaaaaagtattgcatggctccctgcttaatcagaccaatataaataaattactcaattcatattttgatgaatatcatattcatcagaatatcgctttagagaaattaacgctggaccttggtgaaataagtttccatgattttaattcattattcccggctcgtctcaaagttgctctgaataaagcgctcagccaatatcagacaaataaccatagggaagaaactctactgaataaaccaacatccaataaatttaccgataggacctctttatccagtgaaaatcatttaattaatgcagagaatttcattcatttcttatctcaaaaaggtccgcaattcaatccaatggaggtcataacgaataataaaaatagtgacatcaagattaagccattaatcaatcaattaatgcagatagaaaaccaatcagcattattattagcgaaaggctgtttatctgaacagggtctacaacggcttttagctatcagacaaccagtcttattagtcgccattaaccgtagattatccgcaagaataaacaaaccacaacatcaggaggagcgagtctcctccgggcaactgatacttaatgcactggaatatatacagcggcataatactcaggaaatacctaaacccgatgcgaaaatcatctcacgtattaccattgaactcgataacggtgtacttaacgcggcacctgttattacattactccgccaagctataacccgcaatattccattaaacaatattccattaaacaatatcccattaaatcgttggctaaaacaactctggcaaaccgtttctgtttcacagctttgcaaaaagcatctgcccgctgacgaatatcaatatctattggaatattttacgctaaaccacacggataaaaatatatccgataaaaaaccaaccattactcctgttgatatttctaatattcaggcataccaacacttgccgaaatattttactgcaaacaatgcaggcaagaataaatctgatacagaatcaaccatgaataacgttaatttttcaaatgttcaacaacatctgaccaatcaaaaaatagtatcagcacccgataagacacctattataggcaatcattataacccacatcaaactagcaataagtcacactctggatgggctttattaacggataaaaatacatccgataaaaaatcaaccattactcccattgatattgctaatattcagacataccaacatcaggctaatcagcaagtcatcaccgatgatcaaaaaatagtatcagcaccggataagacaccgattacaggcaatcattataacccacatcaaactatcaataggccatactctggacagactttattatcggaacaatccctgccataccagataaataatgccggcatattaattctgtggccgatgctacccacactatttaaccagcttggtctacttgagaaacagaaattcattcatcgtcaagctcagctcaatgctgttgatttacttgaccatctaatttggggaaccgaggagaaaccagcagaaagaaaattactgaattatgttctgtgtgggctaatagccgataaagatattgaatcaatccctatcgagccagaaaaacaattgatagcagatcaatggctggatgcggtgactggccaacttaccggctggaaaaaattaagccgtaatgatgtccggcaactgtttttacaacgaccgggtgaattattgacagatgagcaagaaatcaaaatcacaatacagcaacagccatttgatgcgctactgattgattggccgtggccattaaatatcgccagacttccctggttggatcgccctttacgcatcgactggcaaaatatttag

SEQ ID NO: 7212 - DNA, 2100 bp, Photorhabdus luminescens
atggattacctacctacccataaccaccatatagtggcagaatcacattggatttatccccatttggaacgtattgatctgcggttacagcattattattaccaaaagagtgacaaatacgattccttaccggaaagttttttacttaccgaagatgaattagatcagcgcttgaaaaaaccacagggcattccccattggctaactaaaccaaataatattgttattccgccagaaacagaaaaaagcccaactattgatccattatcaattgatctattgtcaatattagttgatcgttttgaactgactgaatttgagcgagatgccttactattaggtttattaccccattttgacagccgctatcatgcgctatttgctgctctgcacggtagcagtagaaaacagtggcctacttttgctttagcaattaacctattcagccaacgccaaagtgatcgacaattactgcaaaacagtttcttaccgcaaacaccattaatcagtcatcaactattacggctcaataatcacgaagaatctatctggctacagacgcaatttttaactcacaacgcggtctggcattttctatcaggccagcaggtcattctaccaccgctaataacctgtgcttattggcattctcctgcctcacatcgttggtatcctcaagccctttatcattcattcgaaaaaatattattgaatcaaaccgacgaaatacgtccattggtgatacttagaggaaaacaggacagcgccagggaattagcggtaagccatattatggcatctcataacataaggactttaactcttgatttagcccgcctgcccgacgaagacaatataacggtaataactaacttactgacggatgccgtgcgggaaacccggttatatgatggctgtttattaattcgcaacttttctttattcacagagaaaaagaaaatattaaataacgaattatccactttactaaatcaacccaaattacgcgtggtttgtctggcagaaccacaagactcattaatctggattaaacatctgccaatggtacaaattgatatgcccgctgctactctggcagacaaaaaaaccatgctggaagccagtttaccggataatatcgttcagaaaataaatatccctcaattatgccaacgtttttcattcaccgcagaaacattaccgctcattcttaaagaagcacatcaataccaaatactccgacaaccagcaggtcaattggaagaaactgatctgcgtaaagcattaagtttccgtgctcaacaaaatttcgataaattagctcagcgaatcacccccaaacgccgctttaatgatttagtcatttcagatgcattaacacaacaattaaaagaaattattgccgccattcattatcgtgaccaaattcttagtgctggctttcaggaaaaaatcggttatggtaccggtattagtgcgctattttatggcgaatccgggaccggcaaaaccatggccgccgaagtgattgccgggcatcttggcgttgatctggttaaagtcgatctctctagcgtggtgaataaatatattggtgagacagaaaaaaatatctcccgtattttcgatctggccgaagcagattccggcgtactatttttcgatgaagccgatgcgctatttggcaagcgtagtgaaaccaaagacgcccaagacagacacgctaatattgaagtttcttacctattacaacgactggaaaattatccgggattagtcattttagccaccaataatcgcagccatttagacagcgcatttaatcgtcgttttacctttattactcgctttacttatcccgacgaaatattacgtaaaaaaatgtggcaaacaatctggcctgaacaattgcaattatctgatgaacttgatcttgaacatctggttaaacgcactgatttaaccggtgctaatatcagaaatattgctttattagcatcaatgttagcgaaaaatgatcattgcgaacaaatcgaaaacaaacatatagatcgagcggttactctcgaattaaacaaaactggccggctaattttttaa

SEQ ID NO: 7213 - DNA, 903 bp, Photorhabdus luminescens
atgacaacgataattgcttctgacaatgctattattgaaattaaccaagcattaaatactattttatcccagtatttaaatattaatggcaataaaattgatatccgctttgatctacccgaaattaactccattcaaccggaaccgacagtaagcgtatttctttacaatatacatgaagatttacaattacgctctgctgaaccaagacgttataatccagcaacccgttcattattacccggctgggtaaatatcaattgtaactatttaattacttactgggatgcgaataaaccatcgagcgacagctccagtccagacagtcaacctaataatcaagccgcacaagtcatgacacgggttttaaatgccttgataaataatcgtcaattaaccggcattcccggcgcctatacccgggttattccacaacaggaaaatttaaatagtttgggtaacttttggcaagcgcttggcaatcgcccacgcctctctttattatattccattaccgcacccatgaaactccaagatattaaagaagatattacaccaattagccaaatttccgcttctgtggatcagaagccaaacctggataattcacaaatcaatcaagctctggcagataaattgtgtaccgatttaggtggcaccgaagatattcgccttgcgctggctaaagttaatctgatcaccgaaccaacaacagataataattataatcaggaaaatgaaaatgttgttcttgaagtctccggcatgaccctttcaacctatttacctaaaataaaagatattctctcaacctggaaaaatagtcagagtgccataattaagataaacggcataggtattattattgttgaagaaaatgctgataaattaattggaatttag

SEQ ID NO: 7214 - DNA, 987 bp, Photorhabdus luminescens
atgccaaacaaaaaatacagtgaaaatactcatcaaggaaaaaatcctctaatgaaatcaggggcgaataatgaacatgatctacaagattccccattaggcatcggattggatttaaatagcatgctggtaaatagctctaccagtttaagtcaaatccaggattattcattttggaaagaaaacatttccgaatattacaaatggatggttgtcgttgaatctcatttaaaacaattggactggaccttaaaatcaatggattcgcctgaatctgccggaactaacgtagccaaaaatatgggtgttactgcactgcaatctctattaaataccggaagcagtatagccggcggcgctattggaggagccatagggagcgcgatagcaccgggtgttggcactatagctggcgcgggtattggtgcattagccggaaccggattaaattaccttaatgacaccgctatgagtaaattaagtaagaagcttgaaatcgctcatccttaccctaaaacaagaaacatgatacttgatatcaataattacgataaaaacccgatcattaaagcaatcaaaaaaaacgtcaacaaagacaacttaaaagtcacggcgggcagttcattaacatcgaaacttgtaggaacagtcacctcaccaataaaatttcctgcctataaatttgctgagctggctgtatcacatcatagggcattagaaggattgagtgacgataaagccagacatatattagatttcaccaatagtatccgtgaagttcttaaggaaagccattctgatgccgttgcatttatgcgtaagaattatggcgataatgcaatgggtctttctggattttcttctaaaataaagagagaaaaattaaccttgaatacattagcaaagacaaaaaatgaaatagaaaatagaattaatagcatcaataaacaaacattgaaagtttcttcaagaagtcgaaatgaataa

SEQ ID NO: 7215 - DNA, 678 bp, Photorhabdus luminescens
atgagagggactcggcctggatttaaattttggaagttaaatccatcttctataaaaaataatggagtttctttttcatatttaagaaaagatgctaaatttggcaatacatttgctagcattaatggttttattctttttcctgaacagatggcccctgaagataaggttaaagttcctgtattatgctcctatgttcttgatgccaatacttgggcgcgtcagggaaattactgtggtgcaccgcctaaaccttcagatgggaaatcatgccaagattttggtgttttcaccgctcatcaattaaataaagcgattgcaagaaaatcggcagggggaatctgtgcatttgatgttagaccgacggccaaaaatccagcagatgctttttatcaaacattgcttgcaatgccttatcatggtaatggtttaaattataatgagatagtcgttcaaccttgggatgagaataagccacaaacaatacctattgaagcccttttttattcagaaaatccaggtttagttaatgcacaaaaagatcaacgtgattataaagatgcgacaggtaaatttttacctattgttcaaattaaattacctaaaggtataaatgtaaaacaggcaacagatgctgtatttacatttaaccctaaagatcaagttgtgagtcagtag

SEQ ID NO: 7216 - DNA, 888 bp, Photorhabdus luminescens
atgctagcaaatgtattgccaaatttagcatcttttcttaaatatgaaaaagaaactccattattttttatagaagatggatttaacttccaaaatttaaatccaggccgagtccctctcatcaaaactccagaacaaagaaaagcaggtgatactcaatcacctgcttttctttgctctggcgttatattacggggcactatacattcaaatgattataaattttggcaacctagcccatcatctataaaaagtggtggtgtctctttttcatatttaaggaaagacgctaagtttaaacgcttagcttatggatataaaaatggatttattattttccctgaacatatcgcacctgaagatagagtcgacttttctgtattgtgtgcatttcctattgatggctatacaaatgagagggcgaatcaaggttgtggtgaaaatattactaaggcgaaagataaaggtaaatcttgccaagaacaaaatgtgacgaattccgatgattggataaaaaattataggaaagtaaactctcaagatttttttcaatgtggatttaatgttactaaagatgtcaataatccggctatagctttctatcaaatgttagaaagtatcaaaaaacttccacgtactcctaatactccaccaaaacagaatgaaatcagaatttcaacctgggaagaaagtgatcctaataaattacctattgaagcccttttttattcagaaaattcaggtttagctgatgcccaaaaagatcagcgtgattataaaaacgcaacaggtaaatttttgcctattgttaaaatgctactaccaagaactttaaatgaggatgcattattcaaatttaatattaaagatcaagttattaatccataa

SEQ ID NO: 7217 - DNA, 798 bp, Photorhabdus luminescens
atggagaaaaaatataaccggtccacttcagaatccaatacagagaatatcaatactatggatcgccatgaagttggtaaaacgccctgtcaaactgataagccaaattcagcgctaaaaccgggtgatgactatacacaagcaataaaaattaaccctgacggcggcttaacagcagataaagatggattaggtgtaaaaattaaagtgggtaatggtattaaggtagacagtagcggcatcagtattgatcccaataatgtattgccaaaaggaatgattatgatgttctccggtagagatgcccctacgggctgggctttttgtgatggcaataatggaaccccagatttaagaagtcgttttgtcatgtgtggtgaaactatttctgagacagggaaaagcagtaataaagccagtgggagagggaatggaaaaaacttttccatagatacaacattaactgtggtttcggtaaatgttactgtggaaaatacaatattaacagaatcacaaatacccagtcataaacatattggaggtatgccttattattcttgctttggaaataaatatgatgctgttagtgctacccaaaccgaatgccaaataaatgatataccagatagctcaatatggatgaaaccttcatccggacttaattgctatgccaatacatcaaacacaggaggaggacaaggacataatcacccggctacagcatcgtccccatcacataatcatagtattgatatcattccaccttattatttactggcttttattatgaaactttaa

SEQ ID NO: 7218 - DNA, 261 bp, Photorhabdus luminescens
atgaatatatctagttatttcttcctaaatgaagaaaacattagatttaataatcaatgtttaaatacatacattggctacccccaacccatcagtaaagattggcccaacctgcttgccgggttccaaagatatattgacgatattattaatttaacccgaattctggataagaaattgacgagaagcctgttccaggagcaaagttttggtgtgcaccaaaaacagctccgaggggggaacaggctatggacaacttag

SEQ ID NO: 7219 - DNA, 885 bp, Photorhabdus luminescens; identical to SEQ ID NO: 7045

SEQ ID NO: 7220 - DNA, 858 bp, Photorhabdus luminescens
ctgtatcttaaatttgatatcgcgaaagcagaggtcgttgataggccaaatttcattgtggatggctggcctgggttagaaggaacagaatttgaaaatggaatagatgcagctatagaattgaccaccaacaccgtttgttttttcaaaggaaaatattgtgtagattacaccatcgattcacacacaattaagatgaatactatttcagaccggtggggaatgaccgggaaatatgcagcatttagtagcaatctggatgccattatttcatggccagatatcgatggaaattttatttattttttcaaaggggattcttttattcggttcgacccaaatttgaatgcacttgatgccgggccaatcatcatctccagcgataatgagggttggagaggattagccttcaaaaatattcaagcggcggtatcggtcgatactgatttattaggcagcaaccgagacaatagtggaggcaatagtaaagtctgtaatggaacatgtggtactaatgacacgggtaaatattgtttccagttacctcaaagtattagatttggtttgatagcctacgctaatacaaatatttcgcaaactgtaaaagtatatattgacgatcttctggtagatacattaaccggtaaagggcaaaataatttaatggcgactaaagcctacacatcaggtacaggcaaaatctgtattgagattgaaggggatggcaaaccatgtaagctacgttatttcgataatatatttgatggaaaaccgggaacagctattatcagcgctgaaaatggtaccaatagtcattacaatgatagcgtggtgttcttgaattggcctctgacataa

SEQ ID NO: 7221 - DNA, 210 bp, Photorhabdus luminescens
ctggcagaacagtccccgaggtatgaggaggtactgatgacaatagcacaaagattggaacataaagcacgtcaagaaggacgtcaagaaggacgtcaagaagggcgtcaagaagcaacgttaaaaattgctcatgcattgctgaacagcggaatcgattgtgaaacagtgatgaaaaccaccggtctgagccagagtgagcttgaataa

SEQ ID NO: 7222 - DNA, 963 bp, Photorhabdus luminescens
atgaagagaaaaaatacaccaacgccacatgacgctgtttttaaacagtttttaagtcatattgatactgccagagactttttggagatacatttgcctgcgacattacgggcagtttgtgatctggatacactgcggttggaatcagggtcgtttattgaagacaatctgcgggcgcattattccgacattttgtattcattgaaaacggctcagggtgacggttatgtgtattgtgtgatcgagcaccaaagttccccggacaaaatgatggcatttcgattaatgcgctacggtatttcagccatgcaacggcatctggagcagggacatgaaaaattgccgctggtcattccggtgttgttctatcacggtaaaatacagccgtatccttggagtaccaattggctcgactgtttcgatgatccggccctggcggaggaaatctattccaataaattcccgctggtagatgtgacggtaatcccggatgatgaaatcttgacgcacaaacgggtcgcgctactggaaatggtgcaaaagcatatccggcagcgagatatggcagagctgctgcaagagttggttatactgctgacgtatgattactatacggatgaacagctaaaaagcgtgctaaactacttattacaggtgggagataccgccgatccagagggttttattcggcgactggcagaacagtccccgaggtatgaggaggtactggtgacaatagcacaaagattggaacataaagcacgtcaagaaggacgtcaagaaggacgtcaggaaggacgtcaagaagggcgtcaagaagggcgtcaggaagggcgtcaggaaggacgtcaagaagcaacgttaaaaattgctcatgcattgctgaacagcggaatcgattgtgaaacagtgatgaaaaccaccggtctgagccagaacgaactggagcaaatacgccactaa

SEQ ID NO: 7223 - DNA, 240 bp, Photorhabdus luminescens
atgcggaagacaatatatagcgttgcaaagggaaatcttgcttcgataatggatcaagttgttcaggattgtacaccaatattgattaccagacaaaacggcggtgattgcgttattatttcaagtgcagaatatgcaagccttgaagaaactgcttatttactacgttcatccgctaatgcaaaacatttacttaaatcattggagcaggtaaatagcggaaatttgcaggaaaggtaa

SEQ ID NO: 7224 - DNA, 621 bp, Photorhabdus luminescens
atgaacaccgcaaccaaacaacgtaatttgaatgagctacaggtgttactgcaaaaacgctttgacataatattcggctcattgatgcctgagtttgctgaaaaggcgaaggccagcaatgctcttgttcttccggatagcgaactttttgggctgctgtactcaaccgtacttgaaaagagtgccaggactcccgatcgcgaactccgcaaactaaagcgtcgcgctgagaacctgtccaatttttataaggaaattgagcgcatgggtggcgtaattaaagcagtagatgttgctgatattctcggtatcacgcgtcaggccgttaatttgcgagtgaagggaaataagctgctcgctttcaagaagaatagtgatcatgtcttcccgctctttcaattcaaagaggggggactgttacctcactttgaagacgtcatgaaaacaatgagcaatgatatcgggcctatttccagaatatcgtttttgactacccccttgagcgacaagaacggtaaagggaaaacccctatcgagatcatgaaagaagatagcagcattgatgatgtttcaaaaatgcttcgtgcagcgaaacagatgggcgaacagatcgccagttaa

SEQ ID NO: 7225 - DNA, 684 bp, Photorhabdus luminescens
atgcaaacaaaggagacttctctttcaaagtttgactatccaaatttagatcaagaaattacggcaatctttgaagatgattcattaccgacgcattcacctggtaatggggacttaaaacgctggcagaggaaagaatggccatcggctataaatttctccactggtgacggtcgatataacgctcctgatgatacttttggtgtttgctacatggcagacaaggccgtttcagcgcttgctgaaagttttgggcacctgatacataaagatgggcggaaattcgttgaggagtctgttattgaaaactcacgaatgtgtctgattcgcccactccggccactcgtttttgtcgatgtggggaaacttctgggaatgctgcacattacgttagacgtctcagtcggagatgactacacggtgacacagagagtaattgcgtgcctctacaagctcgccagagataagtttgacggtgtttgttacttatcgaggcattttccttccactgatttctgctatgcagtctgggaatcggatgaagaaaggtttgaagatgtaggaatgaagaatctcgcggaataccacgattcagaatacatgccatcgaactggaaatactccagcatcacggctgaagaactgctcgaagacgtgcttcgattcaaggttgtcccgctttaa

SEQ ID NO: 7226 - DNA, 4449 bp, Photorhabdus luminescens
atgattgaacgcggtaaatttcgttcactgacgctggttaactggaatggtttttttgccagaacatttgatcttgatgaattagtcacaaccttatcaggcggtaatggcgcgggtaaatctaccacgatggcggcttttgtcaccgcgctgatccctgatttaaccttgttgcatttccgtaacaccaccgaagccggtgccacttccggttctcgtgataaaggtttgcacggcaaattgcgggcgggggtctgttactcaaccttggatgtgattaactcccgccatcagcgggtggtggtcggggtgagattgcaacaggtggcgggacgtgaccgtaaggttgacatcaaaccctttatgatccaaggcttgccaactgctatgcaacctacgcagctattaactgaaaatgtgggtgaaagacaggcacgtgtattgccactgaatgaactgaaagatcgccttgatgaaatggaaggcgtgcagttcaaacaatttaactctattaccgattatcatgcgctgatgtttgatttgggggtgatacccaaacgcttgcgttcagccagtgaccgtagtaaattctatcgtctgatcgaagcttccctgtacggcggtatttccagcgccattacccgttccctgcgtgattacctgttgccggaaaacagtggtgttcgcaaggcatttcaggatatggaagcggcactgcgtgaaaaccgtataacgctggaagctatccgggtaactcaatctgatcgcgatctgttcaaacacttgatcaccgaagcaactgcttacgtttctgctgactatatgcgccacgccaatgagcggcgtacttatttggatcaagcactggcattgcgtggagagctatttggtagccataggcaactggcaaccgaacggtatcgtcatgtcgaaatggcgcgggaactggaggaacagagtggagcttctgttgatttagaagctgatcatcaggccgccagtgatcacctgaatctggtgcagacagccatgcgccagcaggaaaaaattgaccgttatcagggagatctggaagaactctcctaccgtctggaagagcagactgaggttgttgaagaagcagcggaacttcaagctgaatatgaagccagagcggaagcggcagaacaggaagtcgatgagctgaaaagccagttggcagattaccagcaagcactggatgttcagcaaacccgcgctattcagtatcaacaggcgttacaagcgctggaacgtgctcgtgagctttgtcggctaccggatcttgccgctgataatgcagaagcatggttggaaacttttcaggctaaagagcaacaggcgacagaatccctgctgacattggaacagaaattaagtgttgcagatgcggctcatagccagtttgagcgggcatatcaactggttaaaaacatggtgggtgaaatcagccgcagtgaagcgtggcagagtgctcgtgaattgctgcgtgactggccgtcacagcaacatctggcggatcgggtgcaaccattgcggatgcgattggctgaattggagcaacgcctgaccaaccaacaaaatgcagagtttttattaaacgaattttgtaaacgtcaggggcagcaatatcaggccgaagatctggaagggttacagagtgaacttgaagcacggcaggaagcactaagcttaagcgttaatgaaagcggtgaacgccgtatggagatgcgtcaggcgcttgaacaactgaaacagaaaattcagtcactgactgcccgtgccccggtctggctggctgcgcaggataccctgagccaactgtgtgaacagaatggtgaagcgctggcgagcagtaatgacgtgacggaatatatgcagcagttgcttgaacgtgaacgtgaggcaacggtagagcgagatgaagttgcggcgcaaaaacgtgagttggaaaagcagatcgagcgcctcagtcaaccgagcggagcggaagatagccggatgattgcgctggcggaacgtttcggtggagttttgctgtcagaaatttatgacgacatcaccattgatgatgcaccgtacttctctgccttgtatgggccagctcgacatggcattgtggtgcccgatctttccttagtacgttcacatcttgaaacgctggaagattgcccggaagatctttacttaatagaaggtgatccacaatcctttgatgacagcgtatttaatgccgaagagcaggcaaacgcggtattggtcaaatcgtctgatcgtcaatggcgttattcccgttatcctgaattgccattgtttggtcgtgccgccagagaaaaccgtctggaagccttgaatctggaacgagataccttggcagagcgttatgccacgctatcttttgatgtgcagaaaattcagcgtgcgcatcaggcattcagccagtttgtgggtaaacacctctctgtggcatttgataccgatccggaagcggaaatccgtgaactaaggcagcgtcacacggaactggaacgtgaactatcccggtttgaagagcagacccaacaacagcgtcagcaatatactcaggctaaagagagcctgacgacattaaatcgcctgatccctcaagttacgctattgctggatgaaaccttaatcgatcgcgtagaagaaatacgtgaagagctggatgaagcgcaggaagcagctcgtttcctgcaacaacatggctcggcactggcgaaattggagccgatggttgcggttctgcaaagcgatccacagcagcatgaacagttgcaacaggactatgaaacagccaaacagagtcagcatcaggctaaacaacaggcttttgcgctggtggaagtggtgcagcgccgtgcgcattttagctacagcgattctgccggtatgctcagtgaaaatgcggatctgaatgataaactgcgtcagcgtctggaacatgcagaatcggaccgcagtcgcgcccgcgaacaattgcgtcaacagcaagcgcagtattcccaatttaaccaagtgctggcatcgctaaaaagctcttacgaaaccaaacaggatatgctgaaagagttgcaccaagagatgaaagagattggtgtgcgggcggatgccaatgcagaaatgcgcgcccgcgagcgtcgtgatcaactgcatgaggcacttagcgctaaccgttccagagtcaaccaacttgagaaacagatcgccttttgcgaagcggaaatggatagcttgcagaaaaaactgcgtaagctggaacgtgattactatcaaatccgtgaacaggtggtttctgccaaagcgggttggtgtgcggtgatgcgcatggtgaaagacaatggcgttgagcgtcgtctgcatcgccgtgaactggcgtatatggagggtggcgcgttacgttccatgtcggataaggcactgggtgcgttgcgtctggcggtgtccgataacgagcatctacgcgatgcgctgcgtttatccgaagatccaaaacgccctgaacgtaagattcaattcttcattgcggtttatcagcatctacgtgaacgtattcgtcaggatattatccgcactgacgatccggttgatgccattgaacagatggaaattgaactggcccgtctgacggaagagctgaccgctcgcgagcagaaattggctatcagttcgaagagtgtggcgaatattatccgcaaaaccattcagcgcgagcagaaccgtatccgcatgctaaaccaagggctgcaagctgtttccttcggacaggttcgtggtgtgaggttgaatgtcaatgtgcgtgaaagccacgcactattgctggatgtactttctgaacagcaagaacagcatcaggatctctttaacagccagcgattaaccttctcggaagcaatggcaaaactttatcagcgtctgaatccgcaagtggatatgggacagcgcttgccgcaaaccattggtgaagagttgttggattaccgtaactacttggaactggacgttgaagttaaccgtggatcggatggctggttaaaagcggagagtggtgcgctatcgacaggtgaagcgatcggtaccggcatgtcgattttggtgatggtggtgcagagttgggaagaagaatcccgccgtttgcgtggtaaagatatttccccttgtcgattgttattccttgatgaagcggcgcgtttggatgctaaatctatcgctactttgtttgaattatgtgagcgtctgcaaatgcagttaattatcgccgccccggaaaatatcagccctgaaaaagggaccacctataaactggtgcgtaaggtatttaaaaaccacgaacatgtgcatgtggtagggttgcgaggatttggacaggatgtaccggcaacccaattgatttcagatgctaccgcttaa

SEQ ID NO: 7227 - DNA, 696 bp, Photorhabdus luminescens
atgccagttaaactggcacaggcgttagccaattcacttttcccggaactggatagccaacttcgtgcgggtcgtcatatcgggatagatgatcttgataatcatgcttatctgatggattttcaggagcaattggaggaattttacgcccgctataatgtggagttgatccgtgcgccagaaggtttcttctatctgcgtccccgttcgaccacattgatcccgcgctcggtattatcagagctggatatgatggtaggaaaaattctctgttatctctatctcagcccggaacggctggctaatcaggggatttttactgctcaagagctgtacgaagagctgatctcactggccgatgagggcaagttgatgaagtttgtcaaccagcgctcttccggttccgatttggataaacagaaattgcaggaaaaagtgcgcacgacactgaaccgtctgcgtcgtctggggatggtctatatcctgccaaatgacaacaacaaatttaccattactgaggcggtattccgttttggtgcggatgtgcgcagtggcgacgatcctcgtgaagtacaactgaggatgatccgtgacggtgaggcaatgccgattgaaggcggcttgtcgcttgatgatagtgaaaatgatgaaacatcggataactcagcagaaggtacgggagatgaacaaccatga

SEQ ID NO: 7228 - DNA, 1323 bp, Photorhabdus luminescens
atgagtgaatattcccagactgtcccggaactggtgtcttgggccaggaaaaacgatttttccatctccttgcctgtagaaagactggcttttctgatggcaattgcggtgttgaacagcgagcgtttggatggcgaaatgagcgaaagcgagctggttgatgcctttcgtgaagtttgcaaagggtttgagcagaccacagaatcggtcgcggtgcgggccaacaatgccatcaatgatatggtgcgtcagaaacttcttaaccgtttcaccagtgaattggccgataacaatgcaatttatcgcttaaccccgcttgggatgggtatcagtgactattacattcgtcagcgggaattttctaccttacgtctttcgatgcaactttcggtggtggcgagtgaattgcaccgggcagcagaagcggcagaagaagggggagatgaatttcattggcaccgtaatgtttttgcgccgctgaaatattctgttgcagaaattttcgacagcatcgacatgtctcagcgcgtaatggacgagcagcaaagctcggttaaggaagatattgcggcgttgctgaatcaagattggcaagccgcgattgccaactgtgagcaactgttatccgaaacatcgggtacgttgcgggaactccaggacacactggaagcggctggagataaattacaggctaatttgctgcgcattcaggaagccaatatggacagtggtggatcagaactggttgataaactggtatttgatctgcaaagcaaactggaccgtattatcagttggggtcagcaggcgattgatttatggattggctatgatcgtcacgttcacaaatttatccgtacggcgattgatatggataaaaaccgtattttctctcagcgtttacgtcaatcagttcaacactattttgataacccgtggacccttaccattgctaacgccgaacgtttgctcgatatgcgggacgaagaattaacgttacgtaatgaagaggtgacgggtgaactgccattagcactggaatatgaagaattcagtgaaataaacgaacaactggcagaaatgattgaaaaagcgctgttgatatatcggcaagaacagcgcccattggatttaggtgcagtgttaagggattaccttgctcagcatccgctctctcgtcactttgatgtggcgcgtattttggtggatcaggctgtgcggttgggtgtggcagaagcggatttctctgggttgccagcggaatggttagcgattaatgattacggagccaaggtacaggcacatgtcatcgacacatattga

SEQ ID NO: 7229 - DNA, 780 bp, Photorhabdus luminescens
atgcgggatcgcaatttcgatgatattgcagacaaattctctcgtaatatttacggcacaaccaaaggtaaaatcaggcaagccgttgtctggcaggatattagcgaattactggctcaattacctcaacgtccactgcgtattttagatgcgggtggtggagagggaaatatggcatgccaattagctgaattgggtcatcaagtgatattgtgtgatttatcagaagagatgatccagcgagcaaggctggccgcagaagagaaaggggtcagccaaaatatgcaatttatacaaagtccggtacaagaaattagccaatatatagagcagccggtagatttggtattatttcatgcagtactggaatggattaccgatcagaaatatgcaatagaagtgctaatgaatatcattaatccgggtggcgctctatctttaatgttttacaatgccaatggcttagtaatgcgcaatgctattttaggtaattttcatttggcgacgcccaatatacaacgccgcagaaaacgttcattatcgcctcagaatccgttggcacctgaacaggtatatcaatggcttgatgaattaaatatgacgattaccggcaaaactggcgtgcgtgtttttcacgattatttgcaaaatcgccaattacagaacgaaaactttccggcgttgctggaattggaacagcgttattgccgacaggagccttatatcagcttggggcgctacattcatgtcatggcacgcaagcccgctttaacagtttaa

SEQ ID NO: 7230 - DNA, 840 bp, Photorhabdus luminescens
atgcaatttttatttaaaaagtacctcggtgcaatggtgatgcctctgccattaatattgctaatttcacttgctgctttattactactgtggtttacccgctggcaaaaaacaggaaaaacaattctaacattcagttggctcacgctacttctgctaagtttacaacctgttgccgataagctgctgttaccggtggaatcggtttatgctaacagcgaccaatctgataccagtcatatcaatccaccggttgattatatcgttgttcttggcggcggcttcacttataacccaaattgggcacccagttcaaacttacttaacaacagtttgccacgagtgacagaaggtattcgtttatatcgcctgaaccccggctctaaaatggtctttaccggtggtaaaggggcaaatgttaaaagcagtgctgaagtcgccgctatcgtagcccaatcgctcggcgtgcccgcagaagatacaattgcactgacaaagccaatggatactgagcaagaagccaatgaggttgagaaactgattggtaaccaaccctttattttagtgacttccgccaatcatatgcagcgagcaatcactttctttcaacagcatgggttgaaccccatccccggcccggctaaccaattagcgatcacttcaccattacatccttgggaaaaatatctaccctcagcttactatctgtctcattcagatcgggtatggtatgaaactttaggcaccctctggcaacgcattaagccatcaaaagatccagaacagccacaaaaatcagaacattctcagccgctaaataatcctcaagtgacttcctga

SEQ ID NO: 7231 - DNA, 750 bp, Photorhabdus luminescens
atgttcactgttattattcctgctcgctttgcttcaacccgtttacccggtaaacctttagccgatattcacggcaaaccaatgattgttcgtgttatggagcgggcgaaacgttcaggtgctggacgtgtcattgtggcaacagataatcacgacgttgttgatgccgttgtggctgccggtggagaggcttgtctgaccaacgaaaatcaccattctggtactgaacgattagctgaggttatcaacaaatatcaattttccgatgatgaaattatcgttaatgttcagggtgatgaaccactgattcccgaagagattattaaacaggttgcagagaatttggcaggttgtaaagcgggaatggcaacgttggccgtgcagattcatgatgcagaggaagcttttaaccctaatgctgtgaaagtcgttatggataaacagggttatgcactctatttttccagggcaactattccttgggagcgtggccgttttattcaatcacgggaaacgattggtgataattttctgcgtcatattggtatttatgcctatcgcgcgggttttatccgtcgctacgtgcaatgggagccgagcccgttggagcaaattgaaatgctggaacaactgcgggtactttggtacggcgaaaaaattcatgtggggattgcattaaaggcaccgggagtaggcgttgatacgccggaagatttggcagcaattagaaaagtgtttactgaaatctga

SEQ ID NO: 7232 - DNA, 180 bp, Photorhabdus luminescens
atggatcaccgtttactcgaaattattgcctgtcctgtatgtaacggaaaactcagttacgataaagagaattttgaactcatttgtaagttggatcgacttgcgtttcctgtacgtgatggtattcccgtcctgttagagcacgaagcccgcgaattacctctggatgaggaaaaataa

SEQ ID NO: 7233 - DNA, 243 bp, Photorhabdus luminescens
gtgagatggacaaatgggggagttattatgacattacaattaaagatgggtagagtgaaatggtttgatgagcgtaaaggatatggttttatttctccacaggatgggggacaagacatattcgtcaatagaaaagcgattgcgaatacaaaaaacaagtcactcacagaagggcaggatgtggaattttcaattattcgcaaaggttatgatttaaccgcggcagatgtgatagcattctaa

SEQ ID NO: 7234 - DNA, 996 bp, Photorhabdus luminescens
atgattgagcgcatatggtcaggccgctcatggctttatttgctgttattacctttttcagccctttacgggctgataagtggcttacggtggttgagttataaaacagggttgaggctaccctggaaagcgcctgtacctgttgtggtggtgggtaatctcactgctggcggtaatggtaaaacgccggtggttatttggctggtggagcagttgcagaaaaaaggttatcgggttggtgttgtttcccgcggctatggaggtaaagcggaaagttatcctctgttggtgactgaaaatgtcactacggctcaagccggtgatgaaccggtattaattcatcgtcgtaccggcgcaccagtggctgttgcgccaaaacgggttgcagcagtgaaagcattactggcaaacacgtcactggatatcatcgtgactgatgatggcttacagcactatgctttgcagcgggattttgaaattgcggttattgatggcgtgcgccgttttggtaatggttggtggcttccagcaggtccaatgcgtgaactatctgggcggttgaacagggttaataccattatcactaacggcggtactcctcagccaggcgaactatccatgacattagctggcgagttagctgtgaatatggtgagcggtgaaaaacgtgcagtgaatctgatacctcacgctgttgcgatggctggaattgggcatccaccgcggttctttgccaccttgcaacagttaggtgctgacctaaaaaaggagtatgcatttgccgaccatcaactgtacacagaagatcaattgtgtcatctggctgacaccaaccagaatttactgatgacagaaaaagatgcggttaagtgttttaattttgctcagccaaattggtggtatttaccggtagatgctcggttaccccaagaaaagggagagataatgctgaacaagatttgttcgttattggagacgaataacaatagtaagtaa

SEQ ID NO: 7235 - DNA, 1746 bp, Photorhabdus luminescens
atgaatgataaagacctttctacctggcagacgttttgccgactatggccaattgtctctccgttcaggattgggctgatagttgctgcggttgcactgatccttaatgctgccggtgatacgttaatgctttcgttgcttaagcctttacttgatgaaggtttcggcaaagcaagcagtgatgtactgaaatggatgccactgattgtgattgctttaatgattatgcgagggctatccgggtttgtatcaagttattgtatctcttgggtctccggtaaagtggtaatgcagatgcgtcgtcgtctgttcagccatatgatggggatgccggtgtcattttttgatcaacaatctacagggacgctgctttcccgtatcacttatgattctgaacaagtggcctcctcctcttccagtgcactgattaccgtggtcagggaaggggcatccattatcggcctgtttgttttgatgttttactatagctggcaattatctctgatcctgattgtgattgcgccgatcgtgtcattggtgattcgtgtggtatcgaagcgatttcgtagtattagtaaaaatatgcagaatagcatggggcaagtcacagccagtgctgagcagatgttgaaagggcataaagaagtgctcattttcggtgggcagaacgtagaaactgagcgctttaataaagtcagtaaccatatgcgtcagcaaggcatgaaaatggtgtctgcttcatcaatttctgatcccatcattcagcttattgcctcgtttgctttggcctttgtcctgtatgccgcaagtttcccggatattatggaaacattgacagcgggtaaaattacggtcgtattttcatcaatgattgcgttgatgcgtccattgaaatcgttgactaatgttaacgcgcaattccagcgaggcatggccgcctgtcagactctgttttcgattctggatatggaacaggagaaagatgacggtaagctggagcttaaaaaagcgaacggtgatattgagttccgtaatgtgactttctgctatccaaccaaggaattaccggcgttgcaaaatatttccatgtatatcccggcgggaaaaattgttgctttagtagggcgttctggctcgggtaaatccacaatagcgaatttgctgacccgtttttatgatgtcaacgaaggtaatatttttctggatgggcatgacttgcgggaatataagctctcttccttgcgtgggcaggttgcactggtatcgcagaatgtgcatctatttaatgacacggtagcgaataatattgcttatgccagtgaaaaccgatacagccgtgaagagattgagaaagccgctgagatggcttatgcaatggacttcatcaggaagttagataacggcttggatacgatgatcggtgagaatggtgtgctgctttctggcggtcaacgccagcgtattgctatcgcgcgtgccttgttgcgtgattctccggttctgattcttgatgaggcaacttcggcgctggacacggaatctgaacgggcaattcaggctgcactggatgaattgcagaaaaacagaacctcgctggttattgcacatcgtctatcaaccattgaaaacgcggatgaaattctggtggttgaagatgggcatattgttgaacggggtgaccatctctctctgctggagcgaaatggtgtttactcacaactacatcggatgcaatttggtcaatga

SEQ ID NO: 7236 - DNA, 2328 bp, Photorhabdus luminescens
atgtggttttcagttgtgataaataagataacaataaattggaaacaacctataccaattattagcgtgaatcaggctgcaatagctattattgtcggtattgtacccttgttttttctgcctgagttaccacagaaatggcagatgatggcattgctattactggctctattctacttattcttgccattttgtctttgtcggatggtttcaatttcgttactggcatttcttattgggtgctggcaaggaaatcatctgctcgaacagataatctattttagtgaaaaagcgcatttatcacgggttattattgaaagtttatcattagataatgaagagaatggcagagttatcctgcgtattattgagaatgaaaacaaagttatttttccgccactgtatgtttccgcttattgggatatttcgcctgaatctctgtgtgctggtcaagaatggcggctgaaaatgaaattacggccagttcatagtcagctaaatcaaggtggatatgatagccagcgtagggcattagctatccgccgacctttaacaggaaaagtcattcacgctgaattaattgatgggaaatgtaatttacgtcagcgattggtcagtcatattgcaccggatattcgtgaattgaagcatagtggcattgcgatggcattagcattcggagaacgtcagtggttaagtaaggaggataatttattattacaacaaacaggtacggctcaccttatggctatttcagggttgcatattacggttgccagtatgtttggttggtggatggcaagattattacaactcttctttcccgtgcactggatagggcacagattcccactgattgccggttggatagtggcaataaattacgtctggctatcgggttggggtattccggctattcgtgcattactgggtttaacgatctggttatatttacgttatagaaatattctctgtttcccttggcagtgggcattgtggacagccgcaatgattctcttatttgatcccctgacggtgctttctgacagcttctggctctctttctttgctgtgatggcgctaatgttctggttctgttgggcaccgttaattgagccatttcgttatggttggaaatggttatggctgcgagggttatatatgcaaatgggtatgatgctgatgcttattcctctccagctattattatttcatggtgtcaattttgccgctttatttgctaacttctgggccgtgccaatcatctcttttattactgtgccgttgattatgctggcattaatcagcaacttttgttcttttattcacgctttattatggcaattagttgattactctgtaaccctctctttaatccctttgccagttttgcaacagtcatggagtgaaactggccgttttcccccattaataacgtttattggttggtttgttgtcattatttggcgattcgcttggtggcaatcatataaattactgattactatttttttaggggtaatgctctgctatctgaggcgcaacgaagactatttgtggcgattttctatgctggatgttgggcacgggcttgcggttatcattgaaaaagatggcaaagcgctgatttttgataccgctaatcgttgggagactggcagtatggctgaaagggtgataatcccttatttgcgttggcatcgattaacgccagagcaaattattatcagtcatgatcatcttgaccataccggtgggttagcattcttacaacaaaaatatccaggtattgcggtgagaagttctttaatcaatcagcaacatcttccatgtatacgcggtgaacagtggctctggcaggggttgagcttccgtgtattatggccgccggtaagatcattacgcgcaggtaatgacgaatcttgtgtcattcgggtagaagatggtaaacatagcttgcttttgaccggagatctggaaaagcaaggggaatataagctattgggaatagaaaaagagaatttaagatcgaccgtattgcaggttccacatcatggtagtaacacgtcatctacagccgcttttattcataccgtctcaccacaatatgcactggcctctgttgcacgttatagcccgtggcgacttccttcggttaaagtgcagcgacgctatcgtaaaattggggcagaatggcgtagtaccgcggtatccgggcagataacgggttatttttatggcgatcatgttgaaatgatgagctataggcaacaaattatgtcacgttggtatcatcagtggtttggtattcgtagtgatcatgagtag

SEQ ID NO: 7237 - DNA, 813 bp, Photorhabdus luminescens
atgaaaaacaaaataattgtatctgactctctgcaagaacatcatcttactaaattatttaatgatgaagtgttagcaatccatataaagaaatatgttgatatctctcttgcagacaagctctctgattttttcctctctcacgaaaatctagaatgtcatcctcatgatttgaaaaaaggagatgaagttgttttagttgattatggtgttgatagaattggcccgtcttacaacacaacttttggcaaatccaaagatagcgatagctataaaaaatattttgaaaatgcgttacctgccatcagaaacgtcagaaatttctgtgctcccatgttagcccctttcgataaatttcgtttagaactggatgaagtatggtctgccggggctagcattgccaactttgaaggtaaaaagatgcatgcggggattgccagagtgatgaacagaccagaacgttctttcatggttgaaaaacaaccccatttcgatggtcttcaacaacaatctgtcaatttgttggggcaattctcagtgaatatctatataaaaatgcctgcaactggaggagagctggaactgtgggatgttcctgaaatccctatcaccgagttaattgaagataatgcagaaaatgattggcgaggcacgcttccgccatctgtcctcattaaaccagagcaaggagatttaattataataaacaccaggaaaccccatgctattcgtagttttcccgaggggggcagaatatcattacaaagcttcattggattatcactaaataaacatctcatgttatggaattaa

SEQ ID NO: 7238 - DNA, 636 bp, Photorhabdus luminescens
atggttgatgtaatcagtacattaggaacattttttcttttaggattgggagctgcggctcccgttggccctataaatatagaaattatgcgtagacacttgaatatcagttgtcttcacgcagtcgtttttggtttaggtgcttgttttgccgatataatttatttattacttttaggttttggtatattgcaatttttttccaatactatttttatgcctattttggggtttttaggcgcattaatggtcatttggtttggtattaccagcttcataaataagaaaaatgaggaaaatatcaatatcatatccaaaccctatcataggcaattttttgatggtgtattgttgacattattaaatccatacaatgttattttttggctgtctgtcagcgcacaactcaacaatattgcatcaggtaaatatagtttagctattggtgcagcagggacaattattggcgttattgtttgggttgcctttattaatactgtgatattcttctccaggaaaatgctcagtcaccgtgttatcaaatttattaattacaccagcggcgtcgttcttattatgcttggaatctatttcttttcatattcaataacactatttaatctgaaattttcttaa

SEQ ID NO: 7239 - DNA, 159 bp, Photorhabdus luminescens
atgaatgcacctgatattaagaaagcacaacatgttgcatacgctcaacgtgtaaaagagcagaagagtagtcatgcagctccacagcctgttatacaaagacctgctttaagtgtgccatcaggtagtttcgttgctggtatggctccaagcttctga

SEQ ID NO: 7240 - DNA, 900 bp, Photorhabdus luminescens
atgactgttgaacacataccgccttctgaacaaatttatttactcaatcaagagctagtccaaaacgctgatagtttagcagggccagcaatcactgttggtggtcaagctgtgcgctactgggtaaatacataccttcataaatactcgaaagataatttacctaatgaagttttcataacttctgttgatgttgattatgtaacaaaacggaacaatgttgaaaacatcgccagagcattcaacgttgaacctcactataacaatccacttgatttcccatctattgcaatatgccttctgaccgataaggacacaaagacaattaaagagcatgaaggccggttgttctctaaccctgataacaatgatgaatgtaaccttgttgatatcattgaccggccagcaggttttgaacacgacgatttatctggcgacaaactatacttgaatacagaacgttttatgattaatgcagcgccaggctctcatgagctcgttcgtattttgaatcctatcgcttgtattcgatctcgcctcgccaacattgtgaataaagtcaaagacgatattgaggtcgagaaagagcgcatcagaagcctgatgatccctacttattactttctgttagaaaaacttgagcatgaagattttcgaacagccagaaaatatgttgaagactttggttatctgctacaagaacgatcacggcgtcattgtcttgtaaaatatgggattgaactccataaagttcttgaatcacttcaagttaatctctctgaacacagggatgattacgagttgccggatatgtttcttgatgaagagttaaggcgaatggctgatcatcataagaatcaatatattagactaagagctcaattacagttagaccaataa

SEQ ID NO: 7241 - DNA, 240 bp, Photorhabdus luminescens
atggcaatagggtatttcctgctggttggtgataaaacaacgtgtggcggccagattattactggtgaccacaccatgacatttgatgggcgagcaacggctcgtgaaggagataaggttacttgtggtaaacatcccggcacttacatcattgtcggtggtgtaacagatatgtttgacatggggcgtaagttggctggcacattggataaaatatcagaataccgcctctggtggtga

SEQ ID NO: 7242 - DNA, 285 bp, Photorhabdus luminescens
atgaccaagtctgaattaattgaaagacttgctggccagcaatctcatatttcggccaaaaccgttgaagatgcagtgaaagaaatactcgaccatatggcaataacattggcagatggtgaacgtatagaggtgcgcggattcggcagtttttctcttcactaccgtgctccgcgcgtaggtcgtaaccctaaaaccggtgataaagtggagctggaaggtaaatacgttccccattttaaacctgggaaagagttgcgtgatcgcgtgaatatctacgattaa

SEQ ID NO: 7243 - DNA, 1674 bp, Photorhabdus luminescens
atgacagaatcttttgctcaactctttgaagaatccctgctatctattgaaactcgtccaggtgctatcgttcgcggcatcgttgttgctattgataaagacgttgtattggttgatgcaggtctgaaatcagaatccgcaattcctgtagaacagtttaaaaatgttcagggtgagctggaaatccaggtcggtgatgaaattgatgttgcgttagacgctgttgaagatggttttggtgaaactgttctgtctcgtgagaaagcaaaacgccatgaagcgtggctgatgctggaaaaagcttacgaagacgcagaaacagttaccggcatcatcaacggtaaagtaaaaggcggttttactgttgaactgaacggtatccgcgcattcctgcctggttctctggttgatgttcgtccagttcgtgatacaactcacctggaaggtaaagagcttgagtttaaagtcatcaaactggatcagaaacgcaacaacgtcgtggtttctcgtcgtgctgttattgaatctgaaaacagtgcagaacgtgatcaactgctggaaaacctgcaagaaggtatggaagttaaaggtatcgttaagaacctgactgactacggcgcatttgttgatctgggtggcgttgatggcttgctgcacattactgatatggcttggaaacgtgttaaacatccaagtgaaatcgtcaatgtgggcgatgaaatcgcagttaaggtactgaaatttgaccgtgagcgtacccgtgtatctttgggcctgaaacaactgggcgaagatccttgggtagcaatcgctaagcgttatccagaaggcactaaactgactggtcgcgtaactaacctgactgattacggctgcttcgtagagatcgaagaaggcgttgaaggtctggtacacgtttcagaaatggactggaccaacaaaaacatccacccatccaaagtggttaacgttggtgacgttgtggaagttatggttctggatatcgacgaagaacgtcgtcgtatctccctgggtctgaaacagtgtaaagctaacccttggcagttatttgctgagactcacaacaaaaatgaccgcgttgaaggtaagatcaagtctattactgacttcggtatcttcattggtctggatggcggcattgatggcctggttcacctgtctgacatctcctggaacgttgctggagaagaagccgttcgtgaatacaaaaaaggcgatgaaatcgcggctgttgttctgcaagtagatgcagagcgtgagcgtatctctctgggcattaaacaactggcagaagatccattcaataactacctgtccgtgaacaagaaaggtgctattgttactggtaaagttaccgcagttgatgctaaaggtgcgacagtagaactggctgacggcgttgaaggttacctgcgtgcatcagaagcttctcgtgaccgtgttgaagatgcaacgctggttctgaacgtgggtgatgcagttgaagctaaatatactggagttgatcgcaaaaaccgcgttatcaacttgtctgttcgcgctaaagacgaagctgacgaaaaagacgctatcgcttctgtgaacaaacaagaagacgcaaactttgcaaacaatgcgatggctgaagctttcaaagcagcgaaaggcgaataa

SEQ ID NO: 7244 - DNA, 684 bp, Photorhabdus luminescens
atggtggcgatagccccagtaataactgttgatgggccaagcggtgcaggtaaaggaacattatgccaggcactggcagaggttttaggctggcaactgcttgattcaggtgctatttatcgagtgttggcactggccgcgattcatcatcaggtggatatccagtctgaagacgcgttagttcctctggctgctaatcttgatgtgcgttttgtccctagaaaagggaagctcagtgtgatgcttgagggcgaggatgtcagtaatgagatccggaccgaggcggtcggcaatactgcctcgcaggcggctgctttcccacgggttcgtgaagccttgttacggcgtcagcgtgcttttcgggttgcaccgggcttgattgccgatggccgtgatatgggaaccgtggtgttttctgatgctccggtgaaaatatttcttgatgccagcgcagaagaacgtgcacgcagacgtatgctacagttgcaggaaaaaggctttagtgttaactttgaatgtcttttgtccgagatacaggagcgtgattaccgcgatcgtaaccgggcagttgcgccgttagcgccggctaaagatgcattaatattggattcaaccagtatgtctatcgaagaagtcatcgacaaggcgctaaattatgcgaaaaaaattctctcaattacctga

SEQ ID NO: 7245 - DNA, 1287 bp, Photorhabdus luminescens
atgcaatccctgatgctacaacctatttcctacattaacggaactattaacctgccagggtcaaaaagtgtttctaaccgtgcgctattactggcggctttcgccaaaggtgctacttgtttaactaacttgttggacagtgatgatattcgtcatatgctcaatgctttggctgcgttgggtatcagttatcgtttatctgatgatcgtacctgttgtgaagttgacggtattggtggattgattacccatcaaggcccgatagaactgtttctgggtaatgccggtacggcaatgcgccccctaaccgccgcgttatgcttgggcaaaaatgacgtcgttcttaccggcgaacctcggatgaaagagcgtccgattggtcatctggtggatgctttgcgtcaggggggggcagaaattgattatctggagcaggaaaattatccgccgttacacgtcaaagggggttttgttggcggcaaagtgatggtagatggccgggtttccagccaatttctgaccgcattgctgatggctgcgccattggcggaaaatgattctgagattcatattcagggggaattggtttccaaaccctatattgatatcactctggcattgatgaaaagttttggtattaccataaatcacgatcaatatcagattttccacattaaaggccgacagcaatacgtttctccggggcactatttggttgaaggtgatgcctcttctgcttcctattttctggcggccgcagcaattaaaggtggcactgtgcgtgtgactggaattggtaaaaatagcctgcaaggggataccaaatttgccaatgtgctggagaaaatgggggcgaaaattcgttggggtgatgactttgttgaatgcgaacgtggcactctcactggcattgatatggatatgaatgagatccctgatgctgctatgaccattgcaaccactgcgttgtttgcggcaggggagaccgtcattcgcaatatatacaactggcgggtaaaagagacggatcggctgcatgcgatggcaactgaattgcgtaaagtcggtgcagaggtggaagagggggttgattacattcgcatcacaccgccaccaagattattacctgctgaaattggcacctataatgatcatcgaatggcgatgtgtttctcgttggtggcgttgtccgatacaccggttaccattctcgatccaggttgtacagcaaagacctttcctgattatttcaatcaattggagagattaagccagcgaaagtcataa

SEQ ID NO: 7246 - DNA, 1089 bp, Photorhabdus luminescens
atgaatcaggtatataatttcagttcaggtcccgctatgttacccgttgaagtattgcgtagagctgaacaggagctctgtaactggcatggtattgggacttcaattatggagatcagtcaccggggtaaggaatttatcgcagtggcaaaggaagctgaaaatgatctgcgggatttattatcagtgcctgaaaactataaagtattgttctgtcatggtggtgcccgcggtcaatttgccgctattccaatgaacctattgggtgacaaggttaaagccgattatattgatggcggttattgggcggcatgtgcagttaaagaagccaaaaaatactgcacaccgaatgtgattaatatcaaaaccgaaattaatggcttgaaaagcgttaaaccaatgcgtgaatggtcattgagtgatgatgcggcttatgttcattattgcccgaatgaaactattgatggtatcgctattcatgaacagccggattttagcgataataaaattattattgctgactactcttcctctattctttccgggccattggatgttagccgttacggtatgatttatgcgggagcgcagaaaaatattggtcctgctggtatcacattagttattgtgcgtgaagatttattgggcaaagcccgtaaagaaaccccgtccattttcgactatgctgttttggcagagaatgactccatgttcaacacaccgccaacgtttgcctggtatctctctggtttggtcttcaaatggctgaaagagcaaggtggagtacaagagatggcaaagcgcaaccgagctaaggctgaactgctttatgatgtgattgataagagtgatttttatcgcaaccaggttgcccctgaaaatcgttctctgatgaatgtaccgttccagatggtggatgcctcactggatagcaagtttctggcggaggctgatgcacaagggttgcaggcactgaaagggcaccgggtttccggtggtatgcgtgcttctatttataatgcgatgtcgatagaaggggttcaggctttagttgattttatggctgattttgagcgccgtaacggctaa

SEQ ID NO: 7247 - DNA, 504 bp, Photorhabdus luminescens
atgagttccacgatgtttgatgttatgcaactcaacgaagaacacgatcgtgattcgttctacagtggttcagaatttctagatggttactttcagagacaggttggtcaggatgttaggtgccgcgtagcagcttgttttgttgcgcttcatgatcaccgtgtagcgggatattatactctggctgctgccggtatccagttggccaacctcccgacagctactattaagaaattgccacgatacccaacagtgccggcagtacggatggggaggttggccgttgatcaggcatttagaaatcagggactcggtggagcattgctagctgatgctattgagaggaccattcgtgccgaaattgcatcttatgcgctgcttgttgacgcaaaagatgataatgcagtgcaattttaccgacatcatggttttattgctttacccgattcgccattcacattattccttcctctcatcgctgtagataaaaaaggtaaaaaataa

SEQ ID NO: 7248 - DNA, 276 bp, Photorhabdus luminescens
atggctacttccaccgcgcgttttgaggcgcgtatgaatcctgaactacatgccctgattaaacgggccgctgaaattcaaggacgtactatgactgattttgttgtgtctgctgcacaggatgcggcgcaacgcgcaattgagcagtcagaagtactccgtttgtctctggccgatcagcaatgttttgcgcaggcattgctgaatccaccggaatcgactccggcgcttgaacgtgcatttgcacggcaccgctctttgttacgatcagaatga

SEQ ID NO: 7249 - DNA, 1044 bp, Photorhabdus luminescens
atgaaaaagatgaaacacacagctttagccagtttattggcattaattagtggttctgcttttgctttaccaaatattacacttttggcgacgggagggacgatcgcgggtggcgggaagtctgcaatccaatccaactatgttgctggaagggttgccattgatgaattagtcaatgctgttcctgagatcaaaaatatcgccaacctaaaaggtgaacaggtggtgagtattggctcgcaagatatgaatgatcaggtgtggttaacgctagcgaaaagaatcaacgctgattgtgacaagaccgatggttttgttatcacccatggtactgacacgatggaagaaaccgcttacttcctcgatctgactacccactgccagaaacccattgtcatggttggagcgatgcgtccatctacagcgcttggtgctgatggcccgttaaatctgtataacgctgtggtcgttgccggtgatacagcatcagccaaacgcggtgtgttgatggcaatgaatgatgcggttatcagtgggcgcaccgtggtgaaaatgagcaccaccgaagttcaggcgttccagccagttaatgcgggtgctgagggctttgttcataatggcaaagtcaattattatgctgacgcgaagccgagagccaataaggctatttttgatgtcagtaaactcgataagctaccgaaagtaggtattgtttataactatgccaatgcgtctgatctgccggcgaaagctctgttgaaagatggttaccaaggcattgtcagcgctggtgtgggcaacggtaatatgtacaaggcgattttcgatactctggccttggcggctaaagatggggttgtggtcgtcagatcaagccgtgtaccggtgggatatgttactcaggatgcggaagtagacgatagcaaacatggctttgtcgcttctgaacgtttgaatccgcaaaaggccagagtacttttacaattagctctgactgaaacacgtaatccggtgaaaattcacgagatgtttgtgaaatattga

SEQ ID NO: 7250 - DNA, 1773 bp, Photorhabdus luminescens
gtgaataccatgatgcaaacctttattcccggcaaagatgccgcactggaagattcaatcaaccgttttcagcaaaaactgcaacatcttggttttaatatcgaagaagcctcatggctgaatccggttcctcatgtctggtcggttcatatccgtgaccgcgattgtcctctctgttttaccaacggcaaaggtgctagcaaaaaagccgctttagcttctgctttaggggagtattttgaacgcctgtcaaccaactatttttttgctgacttctatttaggcgaagctatcgctaacggtgattttgtccattatccgaatgaaaaatggtttgctttaccggacgataattctttgccagcaggcattctggatgaccggttacaccaattttataatcctgaaaatgagttatgcgccagtcagttagtcgatttgcagtcaggtaatgaagagcgtggtatctgctcactgccgtttactcgtcaatctgatcatcataccgtctatattccgatgaatattattggcaatctttatgtttccaatggtatgtcagccggcaacacgatgaatgaagccagagttcagggattatctgaagtttttgaacgctatgtgaaaaatcgtattatcgccgaaggcatcagcctgccagaaattccccaggaagtgatgaatcgttatcccgacgttgttgccgcagtcagcaaattacaagatgaaggtttcccactctattgttatgacgcctctctcagtgggcagttcccggttatttgcgtcgtgctgtttaatcctaataacgggacttgtttcgcctcttttggtgcacatcctgaatttggtgtagcactggaacgtactgtgaccgaattattacaaggacgcagtttgaaagatctggatgtgttcaatgcgccgacttttgataatgaagaagtggcagaacatactaatctggaaactcactttatcgattcgagcggtttaatcagttgggatttattcaaacaagatgctgattatgcgttcgctgactggagtttcagcggcacgaccgaagaagaattcgccactttgatggctatcttcaaacaattggatgccgaagtttatattgctgactacgagcaccttggtgtttatgcctgccgtattttggttccgggaatgtctgatatttatcctgtggaagatttacatcttgctaataacacgatgggaatccatctgcgggaagctttattagcattaccggatagccagtggcaagccgaagaatatctggcgctgattgagcaattagatgaagaaggtttggacgattttacccgtatccgtgagttacttggcattgcggtaggtaaagataatggctggagcaatttacgaattggtgagctgaaatccatgttggcgctggcgggcggtgatttggagcaggctttaatttgggtagaatggacccaagattttaacacctcaatctttacggccgaacgcgctaattattatcgctgtttgcaaacactgcttttacttgctctggaagcgaataaagcgcctgcacaatattatcaagcattcataaaaatgtatgggcaagatgctgttgaagcagcatcagcagctatttctggtgaacactgtttttatggtctgtggtcagtcgatgcagatttaaaatcactgcccgctcatcaggctttattggctgcttatgagaagctgcaaaaagcaaaatgcgatttctggaacacaaaataa

SEQ ID NO: 7251 - DNA, 858 bp, Photorhabdus luminescens
atgaaagctgacaccccctttaacctattaccccctgcgataatgacacaaatcgccaatgacattggtgtttataaaacgactaaacctgttgccattacctatctgtcagcaataactgccgggatttttatttccattgcattcgtcttttatattaccgcgactacaggaaccacatctgtcccttatgggctagctaaattagttggcggcatctgtttttcccttggattaatgttagtcgtcgtttgcggagcagatttatttacttccactgtgttaacgattatttccaaagccaccgggcgtataacctggtatcaaatgatgataaactggattaacgtttattttggtaatttgattggcgcactatttttcgtcgccattatctggtttgctggtcaataccatgttgccgatggattatggggcctgaatgtcttgcaaacagcaaaccataaaatacaccactcttttattgaagcgctatttttaggcattctcgccaatttaatggtttgtctcgctgtttggatgagttatgccggacgtagtttaatggacaaaatattcgtcatgattttgccagtaagtatgttcgttgccagcggctttgagcacagtattgcgaatatgtttttaatcccacttagcattgctattaagcatttcgcaccaactgaattttggattaacgtgggagcaacacctgaacaattttctcaactcaccatttcacactttattactaacaatttaattccagtcactattggtaacattatcggtggcgctattttggtgggtttaacttactggtcaatttatctgcgtagtgagcaaaaacattaa

SEQ ID NO: 7252 - DNA, 2283 bp, Photorhabdus luminescens
atgactgaattaaataaaaagttctctgtagcatggcaagattttaaccaaggtgattggcaaagcgaagtcaatgttcgtgacttcatccaaaaaaactatacgccatatgagggtgatgaatctttcctgtcaggtgcgacaaaagcgaccgataccttatgggaaaaagtcatggaaggtatcaaaatcgaaaaccgcactcatgcgccagttgattttgatactgatgttgctgctactattacctcccacgacgcaggttatatcgaaaaagatctggaaaccattgttggcctgcaaacggaagctccattaaaacgtgccctaatcccatttggtggcatcaaaatggtggaaggctcatgtaaagtttatggtcgtgaactcgatcctaaattgaaacagattttcactgaataccgcaaaacgcataatcaaggcgttttcgatgtttacacaccagatattcttaaatgccgaaaatctggtgttctgacaggtctgcctgatgcctatggccgtggtcgcattattggtgactaccgtcgtgttgcagtatacggtatcgatttcttgcgtgatgataaattagctcagttcaattcattgcaggaaaagctggaaaacggtgaagatctggcaatgactattcaattgcgtgaagaaatcgctgaacagcaccgcgctctgagccaaattaaagagatggcggctaaatacggctatgatatctctggccccgccactgacgctaaggaagcaatacagtggacttatttcgcttatctggcggcggttaagtctcaaaatggtgccgcaatgtccttcggtcgcgtttccagtttcctggatatctacatcgaacgtgacctgaaagcgggtaagctgacagaagttgaagctcaggaattaattgaccatctggtgatgaaattacgtatggttcgtttcctgcgtacccctgaatatgatgaactattttccggtgacccaatctgggcaacagaatcgctggcaggtatggggatagatggtcgcacgctggtgactaaaaatagtttccgtttcctgaacaccctatacacaatgggcccatcaccagaacccaatatgaccatcctatggtccgaaaaactgccgacaaatttcaaaaaattcgcggcaaaagtttccatcgatacctcatctttgcaatatgagaacgatgatttgatgcgccctgacttcaacaacgatgattacgctattgcttgttgcgtcagccctatgattgtgggtaaacagatgcaattcttcggtgctcgcgcaaatctggctaaaacgatgctgtacgccattaacggcggtgtagatgaaaagctgaaaatgcaggttggcccgaaagaagagccaataaaagatgaagtgctggattacgacaaggttatggcccgcatggatcactttatggattggctggcaaaacagtatgttactgcactaaacatcattcactatatgcatgataagtatagctatgaagcggcactgatggcactgcacgaccgtgatgtttaccgtactatggcctgtggcattgccggtctgtctgtcgctgctgactcattgtctgccatcaagtatgccaaagtgacaccgatccgtgatgaggatggtttagcggttgatttcaagattgaaggtgaatatccacaattcggtaacaacgactcgcgtgttgatgatatcgcctgtgatttggttgaacgtttcatgaaaaaaatccagaaactgaatacttatcgcaacgcggtaccgacacaatccgttctgaccatcacttctaacgtggtatatggtaagaaaaccggtaacacccctgacggacgtcgtgctggcgcaccatttggacccggtgccaatccaatgcatggtcgcgatcaaaaaggtgccgtcgcctcattgacttctgtggctaaattgcccttcgcctatgcaaaagatggtatctcttataccttctctatcgtaccaaacgcgttaggcaaagatgatgaaacacgcaaaactaatctggctggtttgctggatggttatttccaccatgaagcagaaattgaaggtggtcagcatttgaacgtcaatgtgatgaaccgtgacatgctgcttgatgccatggaagaccctgaaaaatatcctcaactcactatccgggtatcaggttatgccgtacgtttcaactcactgactaaagagcaacaacaggatgtaattacccgtactttcacccaatctatgtaa

SEQ ID NO: 7253 - DNA, 741 bp, Photorhabdus luminescens
atgtccgtacttggtcgtatccactctttcgaatcctgtggcaccgttgatggccccggtatccggtttattgttttctttcaaggttgcctgatgcgttgtctctattgccataaccgcgacacatgggatacccacggcggcaaagacgtgaccgttgaagaattgataaaagaagcaacagcctatcgtcattttatgaacgcatccggtggcggggttactgcatcgggtggtgaagccgttcttcaagctgaatttgtacgtgactggttccgagcctgtcatgccgaaggtattcatacttgtcttgacactaatggatttgtccgccgctatggtccagttattgatgaattgatggatgcaacagatctcgttatgctcgatttgaagcaacttaatgatgagattcatcagaaattagtcggtgtctccaatcatcgcaccttggagtttgcccgctatctggctaaacgtaaccagaaaacttggatccgttacgttgtagttcccggctggtccgatgataatgagtccgctcataagctaggtgaatttaccaacgatatgaaaaatattgaaaaaatagaacttctgccttatcacgaactgggtaaacataaatggacgactatgggggaaaaatatcagttggaaggtgtaaaaccgcctgcaaaagagactatggagagagtgaaaaacattttggaaagttatggtcataaggttatctattaa

SEQ ID NO: 7254 - DNA, 939 bp, Photorhabdus luminescens
gtggcaaagaaagaaaaacggcctcaccatgacggattatttaaatattttttaacgcagcctgaaacggccagagagtttctatccctttatttgcccgaagaaatccagttgttgtgtgatttagccacattgaaactggagcccggcagttttgtggatgagcatttacgtcaactgcacagtgatgtgttgtactcggtcgaaacggcccggggacagggctatatctattgcctgattgaacatcagtccacccctgacccgttaatggcctggcggctgatgtattatgccatgttagccatggcggctcacctgaaaaaaggccatactgaactcccgttggtggcacctctgctgttttatcatggtgagattcggccgtatccttactcaaaccggtggctggattgtttcacgctccccgaacaggcggctcgcttataccgtcaggcgtttccgttggtggacgtcagtgtgctcagcgatgaagagatcctgacgcataaaggggttgccctgatggagctggtgcaaaaacatattcgctgtcgggatatgcaggaatggctcctccaattggtggaactcttgaatgcagggtataatacaaccgagcagctcaatgtggtgttactctatattttactgaatggacatacgctggatctctcacattttgtccatcaactgattgaacaatctccggagcatgaaacgatgttgatgactattgcagaacagcttgaacaaaaagggcttgagcgaggtatcaagcaaggtattgagctaggtcgagaggaaggtcgagaagaaggccgagaggaaggtaaactggaaacggcttgtgccttattacggcatggcgtgagtttggacattattgtcaccagtaccggcctgagccgggataaaatcgaagcgttaaagcattaa

SEQ ID NO: 7255 - DNA, 270 bp, Photorhabdus luminescens
ttgatatcggcaggttgttcgtcgatagattcaataggaaataaaggccaattagatcatacagaccagatattcatatataatctcaatcattctttaacttgggatcagcatgtcaagcaccatcccataacatttaaaaaacctgttgataaatcgtcaccgcttttgggaatagcgatgtcagaaaatgaagtattggacggtatgtttggtactgttatccaagtatcctctggcggaagggtttctttcgtaaaattcatctaa

SEQ ID NO: 7256 - DNA, 969 bp, Photorhabdus luminescens; identical to SEQ ID NO: 6582

SEQ ID NO: 7257 - DNA, 324 bp, Photorhabdus luminescens
ttggaaaattatatggataatcaaaacttaaattttaactccaacgctatgactaatgaccatcaggaagtatttattcctaatggtcagtccctcagtagcacagagggtgtgaaatggattggtcaagcatggcaacttgtcaagaacaagtggggtatgtggatactactctatattatctataccctatggatttcaagatgcatcgcgacggcaagggagcgaatccccgggagcataggtaactatgtgaccggggtgagtgagtgcagccaacaaagaggcaatttgaaagataacgggtatattctatatgtatag

SEQ ID NO: 7258 - DNA, 573 bp, Photorhabdus luminescens
ttgtttctgaacccagtatttatcggcggtataattgccgtgtgcgaaaaacagaggactagcggagaattcgagctaagtctgttgttcaacggatttcagaaaaactttgcatcactgctcggcattggtgctttaacgcttggtattatactcctcggtgttatcgcaatgtttattgccggtggtagtgccgtaattcatattctattagccgctcaacatggtgaaatttcagtcgaaatgcttcaaaatagcctgttctcattacttcttggtctctttattctgatggttttctcaattgtgaatgccgcattgacctggtttgcaccagcgctaattgttatccataatttaaaatttggggccgccatatcaatgagcctggccgcagtgaaaaaaaatctattacctggtttattattctttatcacctccgcgctcattttcataatttcggtaatgacttttggtttaagttttctaatctctataccagtacttttagttagttattattcttcctaccgcagcatttttatcagtaaggagaaatcatccacattttaa

SEQ ID NO: 7259 - DNA, 1617 bp, Photorhabdus luminescens; identical to SEQ ID NO: 7120

SEQ ID NO: 7260 - DNA, 759 bp, Photorhabdus luminescens
gtgcggaatgacggatttatccctagtggtcaatccctcagtagcacagaaagtatggaatggattagtcaagcatggggtatcgtcaaacgtaaattgggtatgtggatactacttagtatcatttatttcattatcatatttgttttacagcttattcctttccttggggtatttactgtactttttggtccagtatttttgggtggtattattgccatgtgtgaaaaacagagaactaccggagaatttgaaccagggctgttattcagcggatttcagaaaaactttgtatcactgcttggcattggtgctttatcatttggcatcatgcttcttggaattgtcgcaatgtttattatcagcagtagtacaatggctcatatattgttagataaccaatatgatgagatcccggttgaagtattcccaaatgatctctctccattataccttggtgcttttgttctgattatttttaacatttttggtactgctttaacctggttcgcaccagcattaatcgtcattcataatttgaaatttggggctgccgtgtcaatgagtttggaagctgtgaagaagaatttattacccggtttcttattcttcatggtcatggcagtaatgttcataatttctatcatgactttgggtttgggccttttaataaccattcccctatttttagtcagctattattcctcataccgtagcatttttattggaaaggagaaattatcttctttaattatttaa

SEQ ID NO: 7261 - DNA, 1290 bp, Photorhabdus luminescens
atgctcgatccaaacatactgcgtaatgagctaggcgcagtcgccgaaaaactggctcgcaggggctatacccttgacgtggatacgctgcgcaaacaagaagagcgccgtaaagttttacaagttgaaactgaaaccctgcaagcagaacgtaattcccgatcgaaagctattggtgcagcaaaagcccgtggtgaagatattgatccactgcgtcaggaagtgaaccagttaggtgaaaagttggatacagcgaaagctgaactggaaaaacttcaggctgaaatccgtgatttggctttaagtatccctaacattccagatgattctgtaccggtaggtaaagatgagaacgataatttggaagtgagccgttggggtgagccaggtaaatatgattttgagattcaagatcatgtttcattaggtgaactgaccaatggtctggactttgctgccgcggttaaactaacgggttcacgttttgtggtgatgaaagggcaaattgctcgtctgcatcgggcgttggcgcaatttatgctaaaccttcacacagaacagcatggctatttggaaacttatgttccctatttggtaaaccatgaaaccttatatggtacgggtcaattgccgaaatttggtgaagatcttttccatactaagccgctggaagaagaggcggaaagccattacgcgctgatcccaactgctgaagttccgataaccaacttggttcgtggtgacattctggatgaaaatgaactgccattgaaaatgaccgctcataccccctgtttccgttcagaagcgggttcttatggtcgtgacacccgaggtctgattcgtatgcaccagtttgataaagttgaactggttcagattgttcatcctgatgaatcaatggatgcattggaagcattgacagggcatgcagagaaagtgctgcaattactgaatctgccatatcgtaaagttttattgtgtaccggtgatatgggttttagcgcgtgtaaaacttatgatttggaagtgtggttaccggctcagaacacatatcgtgaaatctcttcctgttctaacatgtgggatttccaggcgcgccgtatgcaagcacgtttccgtggtaaagaagataagaaaactcaattacttcataccctgaatggctctggtttggcagttggccgtactctggttgccgttatggaaaactatcagcaagccgatggtcgtattgaaataccggaagtattgcgtccatatatgggtggtttggaatatattggttga

SEQ ID NO: 7262 - DNA, 1344 bp, Photorhabdus luminescens
gtgaacaacctgtcactcgatttttctcaaaatgaattccggccattggccgcgcgtatgcggccgatgacattagagcaatatatcggccagcggcatttacttgctgagggaaaacctctgccaagggctatccgggctggacaactgcactccatgattttatgggggccaccggggacgggcaaaacaacattagctgaaattattgggcattatgctcaggctgatgttgaacggatatctgcggtcacttccggcatcaaagagatacgtgaatcgattgaaaaagcgcgtcagaaccggaatgcagggcgtagaactatcctgtttgttgatgaagtacatcgatttaacaaaagccaacaggatgcttttctgccacacattgaagatggcacgatcacctttatcggcgctacgacagaaaacccctcttttgaactgaattctgcattactttcacgggcacgtgtctatctgcttaaatcattgacaacagaagagattgagcaggtgcttgagcaggccatgagtgataaagagcgcggttatcatggtcagaatatcgttttgcctgaaaatacccgtcacatgatcgcggagctggttgctggcgatgcccgtcgttcattgaatttgctggaaatgatggcggatatggcagaaaccaatgctcagggacagagggttttgacaccggcgctattgaaagaggtcagtggagagcgaagtgctcgttttgataataaaggtgatcgttattacgatttgatttcagcattgcataaatccgttcgtggctctgcccctgacgctgcgctttactggtatgcgcggatcattaccgccggcggtgatccgttatatgtagcccgtcgtttattggctattgcttccgaagatgttggtaatgccgatcctcggggaatgcaggtagctattgctgcatgggattgttttacgcgtgtcgggccggcagaaggtgaaagagcgattgctcaagctattgtttaccttgcctgtgcgccgaaaagtaacgcggtttataccgcttttaaagcagcgatggctgatgcgaaagaaaaacctgattatgatgttcctgtgcatttgcgcaatgcaccgacaaaattgatgaaagagatggggcttggcgaagaatatcgttatgcccatgacgaacctaatgcttatgcggcgggtgaagtttattttccacctgagatacgggaaacccgctattaccatccgactaaccgagggttagaaggtaaaataggcgataaactcgcctggcttgctgaacaggatcaaaatagcccgataaaacgctatcgctaa

SEQ ID NO: 7263 - DNA, 612 bp, Photorhabdus luminescens
atgaaaaagctgatattgattggttgtttaatggctggcatgaatatcaatgtggcatgggcgaatgctagccaaaatttgcaggaacgtttgggtaaagtaaatagttttcatgctagctttactcaaaccgtcaccagtgatgatggggcaacaattcaggaaggtgaggggcaattatgggttaaacgtccaaacctatttaattggcatatgacatcacctgatgaaagtgttttggtatcggatggtaaaacattgtggttctataatccgtttgttgagcaggtaacggctaattggttgaaagatgccacaggtaatacgccatttatgctaattactcgtaacgatgctaaagaatggtctcaatataaaattagccagcaagggaatgattttgaactgacgccgaataatgtcactggtaatctgaaacgtttctcgattaccgttacgacggatggcactatccaaaaattttctgctattgagcaggatggacaaaagagtgcttatcaactaaaagggcagcaaaatacccacgtagatgcggcaaagttcagttttacgttaccgaaaggcgttacgctggatgatcagcgccagtga

SEQ ID NO: 7264 - DNA, 3435 bp, Photorhabdus luminescens
ttgagccaggaatatacagaagataaaaatattaaattaaagagactgagtagtgggcgcaggctgttagaagctgtgctgcttgtcattgttatcctagcagcttatctgctggtcgcacttgtcagttttaacccttctgatcccagttggtctcagactgcatggcatgagccggtgcataatttggggggtggtgtgggggcatggctggccgatacgctgttttctgcatttggcattctggcttatgtcatccccccagtgatgatattgggttgctggactgcttttaagcaacatgatgaccgagagtatgttgatttctttgcgttggctttgcgcgttattggtgcattggcaatcgttttgacttcatgtggattagcggcactgaatgttgacgatctccattactttgcttccggcggtattattggcagtctgtttagtagtgcgatgttgccttggtttaatgaattaggtgcaactttggtcttgctgtgtatttgggcaattgggttgacgttatttactggttggtcatggttaaccattgctgaaaagacgggagcaatcattctgggagcaataggattgattaccaaccgcagccgtaatgaacaagaatatacgccatacgatgaaacggctattgcgcgggaagatctcgccgatgataaaacagaacctgaattcacagcggctggtattgatcatgatgatgtgctatttacagcaccttcagccgtagagttagcaaaagctgaactggacgaacccgaatcggtgaaagcagaaatcgaaatcgaacaagaacagccaatagatattcctaccactaatatggctaatattgatgctgaacctgaaattcgggttaatacatcagatgatggtattgtccagtctcagccattagtggaagagagtgaaaagaataataacgacgaacctgttcgttatacgtttgaaattcctgctgagtaccattttgagcctatatctgaatttaaccgtcaagggacgccgacatttgaacccgtcgaaaatagccggaacagcagcgacaccttcacttttatgcctgaaacagaaccaaaaaatgttgtagcagcaacttctgcaacggttataacaggcaattctcaggttaagcaaggaatcgggccagaactgcctcgtcctaatcctgtccgtattccaacccgccgtgaactgtatggcattaaagtgccttcacaacgtcttgcagaacaacagcgtgaagaagaggtcaaacaacaagtcggtggagcggatgatgatattgagtctgataaacagcaagaagtgttgctgagtcagcagtttcttgaacaacagcgcgagcgttatcgtattacgacggatacagaagaacaggccccaatccagcctcagataagacagaatccatttgagccggaaaatcagccttcggtggaagaacgggctcaaacagcgaccgagactgttaaacagacagttgagcagccgcaatataagcgttatcaggagcaaggtcatcaggagaaaaaagagctttctgctctggagagtttatcgattttaaataatttttcaccggttgaagatttagttgaaaaagagccagcagagccgctatttatgccttctgttcactcagcaccggaaaatcaattagaacggcctacagaaattgcttttgcgccagcacctgtacacaatgttgtgcagcaaccgcagcaaccgcagcaaccgcagcaaccgcagcaaccgcagcaaccgcagcaaccgcagcaaccgcagcaaccgcagcaaccgcagcaaccgcagcaaccgcagcaaccgcagcaaccgcagcaaccgcagcaaccgcagcaaccgcagcaagatagcttatttcatccgtttttggttcgtaacgatcaaccgttgccaaaaccgacgacaccaatgccttcgctcgatctgctaaccagtcctttagcggaagaggaacccgttgatatgtttgcccttgagcaaacgtcccgtttgattgaagcgcgtctgagtgattatcgagttaaagctgatgtcgtgggtttttcacccggtccggtgattacccggtttgaattggatttggctccaggtgttaaagcatcacgtatttccaacttatcaagagatttagcacgttctctatcagcggttgctgtgcgtattgttgaagtgattccgggtaaaccttatgttggcttggaattgccgaataaaaagcgccagacggtctatttgcgtgaagtattggattgtgaaaaattccgcgataatccatccccactgacaattgtgttgggtaaagatattggcggccagccggttgttgctgatttaggtaaaatgccgcacttgctggtggcgggtacaaccggttcgggtaaatctgttggtgttaacgccatgatcctcagtatcctctataaagcaaaaccagaggatgtccgctttattatgattgacccgaaaatgttggagttgtcggtttatgaaggcattcctcacctgttaaccgaagttgttaccgatatgaaagatgccgctaatgcactgcgctggagtgtcggtgaaatggaacgccgttataaactgatgtctgcattgggtgtgcgtaatctggcgggttataacgaaaaagttaagcaggcagaagagatgggacgcccaattcctcatccattctggaagccgggtgacagcatggatgttattcatccggtgctgaaaaaagagccgtacattgttgtcatggtcgatgaatttgctgacttaatgatgaccgtcggcaaaaaagttgaagagctgattgcccgattagcacagaaagcacgtgctgctggtattcatctggttctggcgactcaacgcccatctgtcgatattattaccggcttgattaaagcgaatattccgactcgtattgcctttacggtttccagcaaaatcgattcccgcaccattcttgatcaaggcggagctgaatccctgttgggcatgggagatatgctttatctggcaccaaactcctcgattccggtgcgtgttcatggtgcatttgttcgggatcaggaagttcatgaagtggtgaatgattggaaagcccgcggccgtccagagtatgttgacagcattctcagtggtggtgatgatgctgaggggggctcaggttttgatagtgatgaagagctagacgccctgtttgatcaggccgttcaattcgtgacggaaaagcgacgagtttcgatttctggtgtccagcgtcaattccgtattggttataaccgagcggcgcgtattgtggaacagatggaggcacagcagattgtcagcgctccgggtcataatggtaatcgtgaagtattagcgccaccaccacatgagagctga

SEQ ID NO: 7265 - DNA, 135 bp, Photorhabdus luminescens
gtgcaaaactggaaaaacttaggtacactcctgtttatgcatacagttccaacgctgagctatctcggcgttgttccgttaaatcaacaggaaacctggagagcctttcttgagccaggaatatacagaagataa

SEQ ID NO: 7266 - DNA, 495 bp, Photorhabdus luminescens
atgatagataataaaaaacgtccgggaaaagatcttgatcgcatagatcgtaatatcctaaatgagctacagaaagatgggcgaatttctaacgtagaactgtctaaacgggtaggtttatctccaaccccatgtttggagcgagttcgtcgtctggaacgtcaagggtttattactggatacacggcattgctgaatcctcactatttggatgcatctttgctggtatttgttgaaattaccttaaaccgcggcgctccagatgtttttgaacaattcaacgctgctgtacaaaaattggaagagattcaggaatgccacttagtttctggtgatttcgactatctattgaaaactcgcgtaccagacatgtcagcttatcgtaagttgctaggcgaaactttgttgcgtttgccaggtgttaatgacactcgcacatatgttgtgatggaagaagttaagcagagcaatcgtctggtcattaagactcgctaa

SEQ ID NO: 7267 - DNA, 159 bp, Photorhabdus luminescens
atgctactagagggaattatccgcatgtcgatttttatagaaacgaatttagcgaggtggataattatctcttacagtgatgttttcgcaaatgcacagccgattgtcaaagtaaatgagcaaaaatcagaacaacctgtggaacaaattttcagttaa

SEQ ID NO: 7268 - DNA, 960 bp, Photorhabdus luminescens
atgagcgccgccaaacaccacaaacttattattcttggctccggtccagcaggctatactgccgcggtttacgctgccagagcaaatttaaatccggttcttattaccggggttgaaagaggcggtcaattgactacaaccaccgaggtcgaaaattggcccggtgatccagaaggtctgaccggcccagggttaatggaacgcatgcaccaacatgctgaaaaattccaaaccgaaatcatttctgaccatattcaaaaagttgatctgcaaagccggcctttacgcctttatggtgatgagcaagaatatacctgtgacgcactgattatcgcaacaggtgcttctgcccgttatttaggtttaccttctgaagaggcattcaaaggtcgtggtatttcagcctgtgcaacctgtgatggtttcttttatcgtaaccaaaaagtcgccgttgtcggcggtggtaataccgcggtagaagaggccttatatctggcaaatattgcagcggaagttcacctaattcatcgccgtgatacattccgttcagagaagatcttgatcagtcgcctgatggataaagtcaaaaatggcaatatcatcctgcatactgatcggattctggatgaagtactcggtgatgatatgggcgttaccggtgttcgcctacgcgataccaaaagtggcgctacagaagaattggctgttaccggcaccttcattgccatcggccatactcccaataccgctatttttgaaagccaattagaattggataatggttacattaaagttcaatccggtttacagggtaacgccactcagacctccattcccggtgtattcgccgccggtgatgtcatggatcatacttaccgacaggcaattacctccgctggtacaggttgtatggcagccctcgacgcagaacgtttcctggatgggctagccgctaaataa

SEQ ID NO: 7269 - DNA, 1770 bp, Photorhabdus luminescens
atggataaaacaagacagtatgaattggttcgctggctgaaacagcaaagtgccccggcccaacgctggctccgcctgtccatgttatttggcttaatcagtggattattgattattgctcaagcctggctactggcctcaattctgcaagctttaatcatggataatcttccacgcgagcacatcacgaacgaattttggttgctagcagccacctttgcgttacgagctatcatcagtgctattcgggaacgaatcggttttatttgtggcaaaatcgtgcgtcagaaaattcgcgctatggtattggataagctggaacaacttggcccaatgtgggttaaaggcaaaccagccggtagctgggcaaccattattcttgagcagatagaagatatgcaggattattactctcgctatctgccacagatgtctcttgccgtcataatcccgattcttattctgatcaccctattccctgttaactgggctgccgggctaattttattcgctactgctcctctgatcccgctatttatggcactggttggtttaggtgccgcagacgctaatcggcgtaattttgtcgcactagggcggttaagcggtaattttcttgataggctacgtgggttagaaacgttgcgcctgttttatcgcggcaaagcagaaacacaacaaatcagcgaatccaccgaaaacttccgttacaggacgatggaagtgctgagattagcgttcctttcttctgcggtgctggagttctttgctgccatttctattgccgttgtcgctgtctatttcggtttctcctatttgggggagcttaattttggcagttacgggatgggcgttactctgtttgccggttttctggtgttaaccctcgccccagagtttttccagccattacgcgatctgggtacttattatcacgctaaagcccaagcggttggggccgccgaagcattagtgactttattgagcagtgatggtgaatatgcacctgctagtggtgataaaacacttcccccccaagatccgttgaccatcattgctaataatctggaaattttggcccacgacggcaaccggcttgctggcccgttgaattttactatagagaaaaatcaacgggtggcattagttggtcaaagcggagcaggtaaaagttccctcttgaatttactgttagggtttctgccctatcgtggttcaatacaaattaatggcaccgaactgcgtgagttggatcaacagagatggcgtaaccaactgagctgggttggacaaaatccacatctgcctgagcagactttgcttgataatattcgtctgaaccaacctaatgccaatcaacaacaaatccatcaggttatggaacaagcatgcgtcaccgaatttattcacgatttacccgatgggctgaataccattatcggtgataatgcagcacgattatccgttggtcaggcccaacgtatcgcggttgcccgtgccctattgaaaccttgccggttattattactggatgagcctggtgccagcctggatgcgcatagcgaacaacaggtgatggcaacactcaatcaggcatctcatcatcagacgaccctgctagttacccatcaagtggaagaaacgctggaatatgatcagatttgggtcatgcaaaaggggttgattattgaacagggagattaccagacgctaagccaatctcaaggggtattcacccgcctgttatcccatcgaagtgaggagctgtag

SEQ ID NO: 7270 - DNA, 1749 bp, Photorhabdus luminescens
atgcgggtattgcttccttttctggcgctctatcgtcgtcattggtttcttatcagtttaggcatggttctggccactgttacactactcgccagcataagtttactgaccctctctggctggttccttgcaggcgcagcactagcaggtcttgccggttatacattcaactatatgctaccggctgccggtgtccgtggctcagccattcttcgaactgccggacgctatgctgaacggttggttagccatgatgccactttccgggtattggcacatttacgggtttttgcctttcagaaaattttgccactttcaccgggaggaatagctcgttttcgccaaggcgaattattaaaccgactagttgctgatgttgaaacactggatcacctctatttacgagtgatttcgccgatattatcagcttttatcgttatcatggtcctcactttcggccttggctttctcgatctcacattagcctatacccttggcggtattatgctggctctgttgatcctgctgccatcagtattttataacgcaggtaaatccgttggtcgcaatctgactattctgcgtggtcaataccgcacccaactcacagcggcattacaagggcaagccgaattgatggtattcagtgctgttggccgtttccgcaagtcaatggctgatatcgagtcacgttggttaagatgccagcaacagcaagcgaacctaaccggcttgtcacaggcaatcatgatttttgccaccggtatgactgtcacattgatattatggctggcagctaacggcgtggggggaaacagccagccgggggcactaattgcactgtttgtcttctgctctcttgccgcatttgaaaccctgggccctgtcactgttgcattccaacatctaggacaggtcattacctctgcaacccgtgtttctcaattgatgcaacaagaaccggaagtcatgtttcctacatcagggccggaaagttcagctcaagccagtattgatatcaaaaatatcagtttcacttatcctgatcagccaatggccgtcctgaaaaatgtttctctctgtttgaaagcaggggaacatatcgcactgttaggcaaaaccggttgtggtaaatctaccttgctacaattactgacccgggcctgggatattgattcaggctcaatctgtctgaatcagcatgctattactgcttatgacgaatcaactctgcgcagtatgatatcggttgtttcacaacgtgttcatgtgttcagtcatactttacgacagaatttattactggcaaaaccaaatgcaaccgataatgaactagaaactgtgctgaaacaggtaggtttaagcaatctactggaaaccaatgagggcctaaactgctggatgggcgaaggcggtcgtcagttgtcaggcggtgaacagcgccgcttgggaattgccagagcgttactgcactcggcaccactgatgttactggatgaacctacggaagggctcgatgcggatactgaacagcaaattctatctctattgcgtcagcattgtcagcataagtcactgattattgtcacccaccgcctgtacgggcttgaccatatggactgtatttacatcatggatggcggcactattattgaacaagggcagcataatgaattactggctcagcagggtcgttattatcagttttatcagcggcaacatcagattcgtcttgaaccggggcagtag

SEQ ID NO: 7271 - DNA, 696 bp, Photorhabdus luminescens
atgatgccaataattcaattgaatgctgattcatatgatttccctcacccgaaagaagcattaacggagcctaacggcttactggcagtcgggggagatttatccgctaagcgattaaatgcagcctaccatcaaggtatttttccctggtttttacccagtgaaatgccactttggtggtcccccgatccacgtgcggtaatcattccgggtgaattgcatatcggccgaaccctacgccggtttctgcgcaataccccataccatattacggtgaatcatgcttttgaacaggtggtccatttctgcgctcaacggcaggaaggaacatggataggcaaagatatccaacaaggctataaaaaattatatcagacaggacaagcacattcagtagaagtctggcacaatgagcggattgttggtggtttgtacggtgtcagcgttggcacactattctgcggtgagtctatgttcagcagaatggagaatgcatccaaatgtgcgttcattgccttctatcaccattttctgcgacacggtggtgaattactggactgccaagtgcttaaccatcacacagcttcactgggagcaaaagagatccccagagaagaatttattcagtatctttatcaattcagaaatcggtcattaaaagctggttgctggttacaacaagtactggaattataa

SEQ ID NO: 7272 - DNA, 219 bp, Photorhabdus luminescens
atggccaaagaagacaatattgaaatgcaaggtactgtgctagacacactaccaaacactatgttccgcgttgaattagaaaacgggcacgtagtcactgctcacatttcaggtaaaatgcgtaaaaactatattcgcatcctgacaggcgacaaggttacagttgagctgaccccatatgacctgagcaaaggccgtatcgtcttccgtagccgctga

SEQ ID NO: 7273 - DNA, 2277 bp, Photorhabdus luminescens
atgctcaaccaagagcttgaacttagtcttaatattgcctttgctaaagcacgggataacagacacgagtttatgaccgtggagcacctattgctggcgttgttaagcaattcatcagcgcgtgaagcattggaagcctgcaaggtcaatctggctcaattgcgtaaggagctggagaattttatttcacaaacgacaccgttgttacctgaaaatgatgagcgggagactcagccaacgttgagcttccaacgtgttcttcagcgcgcggtatttcatgttcaatcctctgggcgttcagaggtttctggtgctaatgtgctggtggctatctttagcgaacaggagtctcaagcggcttatttgctgcgtaaacatgatgtgagtcgtctggacgtggttaatttcatttctcacggaactcaaaaagaggactcggaatcggatcatcaggagacgggcacgcaatcagcagaagagcagcttacaggagaggatcggttggaaaattttacaactaaccttaatcaactcgctcaaagaggacagattgatccattgattggccgccaggatgagttagaaagaacaattcaggtattgtgtcgccgccgaaaaaataacccattgttggtcggagagtcgggggttggtaagacagccattgcagaagggctggcgtggcggattgtgcaaaaagatgtaccggaagtgatggctgattgtacgatttattcgctggatattggttcattgctagcgggaactaaatatcgtggcgattttgagaagcgcttcaaagcattgttaaaaacccttgagcaggatagaaaaagtattctatttatagatgaaatccataccattatcggtgcgggggctgcgtcaggggggcaggtcgatgcggctaatctgattaagccattgttatccagtggacgtatcagagtgattggttctacgacctatcatgaattcagtaatatttttgaaaaagatcgggcgttagcgcgtcgttttcagaagattgatattgttgagccttcacccgaagagacggtacagattattagagggttgcggccaaaatatgaggcgcaccatgatgtacgttataccacgaaagctatccgtgctgcggttgatttatcggtgaaatacattactgatcgccacttaccggataaggcgatcgatgtgattgatgaagctggggcgcgtacccgtctggtgccgattagtcgccgtaaaaaaacgattaatgtgtcggatattgaattcgtcgttgcccggattgcccggattcctgaaaaaaccgtttctgccagtgataaagatgttctaagaacattggatgagcggctgaaaatgttggtattcggtcaagatagcgcgattgcggcattgaccgaagccattaagatgagtcgtgcagggttggggcaggataataaaccggtgggttctttcctacttgcaggtccgacaggcgtagggaaaacggaagtcaccgtacagcttgctaaggtgttgaatatcaaattattgcgttttgatatgtcagaatatatggagcgccacacagtaagtcgtttaattggtgcaccaccgggatatgttggttttgatcaaggaggattgcttacggatgcggtgattaaacatcctcattccgtattgctgcttgatgagattgaaaaagcacatccagatgtatttaacctgttattgcaagtcatggataacggtacgctgactgataacaacgggcgcaaagcggattttcgtaacgtcattttagtcatgacaacgaatgcgggggtacgtgaaacacaacgcaaatccattggatttaagcagcaggataacagctccgatgcaatggaagaaattaagaaagtgtttacaccggaattccgtaaccgtcttgatggtatcatctggtttaatacgctttctattgaagtcattcagcaggtagttgataagttcattgtcgccttgcaagcacaattggatgaaaaaggcgtttcgctggaggtcagtgcggatgctcgtcaatggctatgtgataaaggctatgataaagcaatgggtgctcgcccaatggcgcgggtcattcaggatagcttgaaaaaaccgttggcaaatgaactcctattcggctcattagttcacggtggctcggtgagtattggcctggataaggcaaaacgcatactgacctacgatttcagcaatgcttataagcagaaaccggaagatgtagtgcactaa

SEQ ID NO: 7274 - DNA, 321 bp, Photorhabdus luminescens
atgaacgagtatcataacagtttgaaaagtaaggaatctgttaaggatgagcgacagcaaaaattgcagccgccgtcaatgtatcaggtcattcttaacaatgatgattacactccgatggagtttgtagttgacgtattacgaaagttcttttcttatgatattgaacgggcaacgcaattaatgttggatgtccattatcaagggaaggctgtttgtggggtttatactgctgaggtggcagaaactaaagcagcccaggtaaatatgtatgccaaggagtatgggcatccattactttgtacgctggaaaaagtctga

SEQ ID NO: 7275 - DNA, 222 bp, Photorhabdus luminescens
atggagacaggtactgttaagtggttcaataatgctaagggttttgggtttatttgcccggcaagcggcggagaagatatattcgctcattactcaaccattcagatggacggttaccggacgctgaaagcgggccaaaaggtgaatttcagcgttcacctaggaccaaagggaaatcatgccagtattattgttcctcttgaaaacgaacccaaaggctaa

SEQ ID NO: 7276 - DNA, 1944 bp, Photorhabdus luminescens
atgaatgcgttacttgagctgaaaggtatagagcgcagctatcccgctggggagcaacagataaaagtactggatgatgtcaccttgtctatttacgcgggagagatggtcgcgattattggtgcgtcaggctcgggtaaatcgacactgatgaatattcttggttgtcttgatcaacccagtaacggtgaataccgggtcgcgggacagaatgttgctgaactgaataatgatgaattagcagcgctgagacgggaacattttggctttatttttcagcgttatcatttgctgactcatttaaccgcggaacagaatgtggaaattcccgctatttacgcgggagccgctaaagcagcacgtcgccagagagcaatagagttgcttggtcgtttagggcttgaagatcgaatctactatcagccagggcaactttctggtggacagcagcagagagtcagtatcgccagggcattgatgaatggtggtcaggtcattttggctgatgaaccaactggggcgttggatagccactccggcgaagaggtgatggctattctcaaacaactgtgtgaacaggggcataccgtcattattgtcactcatgatccgaaaattgcggcgcaggcacaacgaattattgagatcaaggatggtcacattatgagtgactctggtacgcaagtgagtagaaaaatcactcaaactccgtcgttaacatcaaaaatatcgtcgatacgccagatctttgggcggtttaatgaagctttattcatggcatggcgggcaatggttgtcaacaagatgcgtaccttactgaccatgttggggattattattggtattgcttctgttgtgactattttggttatcggagatgcggctagggcatcggtgttatccgatattaaagagattgccacgaacaccattgatatttatccgggagaagatttcggcattgatgatccggtcagtaagcaggcgttgaaaatagcggatgcagatgcgattaaagtgcagccctatattctggctgtttctcctgaaattgagggtcaaatgcgtcttcgcaaagggaacattgatgtctcttcgaaagtgactggtgtgggtgatgaatattttcaggtttatgctctgcgttttgcccaagggatagggttctcattggatatgatacgccgtcaggggcaagttgtggttattgataaaaatacccagcgtaagctgtttcctcatcagaaaaatgtgattggggaggtgatcctggtgggtaatatgccggccacgattgtgggggtgatagctaacagagaatctgcatttggtaatagcaaattactgcatatctggttgccttatagcacaatgaccagccgtctgatgaaccgaagttatctggactcaattactgttagagtaaaggatgattataactctaaggatgcagaaaagatgattgttcagttgctgactttacgccacggcaaaaaggatattttcaccgataacgtggacatgttggtaaaagctgcggaaaagacggcccatactttacaactgtttttgacgatggtggcagtaatttcactgatagttggcggtattggcgtcatgaatattatgttagtttcggtgactgaacgtacaagagaaatcggtatccgtatggcggtaggggccagaaccagtgatgtgaggcaacagtttttgatagaagctatcttagtttgtctggttggcggtgttttaggcattgggttgtcttatacgattgcatttattgctcaactggcactacccggttggcattttgttttccagcccattgcattactcagtgcgttcgcctgttctaccgcaattggggtgatatttgggtttctaccggcccgtaatgctgctcgtcttgatccaatcgaagcgttggcaagagaataa

SEQ ID NO: 7277 - DNA, 1113 bp, Photorhabdus luminescens
atgaattttattcgttcgaaacgtcgatggattgtgttgttaactattgtgacagttatcacattggttctgggtcattttctgcgtgggccagaaacaattaaatatcagacagtccctgtcattaaaggtgatttggaaaaaaatgtattggcaacggggaaactggatgcggtcaggaaagtggatgttggtgcacaggtgagtggtcagttgcagaatttgcatgttgaagtgggcgataaggtggtagagggccagctactggctttgattgatcctaagcctgcacaaaaccaagtaaaagaagttgaagctacgatcaaagaactcaacgctgatctgatagaagccaaggcacaattgaaattagcacagcttacattaaagcgtcagaacaatctggcaaaagtgcaggcggtctctctccaggaattggatcaggttaaaacagacgttgaagtgaaaagagcgaagatagagaatttgctggcacaaatcagtaaaaatcaagcaagccttgatactgctcagactaatttgcaatacacccggattaccgcaccaatggatggcattgttgtcaatattaaaacgcttcaggggcaaacagtcattgcggcacaggaagccccgaccattctgacattagctgatcttggcacgatgttggtaaaagcggaagtttcggaggcggatgttatttacctgaaaccgggtcagaaggcctcttttaccgtattaggcgcaccggataaaaattttcctggtgtgttgaaggatattttgccgacgccagaaaagattaatgatgcgattttcttctatgcgcgctttgaggtggctaatccccagcaacttttgcgtttgcaaatgactgcgcaggtgaaaattcaactcgattcctatcgtgacacattaatgatcccgctttctgctttgggtaaacagattacaccgactcgctatgaggtggatatcctgaatgggggtaaagaagagaaacgggaagtgactgttggtgtacgcaatgatgtaaatatacaaattctgtctggtctgaaagagcatgagcaggtgattaccggtcatagtgaagcaggggatgagtaa

SEQ ID NO: 7278 - DNA, 900 bp, Photorhabdus luminescens
atgtactctgggctactgatcattcttttgccgttaacgctaggctatcttacccatttaaataataagacactgttaagtgctgttcatcaccttcttaacgcaatggtctatatcatcctgtttttaatgggaattagcctggctttgttggacgatttaggccgtaacctcttctctatctttcaatatgcgataacattttttttatgtatttttacagctaatatgctagcgttattcctgcttgaaaaacatgatccttgggttgttagtccgcataaacaggacaaacccccttcccgtttacatatgatttttgaatcactgaaattatgtggtgtactgattttaggtttcctatttgggctcactggctggtcatggttgcacttctccaatcatgccagtgaaattgctttaatcgttttattgttactcgtcggtattcaattacgtaacaatggtatgagcctgaaacagatattgctaaaccgccgcggtaccattattgcaattgtcattgctgtcagtgcgcttaccggaggtgcaattgccgcacttattcttgggctgccagtgaaaacaggtttagcattggcttccggttacggttggtattccctttctggcatcttactttctgatgcttacggaccagtcatcggcagtgctgcattctttaatgacctggctcgcgaactggcggcaattatgctaattccggttctaatcaatcgatatcgctcaagcgctctaggattaagtggtgccacttcgatggatttcaccttgccaatattacaacggtgcggtggcgtcagtattgttccagcagcgatagttcacggtttcatcctgagtttgctcgcacctttactgatcgcattctttacttaa

SEQ ID NO: 7279 - DNA, 729 bp, Photorhabdus luminescens
atgagtattcaattaaaaagcatcgattgctattacggtgtccatcaggcactgtttgatattaatcttgaatgttcttcaggggaaacgatggttttgctcgggccaagtggtgcaggtaaaagtacattgttacgagtactaaacctgctagaaatacctcgctccggccagttgcatattgctaatcatcaattcgatttcgaacaaacaccgggaacaaaggagattcgttctctacgccagaacgtaggtatggtttttcagcaatatcacttgtggccacaccttactgttatggataacctgatcgaagcgccttgtcgcgtactgggtttatccaagcaacaagcgcagaaaaaagcggataagctcctttcccgtttgcgcttagatgattttgctggccgcttcccacaacatttatctggagggcaacagcaacgggttgctattgcacgagcattaatgatggaaccacaagttttattatttgatgaaccaacagcagcgctggacccagaaattacagcacaggttgtcaatatcatccatgaattatccgctacgggtattacacagattatcgttacccatgaagtggaaatcgcccgtaaggccgcaagccgtgtcgtatatatggaaaacggccacattatagaacaaggtgacatcagccattttacgcaaccacaaaccaaagcctttgctaattatctatcacactaa

SEQ ID NO: 7280 - DNA, 735 bp, Photorhabdus luminescens
atgaaaaaactactttttgcagccctcttaggcaccgtagctttatctgcaaccgccacggaaaaagagatcattcgttttgccacagaagccacttaccctccgtttgagttcatcgatgcaaataataaaattcagggttttgatgtcgatttggccaatgccatctgtgagaaaattaatgcaacatgtaccttcactaaccaatcctttgacagcttaatccccagtctgaaattccgtcgcttcgacgctttagccgcagggattgatatcacccctgaacgccaaaagcaggttgattttactaacacttattacgataactccgcggtttttatctccgttaaaggcaaagtctccagcaccgcagagctgaaaggcaaacttgtgggtatccagaatggtacaactcaccagaagtatctgatggaacaacgaaaagagattaaaaccgttccttatgacagctatcaaaatgcaattctggatctgaaaaatggccgtctggatgccgttttcggtgacactgccgttgttaacgagtggctgaaaaagaatgaaaacttaagtaccgtaggtaacaaagtcactgacaaaaattactttggcatcggcttaggtattgcagtgcgtaaaggtaacaaagatctacaagataagctgaataaagcactcgctgacatcaaacgagatggcacttatgacatcatctatgaaaaatggtttaaataa

SEQ ID NO: 7281 - DNA, 717 bp, Photorhabdus luminescens
atgaatgaattccaatctctaacaagcgccgccggcatcaccgtcggccttgccgtgtctgcattagtgcttggtctgattttagcgatgctatttgctgcctgggaatcagcccgttggaaacccttcgccatacttggcacctgttgggtcactctgttcagaggattgccagaaattttggtcgtgctgttcgtttacttcggtgcatcacaacttctcatgacactggctgatggctttgacattaatcttatcttctggcactccagaattcagatagatatccaagacttttatgtcagcccattcctttgtggtgtcattgcactttccctactctactctgcctatgcatcccagacactccgtggtgcgataaaagccattccgattggccaatgggaagccggtcaagcattaggtcttggtcgcgctgaaatatttttccgcctgatcatgcctcaaatgtggcgacatgctctaccagggctcggtaaccaatggttagttttgttgaaagataccgcactggtatcgcttatcagtgtgaatgatctcatgcagcaaaccaaaagcattgccacacgcactcaggaaccctttacctggtatatgattgtggcgcttatctatctggctatcactctgatcagtcagtttattctaaagaaaattgagatgcataccactcgctttgatcggagtgctccctga

SEQ ID NO: 7282 - DNA, 669 bp, Photorhabdus luminescens
atgcttgagtatattcaacaaattttacccggtctgcaaaccagtctaagcctgaccgtcacagcgctccttgctgctttcatgatgtctgttctgttcactatggttctgaccatgaaattgccggtactgacacaactggtaaaagcctacattaccctgtttaccggtacacctttgctcgtgcaattctttctcatttattacgggcctgggcagtttccagccataaaagcgtacccgtggctttggcaattactgtctgagccttggctgtgcgcaatggtaacgctggcgcttaacagtgcggcatactcgactctgctattctatggcgcagtaaaagctattcctgcgggtcaatggcaatcttgtcaggcattaggcatgtctaaagcacaatctatgcagatcttgctaccctatgcttttaaacgggcgttatcttcctattccaacgaagttgtattgattttcaagagtacttctctcgcaagtacgattactttgctggaagtaatgggatacagtcagcttctatttggccgcaattatgatgtgatggcttttatagccgcaggggtgatttatctatgtgttaacggtatcctgactttgctgatgcggataattgaacgccgtgcacttgcttttgagcgccataactaa

SEQ ID NO: 7283 - DNA, 1134 bp, Photorhabdus luminescens
atgcaatgtgcgcattattctgcggggcactgtcactcttgtcagtggctcgaaaaaccctattctcagcagttagaagataagcagcagaatttaaagcagttattacctcaagctattgtgaagcaatggttacctccgattgccagccaacaagatgcctttcgtaataaagctaaaatggtcgtcagtggcagtgtagaacgcccattgctaggcatgttgcatcgtgatggcacggcggttgatctgtgtcattgtcccctctatccagcgcattttcagcctgtattcgatgttgttaaatcgttcattgcgtgtgccgggttgacaccgtataacgttgctcgtaaacgaggtgaactgaaatatttgttgctgacagaaagccgtcatagcggtgaaatgatgttacgttttgtactgcgttctgaaacaaaaattgctcaactggagcgtgctttaccccggttgcatgagcaattgccacagcttacggtgatctctgccaatattcagccaatccatatggcgattttggagggggaaaaagagattctgtttactgaacaaaaggcgtttaaagagcagttcaatggcattcccctttacattcgtccacatagctttttccagactaacccgaaaatggcttctgaattgtatgcaacagcagggcgttgggttcgtgaactgaaaatcagtagcatgtgggatctattctgcggtgttgggggctttggtctgcattgcgcagataaaaatacctgtttaaccggcattgaaatcagctcagaagccattgattgtgctcgcgattcggcgaaaacactgggtttggaaaacatcgagtttcaagctttggattcaactcattttgctgtagcaaaagatcaaattccgcaattggttttggtcaatccgcctcgtcggggaattggtaaggtgttgtgcgattatctcagtaaaatggtgccggattatattctttattcaagctgtaatgctcagacaatggcaaaagacattgctgcactcgctaactatcgtgtagaaaagacacagttgtttgatatgtttcctcataccgaacattatgaagttttaacgttattggtattaaatcataactga

SEQ ID NO: 7284 - DNA, 513 bp, Photorhabdus luminescens
atgagttcacttgtcattcctgacttatcagtattgcgtgagtggttggatcagctcaaaatttcctactttgagtgcgattcatgccaggcgctgcatctccctcatatgcagaatattgatggtttatttgatgctaaaatcgatctgttggacaatgtaatcttgttttctgcgttggctgaagttaaaccaaccgccattattcctttgatggctaatctaagccagattaatgccagttcgctgacaatcaaggcttttcttgatattcaggatgaaaacttaccgaaattggtggtgtgtcaatctttccttgtttcagccgggctgactttttcccagttttctcatttcttgcaacaaagcgaagagcagattgcgggtgtgatttttgaaattcacagtaataacttgttgtatattaatcgtgatatcgaaatcgagggtgacattgaagaggaagaggagtcacaagctcctgttaaggcaccgacttttactttgcactaa

SEQ ID NO: 7285 - DNA, 303 bp, Photorhabdus luminescens
atgaaaagtcatcaaggcagtatgagttcattggcagatatgccaaaacaggttatcctgctagaaattgtcggcattttaggcttgctcctggcatatttgactattaatgatattgtcatcttaacagatttactaatgacgccagaagcacatgttgttatgattttcatcggcataggttgtttggttcctgctgcggttaatatcatttggcgtgcagtgtatggcctctcttttctgggagttgatcataaaaaagagagcaaaaataaggtagaaggtagtgataacggtaagtaa

SEQ ID NO: 7286 - DNA, 261 bp, Photorhabdus luminescens
atgtttactgtgattttcggtcgtcctggctgcccgtactgtgtccgcgcgaaagagctggcggaacgactgaaagagcagcgtgatgactttgacttccgttatgttgatattcacgcagaaggtatcactaaagctgatctggaaaaaacagttggtaaaccggtagaaactgtcccgcaaatttttgttgatgagaaacatatcggtggctgcactgacttcgaagcgtacgtaaaagaacaccaattgctacaataa

SEQ ID NO: 7287 - DNA, 186 bp, Photorhabdus luminescens
ttggttcgagactatcgggtttttttattgtctgaagagtataccgttcacaaacacataaccgattctacagatgatcaacctatcaaccaccggtactatcaacacgctgatcttaagattattataatatatatcaatgtgttatttattttttgtccagatgactgcctgatgtttccttga

SEQ ID NO: 7288 - DNA, 609 bp, Photorhabdus luminescens
ttgttagaacaaataaatcatgatctgtttacctttttcaatgctacgcctgaatcatcaccagccatgattgcaatggcgacgttcattgcaaaatacctggttcttattttccctctaatattggctagtttctggttctggggttcagagcgtactcgcccttatcatcgggttatcgtcagtaaaaccaccattgccttctgttttgctatgctaacctcatactgtatcggtttactctgccctcacgaccgcccttttgcagaaggcttcggttataactttcttcctcacgcgccaacaacctcattcccaagtcatcatggaacaaccgtcttcactttcgctttatcctttttattctggcacaggatttggccgggcttatgtatgatggcaattgcactggcaattgcatgggccagagtctatttaggcgttcactggccgatggatatggtcggagcatttatcgtcagcctaatgggatgcacttttgcgcaaataatatggagcctgtttggtgaacgtttacaaaaaagattgaacagtctgtaccaacattgctgcgcttttcctatccgtaaaggctggataaaaagttag

SEQ ID NO: 7289 - DNA, 1299 bp, Photorhabdus luminescens
atggatatgactcaaacaggtacgatcgcatcgcaggcgaccagcccaagcgattataaaacctggcgtaaatcagatacagtatggatgcttggcttatacggtactgcgattggtgccggtgtattattcttacccatcaatgctggtattggtggcctactacctcttttggtaatggcgctactggctttcccaatgactttcttcgcccaccgcgggatgtgtcgtttcgttctatcaggtaaaaaccctggcgaagatattaccgaagtcgtagaagaacactttggcaacctggcaggtaaacttattactctgctctacttcttcgctatctacccgattctcttagtttacagcgttgctattaccaacaccgtagacagctttattgttcaccaattacacctgccatcacctcctcgtgctctgctggctctgatcctaattactggtgtaatgaccatcatccgttttggtgaacaggctattgttaaggcaatgagcgtgctggtattcccatttgttgccgttttgatgctactggcgttttatctgatccctaactggaataccgcaatcttcgaaaacatcagcgtttctgcatcgagtgcaagtcatgggctgctcattactctatggctagcgatcccagtaatggtgttctccttcaaccactcgccaattatctcggcatttgcggtggcaaaacgtggagaatatggtgagcatgctgagaaaaaatgctcccgcattctagcttacgcccatatcatgatggttgtaaccgtgatgttcttcgtattcagctgcgtattaagcctgtctccagaaaatctggcagaagccaaagcacaaaatatttctattctgtcttacctggctaaccactttaatacaccagtggttgcctacatcgctccgtttattgcattcatagcaattaccaaatctttccttggccattatctgggtgcacgtgaaggttttaatggtattgtggttaagacattgcgtgaccaaggtaaaactattgagcctaaaaagctgaatcgtatcactaccattttcatgttagtaacgacttggattgtcgctactctgaacccaagtattttggaaatgatcgaaagattaggtggtcctattatcgcaatgttgttgttcattatgccaatgtatgcaatcagcaaagttcctgcaatgcgcaaatatagcggcaagctgagtaatctgtttgtcgtctttatgggattagttgctatctctgctgtcctctactcactgtttgcataa

SEQ ID NO: 7290 - DNA, 822 bp, Photorhabdus luminescens
atgtcatatcttgatccgttagcgctttctatccgttttggaaatcgtaataatttaggtgatgacaaacggtgggcggataaacctaatcctctccataagcttaatcaggagcaatttacttacatttatgaggatagtctgcactttctttatggtcgatatagattcaatccaagtaatggacgagataacattttgacagatatgcaggtgtcgaaaatcaagaccgggagatatattgatcaatatggtcatgatgaacagtatgaggttcttggtctccttggtggtatggggacatttcctttacattcaatattcggtacgtttagaacagaagaagtagatctgattagttactatttttatattgcatatgtattgacgggtaactattcaattcataatcgttatttttaccaaggttatccaatggggcctaataacgatgaggggttagattatcttcttatgtggaacgccgttgatatcattccatcaccgtataagccgggtttgccgcgatatttcccgttgattaacggttatattctctttccttcagcaactgaggcggtagttatctctaatatttctaccgatgccaggtttatccgtcttgaagaggctggcaataggtttccttttactggagagattgtgaccaagacgccttatatcctgacagataagttgcggcaacaatgggacgaagaagaacagcaaggggtaccaatagacgaacgtggatattttaacgaagacgatttgtggcaatatgatgaacagcaggggaattgggtgaagtgggtagtgtag

SEQ ID NO: 7291 - DNA, 315 bp, Photorhabdus luminescens
atgattaatgacatgcatccttctttaattaaagataaagatatagtagatgacgtaatgctacgtagctgtaaaatcattgcaatgaaagttatgccagacaaagttatgcaagttatggtgactgtattaatgcatgatggcgtatgtgaagaaatgcttttgaaatggaatctgctagacaatagaggcatggcgatttataaagttctgatggaagcgctttgcgctaagaaagatgtgaaaattagcaccgtaggaaaagtaggtcctctcggctgcgattacattaattgcgtagaaatctctatgtaa

SEQ ID NO: 7292 - DNA, 339 bp, Photorhabdus luminescens
atgaactatacaaatccttcttctaatgaagtggtaacagaaaataaacctgaacagacttctccaaaccctaattactattttgcggttggtacagtaacttcagttcaggctgcacctgatcaaaaccaattgcaagtgactgtcactatgcaattccctaacggcaaatttaactatctgttatggtggaatgctcaggactacagaggtgcagcactgtatcatcttcttctgagcgcttgcagtagtaacaaacgtgtaaatataacttcttcatcagcggtttctcctggtggttacaattatatctacaacgcaacattattggcttcttaa

SEQ ID NO: 7293 - DNA, 855 bp, Photorhabdus luminescens
atgtcagaagaaagccaacgtattaaaaagccatcctcaggttatgcaacagatcatttctacgatggagcatggcatagggcggtcaaatttgttgagggcagtgttgaattttttgatgtttacgatgttatctttgaggggattacttaccaatccccaccaatcttagtttctgagaacctcattattgttcccatagcaaaagatgaagttgcctggaacagtaaaatagaaatatatggcgctatcggcactggggaaagtgaaaaaattttttctgacggtgatgccgtccgaccttttgccggtgaacttgatgtttcaaatcctcaggaacctcttgttattttcggcggaggcaatgttagtcgttttcccaattacacagccaatgtcaatggggttgaatatggtggtttaattatagatccagaaaagaattcaatatccttattacgctccatcgaagatggaaaactaatggtatttggcaaaactgaaactggcaaaaatgtcattgtttttgaaatagaaactgaaggtgaaaataaaccacttaacggatgggtagagtttcatgacgtagcaacctgtattctattcagaaatggcgatttaacaggattcgctactagctatgaactccgatatgaaggaacatcaacccgcaactatcgaggtttatcaccgacgcatattcgttacgaaaatatcggccatcatgttaaaactgaggtcgaattatgggcttactggcaagataaacctgatggtgtcttgttattcaaaggccggtacaacggatctgttgtaaaaaatagcaaatgttgctctttagatgaaaaaaaatag

SEQ ID NO: 7294 - DNA, 1203 bp, Photorhabdus luminescens
atgaagaaaaatttggcgatggcgataaaatgtgttgttgcggtgctgacagtggcatcaatggtaagtgcccgtgtttatgcatcggatgaacctgtcgttccgccagtggatgcgagagcttatgtgttaatggattatgacagcggtaaaattctggcggcaggtaatcccgatgagcggcttgatccagccagtctgacaaaaattatgaccagttatgttgtcggtcaggcgataaaagcgggaaaaatcacgccggaagatattgttactgtgggaaaagatgcttgggcgacgggaaatcccatactgaaaggttcttctctcatgtttcttaaacccggtgacagggtaaaagtgattgatctgaatcatggtgttgttgttcagtctggtaatgatgccagcattgctttagctgattatgtggcgggtagtcaggatgtatttgttagtctgatgaataattatgcaaaagcacttgggttgactaacacccattttcgtacggttcatggattggatgctgagggccaattcagtactgctcgtgatatggcggtattgagtcaggccatgatccgtgatgttcctgatgagtatgctctgcataaagagaaaacattcacctttaataaaatccaacagcctaaccgtaaccgattgttgtggaataagaatatgaatgtcgatggtgtgaaaacaggatataccagcggtgccggttataacttagttgcttcagcgacagagggacccatgcggctgatttctgttgtgctaggagcaccaagtgatcggattcgtttcgttgaaagtgaaaaattacttgcatggggactccgtttttatgaaacagtgacgcccattaaagctagcgagccgtttgtttcgcaaaaggtttggtatggcgggcgctcagatgttgctcttggcgtggaaaaagatgctgcgatcaccattcctcgtgggcagttaaaaaatctgaaagccagttacacattaaatcaaactccattaacagcgcctttgacgaaaaatcaggttgttggtgtgattaatttccaattaggggataaggtaattgaacaacgccctttggtggttaaagaggcggtagaggaaggtagcttttttagccgtatttgggatttgattgtgatgaaagtgagtggttggtttaaggcgatttttggttga

SEQ ID NO: 7295 - DNA, 621 bp, Photorhabdus luminescens
atgctgaccatttggggccgtaaaaactcttccaatgtaaaaaaagtgctctggtgtctgaaggaactcgatataccgtataatcaagtagatattggcggtaaatttggcaaactggatgccccacaatatctgaaaatgaatccaaatggaaaaatcccttgtttacaagaaggcgattttatcttgtgggaatctaacgcaattgttcgttatcttgcagcaaaatttggtaaagaggtactttatccacaagacctacaggaaagagcaaatgcagataaatggatggattgggttgcttcacatctgtttcctcatatcagacaactcatgataggttttattcgcacacctgaaacagagcgggatcaaaaacaaatagaacaaaccttggctgaaatcgaaaaattgatgaaagtgctcgatgacaccctggcagaacagaaatatctttctggcgataaatttggcatggctgatattgcattaggacccatgatttatccttggcttaatattccaatcaaacgaccatttctgccaaatattgaacgctggtatcagttaatggcagaaagaccagcgttcaaaaaaattgtcatgattgagttaagttga

SEQ ID NO: 7296 - DNA, 828 bp, Photorhabdus luminescens
atgaaaaaagtttccattatcggtctgggttggttggggatgccattagccaaagcattgagtcgcagtggtatgcaggttgttggcagcaaaacgacgccagatggtgtagaggcagcacgtatgtctggtatcgaatgttatttgttacaactggaacctcagatcaattgcgcgcttgatgatttagagcaactgatggtagctgatgtgctgatcatcactttaccggcaagccacactgcgggtggcagttataactatgttagggcagttcagttaattgtcgatactgctctctcatactctgtgccaaggattattttcaccagttctacttctgtttatggttttgttgcgggcaatctcaatgaagatgcgcctttttgccctgaaacacgttctgctcaggcattggttgaattagagaattggttgcacaaactgccaaatatttctgttgatattttgcgtttagccggtttggtcggcagtggtcgtcatgccgggcgttttctggcgggaaaaaagggagttaaaggagggaatcagccggttaatttagttcatcaggatgatgttatttcagccattaatttattaattcagaggactgaaggtgggcatatttataatttatgtgcgcctgttcacccaaccaaagctgaattttaccctaaagccagtaatcagcttgatttagttccacctgagtttttcagagaagagactcagatgggaagcagaattgttgatggtagccgtatttgtcaggagttgggatttaagtatcaataccccgatcctggatggatgccaatgagctga

SEQ ID NO: 7297 - DNA, 912 bp, Photorhabdus luminescens
gtggggataaaaatgttagataaatcacgtttacgtatcgcaatgcagaaatcaggccgattaagcgaagattcacaagaattactggctcgctgtggtattaaaattaatctgcaacaacagcgcctaattgcattcgcggaaaatatgccaattgatatcttgcgggtacgtgatgacgatattccagggttggttatggatggcgtcgtcgatctggggattatcggtgaaaatgtgctggaagaggagctattaagccgtcgcgctcaaggagaaaatcctcgttatttcaccttacgccgtctggatttcggtacttgtcacctttcactggccgcgcctctagactacaactataccggcgtcgaatgtttacaaaatgcccgtatcgcaacctcttaccctcacctgctaaaacgttatctcgatcagaaaaaaatcctctttaaatcctgtctgctcaatggctcagttgaagttgctccccgtgccgggttagccgatgccatctgtgatctggtttcaactggcgcaacactggaagcaaatggtctgcgggaagtagaaattatctaccgttccaaagcctgtcttattcaacgtgatggtgaaatgcccgccgataaacagcaattgattgagaaactgttgacccgcattcagggggtgattcaggcccgtgaatccaaatacatcatgttgcacgcaccaagtgcaaaactcgaagaagtgattgctctgctaccaggggcggaacgtccaacgattctaccgctggtgggagatcagaaccgcgttgccatgcatatggtaagcagtgaaacactgttttgggaaacgatggagaaacttaaagcccttggtgccagctccattttagtattgccgattgaaaagatgatggagtaa

SEQ ID NO: 7298 - DNA, 2424 bp, Photorhabdus luminescens
atgactgaccatttcgataccctgatccgttggcaggagtgccatgatgaacagcaaaacgctttactgacacgccctgcaatttcagcttccgtagaaatctcccgtacagtggagcaaattctgcatgcggtgaaagagtatggcgatcacactctgcgtgaattcagccgccgtttcgacaaaacggttattgaaaatatccgtatttcgccggaagagatagccgccgcagaaaacagtctgaataatgacattaaacaggcaatgcagcaggcaatgaataatatccgcgttttccacgaagcgcagaagccgataaagatcgaagtagaaacccaaccaggagtctattgtcaacaagtaacacggcctattgattcggttgggctttatatccccggaggttctgcaccattactttctaccgttttgatgctcggaacacctgctcaaatagcgggctgccataaagttgtactttgttctccaccaccgattgccaatgaaatcctctatgcagccacactgtgtggaattacggaaatattccaaattggtggcgctcaagccattgccgctatggcatttggaacagaatccgtccccaaagtagataagatttttggtccgggtaacgcttatgttaccgaagccaaaagacaagttagtcagcgcgtagatggtgccaccatcgatatgcctgctggcccatcggaactgcttattatcgccgatgcgggagcaaaccccgtctttgtagctgccgatttactctcacaagcagaacatggccctgactcacaagtgatattggttacacctgatgaagcgttagccaaaaaagtgataacggaaatcgaaaaacagcttacccgtcttccccgcaaccagattgccgccaaggcattagcacatagccggattattgtgacaacaagcctgcaacaatgcgtagaaatcagcaaccgctatggcccagagcacctgattatccaaacccgccagccagaacaactggttgaaaaaatcactagcgccggttctgttttcctcggtgactggtcgccagaatctgcgggagattacgcatcaggaaccaatcacgtattaccaacttatggctacacttcaacctattccagccttggtctggcagatttcctaaaacgtatgacaattcaacaactgacgccgcaaggactactgaacctatctcagaccattgaaacactggcgcaagcagaacaactgaccgctcataaaaacgcgctcactttacgtgtggcggcgctgaatattgccggtcaaggggtgaatatgaataacattttcgatgccaatctgttggcacgagaaaatatccgcaaattaacaccttatatgtctgctcgtcgccttggcggcaagggtgatgtttggttgaatgccaacgaatacccactagcccctgatttccaatgcactgagcaaacattaaaccgttatcctgactgccagccagcctcggttatccgccgttatgccgcctatgcaggcttacaacctgagcaagtactagcctgccgtggtgctgatgaatccattgaacttttaatccgcgtattttgtgaacccggacaagatgtagtgctgttttgccctccgacttatggtatgtacagtgtcagcgctgaaacttttggtgtcgaacaaaagaaaattaccgcactggaaaattggcaactggatatcgaagcgatcgaaaataacctcgaccgggtaaaattaatctatatctgtagccctaataacccaacaggaaacgcaataaatcctgattcattgcgtaaaattctggaactaaccgccaatcgtgccattgtcactatcgatgaagcctatattgaattttgcccggaaaatagtatcgcaagctggctaaaaaactatccaaatttagtcattttgcgaaccctctcgaaagcttttgctttagccggtctacgctgtggatttactctcgcatctgtggatatcatcactctattgttaaaagtgattgcaccttacccgctttccacgcctgttgcagatattgcagcacaggcactgacagcagaaaatatcgcaattatgcaaaaacgtgtcgttgagatcagggaaaaccgcaatgacttgcaacaggcgctgaataaattagccatcgtagaaaaagtattccccagtgaaaccaactatatattggtgaaattctatgacgcagaaactgttttcaaaacattatggcatcagggcatcatcctgcgcgaccaacgcaaacagcccggtttagagggttgcctgcggatcaccatcggcagccgtaaagagtgtgagcgagtggttgaagccatcagcgccctttccactgtaaatgaacaaccaaaggagatagcaaactga

SEQ ID NO: 7299 - DNA, 1068 bp, Photorhabdus luminescens
atgaaccagaaactcctgtttattgatcgggacggtacgctgatcactgaaccgccaacagattttcaagttgatcgtctggataaactggcactggaaaccgaggttattcctgctctgcttgccctgcaaaaatcggggttcaggctgattatgatcactaatcaggatggtcttggcacagatagttttccattagaacaatttgaaccgccacataacctgatgatgcagattttcagttctcaaggcatccattttgatgaagttttaatctgccctcacaagccagaagagaactgtcattgccgtaagccaaaaataaaactggtggaaaaatatctaacagaaggcttgatggataccgcgaacagctatgtgattggtgaccgggaaaccgatctgcaactggccaaaaatatgggcattcaggggttacattatcatccgaaaaaccttggctggttcgctatctgtgaacaactaacccgtcaagaccgtcacgctcatgttcaacgtatcactaaagagacatccatcaacattgacgtttggcttgatcatgaaggtagcagcgatatcaataccggtgtcgggttctttgaccatatgttggatcagattgctacccacggtggtttccgcatgcatgttcaggttaaaggcgatctctgtattgatgatcaccataccgttgaggataccggtctggcattgggggaagcattgaaactggcgttgggagataaacggggcatttgccgttttggttttgtgttgccaatggatgaatgccttgcccgctgtgctctcgatatttctggtcgccctcatctggaatataaagctgaattcaaacaccagcgggtgggtgatctgagcactgaaatgattgagcacttctttcgttcactctcttatgcaatggcctgtacactacatctgaaaacgaaaggcagcaacgatcatcacagagcagaaagcctatttaaagcctttggccgaacactacgtcaggcaattcgggtagaaggcgatacattgccaagttccaaaggggttctgtga

SEQ ID NO: 7300 - DNA, 606 bp, Photorhabdus luminescens
atgaaagttgtcattcttgatactggctgcgctaacttgtcatcggtaacttatgccatccgaaaattaggctatcaacctgaaatcagtcaggaaacagcaacgatcctggcagcagataaactacttttacctggtgtcggcactgccagtgccgcaatggatcaattgaaacaacgggaacttataccgttaattaaagtactcagccaacctgtgttaggtatttgccttggcatgcagctattcgctgccaccagcgaagaaagcgataatgttgcaggtaataatgtcaccctactcgaagttatggcttcccccgtccaaaaaatggctacgcatgggcttccattaccacacatgggctggaaccaagttctgccaaaagccgggcacccgctattccgtggtattgaagaccatgcctatttttattttgtccatagctacgcgatcccgctgaatacctacaccattgcgcaaactgaatatggcaatattttcagcagcgcaatcgccaaagataacttcttcggcgtacagtttcaccctgaacgttccggtgctgccggagccagactattaaagaattttctggagatgtag

SEQ ID NO: 7301 - DNA, 738 bp, Photorhabdus luminescens
atgattatacccgcattagatttgatagatggcaaagtagtacggttacatcaaggggattatgctcaacaacgggattatcaacacgatcctttgtcccactttcaacaatatgaacaacagggagcaaaattgctccatctggtcgacctgaccggcgctaaagatccatccgcccgccagatccctttactgcgcaaattacttgcagcagtttctatacctgttcaggtcggcggcggcatccgtacagaagaagatgtgaaaacattgcttgatgcgggtgccaaccggatagtgattggctctatcgccataaaacaaccggcactcgttacccaatggtttaaacgttatggtgccgaaaatattgtgctggcgctggatgttcgtatcaatgatacaggcatgaaacaggttgccatcaatggctggcaggagaattcctccgtcactctggaacaggttattgagcaatatctgccttgcgggttgaaatatgtactgtgtacagatatctcccgcgatggcacgctaactggttcaaatgtcgaattatatcgggcaatttgccaatactatccacaaatcgtatttcaggcttcggggggcatcggcacgttaaatgatatcgcttctctgcctaccagcggtgtagccggggttattattggtcgtgcattacttgatgagaaatttaccctgaaggaggcaattcaatgctggcaaaacgcataa

SEQ ID NO: 7302 - DNA, 777 bp, Photorhabdus luminescens
atgctggcaaaacgcataattccttgccttgatgttcgtgacgggcaagtggttaaaggcattcagtttcgtcatcacgaaattatcggcgatattgtgccacttgcccaacgttatgcaacagaaggtgcagatgaactggttttctacgatatcactgcctcatctgatggacgggtagtcgataaaagttggatcaccaaagttgcggaggtgattgatattcccttttgtgtcgctggtggtattaaaactgtcgaagatgcagggcaaatcctttcatttggggcagataaaatctctatcaactcccctgcactgactgatccaaccttaattactcgtttggccgatcgttatggtgttcaatgcattgtcgtagggattgacacctggtttgatgaaagtacaggtcgctatcaagtttatcagtttaccggcgacgaaaaacgcacaaaggccactcaatggcaaaccctcaattgggtaaaagaagcgcaacaccgtggtgcaggtgaaatcgtactcaatatgatgaatcaggatggtgtccgcaatggctacgatctgactcaactaaaacaggtgcgtgacgtttgtcatgttcctctcattgcctctggtggtgcaggcgcaccagaacactttcttgatgcctttaaacaggcaaatgtcgatggtgcactcgctgcatctgtattccataaacacattattaatatctgtgaattaaaacagtacctttcacaacaaggcgtggagataagaacttgctaa

SEQ ID NO: 7303 - DNA, 606 bp, Photorhabdus luminescens
ttgctaaccgcacaacaaatcgaaaaactggattgggaaaaagtcgcttatatgatgccggttattgtgcaacatgctatatccggcgatgtcctcatgatgggctatatgaataaagaagcactgaatattactatcagttcaggcaaaatcactttcttttcccgcagtaaacaacgtctatggaccaaaggtgaaagctccggccattttcttaatttggtcaatatctatcctgattgtgacaacgataccctgttggcactcgcagacccaatcggccctacctgccactttggtacacacagttgttttgctccggcacaaactgaatggggatttctctatcagcttgaaaaattgctggcaagtcgcaaaacagccgaccctgaccattcatatacagcgaagttatatgccagcggtactaaacgaatcgctcaaaaagtgggtgaagaagggttagaaaccgctttagccgcggcagtgaataatagagaagagctaacgaatgaagcagcagatctgatgtatcacctgatggttctactacaggatcaagagctggatctgagttgtgtcattcgtcgattacgggaaagatga

SEQ ID NO: 7304 - DNA, 1152 bp, Photorhabdus luminescens
atgatgactacgactttttttatgacatcggtaaatatgtttggtgcgggttgtttggttgaagcggtaaatacgatgaaaggtgatggttataagcgagcattgattgtgaccgatcgtgttttaaatgaaattggggtggcagcaaaagttcaagctttattatctgatgttgatattgagagtacggtttatgatggtactaatccgaatccgacgacaattaacgttgaggaaggtttggatattctgcgtcagcataatagcgattgcgttatttctttagggggtggttcgccacatgattgtgcaaaagctattgtgttggtcgctgctaatggaggcgatatccgggattatgtcggtattggccgttcatctaaaccgcatttgccattaatctcagtcaatactaccgcgggtactgcgtcagaaatgtcacgtttctgtgttattaccgatactgaaagccatattaaaatggccattgctgacaagaaaataacacctgttttgtctgtgaacgatccggaattaatggtaggaatgccgaaagggttaaccgccgcaactggaatggatgcaatgactcatgcggttgaagcctatgtttctcctgcggctagcccaataacggatgcttgtgcattgaaagcaatctcaatgattagtcactctttacgccaagcagttgcagatgggagcaatatagaagcacgtgaaaacatggcctatgcacaattcttggcggggatggcgtttaatagtgcattactggggtatgtacacgccatgtctcaccaattgggcggtacttatgatttaccacacggcatatgcaatgctgttttattaccacacgttcaagagttcaacgctaaagcggttgcgggtcgtttgaaagatattgccgctgcgatgggggtagatgtaagcgctatgaatgatcagcaaggggctgcggcatgtattgctgaaattcgtaagttgtcaaaagatattggtattccgtcgggtctagcggaactgaatgtcaaattagaagatttaccagagttagcaactaatgccttgaaagatatatgttgtttgactaatcccactcaagctacccatgaagaaattgtttcgatctttaaagcggccatgtga

SEQ ID NO: 7305 - DNA, 492 bp, Photorhabdus luminescens
ttgtcctctaacgaaatatttaaccgcctgaccacattactggataatcatcatgccagctatcgggtgatggaacattcaaccgccggacattctgaagaagttgcaaaaatccgtggtacacaacttgggcaaggggcaaaagggttagtttgccatgttaaaggggaaggattccgtcaatatgtactcgctgtactgcctgcggatcaacaagcagacctctcttcactggcaaaacagatcggtggcaaccgtgcctcactggcaagtcctaaagaagtttttgaactgactcaatgtgtatttggtgctattccaccttttagttttcatccagatctgaaactggttgcagaccctttattatttgaacgttttgatgaactggcttttaatgccggcagccttgaacgttcagtgattcttaacacccaagattaccaccgaattgcacaacctgaattgatgatttttcgtcgagtagaataa

SEQ ID NO: 7306 - DNA, 621 bp, Photorhabdus luminescens
atgactaataagctagttacaggtgcaacttttttcgatagaaaatactttctgggtgaagcgcaccattatccagaaaacgacatcattattccattgccttatgatcttaacgatagattccgttcagtaagaattggaacgctatcaaaagtttatgcatggcgtcatcagagcgattgggaacccggccaacgctatcgtgaatgggaatacgatcatccagatattgatagagaaattagaggattatctaagtttaaagtggcaccaaaagatacctgtctggttgcattaagacttattgatgatacttattcaggtattaaattctcaatgttcacgaatacacattgcgtgggcccagttgaaacaacaactgatgatgattatgcactggttggtatactgccatttgagaccgagttagttactgccattgcaataagaaataccagtactggagtatatatcaataacggatcattctatttctatcgtgatgcgaacggcgttgttactattgatgagaaagctaatttccctaaaaatctcagaatagttaatgtaggtggcaatcgttttgatattcatattatcagtaccgatttttctaactaa

SEQ ID NO: 7307 - DNA, 1407 bp, Photorhabdus luminescens
atgtccaagcagcagattggtgttgtcggtatggcggtgatggggcgtaacctggcattaaatattgagagccgtggttattccgtatctatatttaaccgttcaagtgataaaactgacgaagtgatcgccgaaaatccggggaagaaattagttccaagttacactgtcgaagaatttgtcgattcactggaaaaaccgcgccgtattctgctcatggttaaggctggcgaagcaaccgataaaactattgcttcactgactccacatctggataaaggtgatattttgattgatgggggtaatacctattttcaggatactatccgtcgtaatcgcgagctttctgctcagggttttaattttatcggtactggggtttccggtggtgaagagggggcattgaaaggtccatctattatgcctggcggccagaaagaggcgtataaattggtggcaccaattctgcaagagattgcggctaaagctgaaggtgaaccttgtgtggcctatattggcccggatggtgccggtcattatgtgaaaatggttcacaatggtattgaatacggtgatatgcagctcattgctgaagcttattctttactgaaaaatgccctaaatctgagcaatgaagaactatctgagattttcactgactggaataacggcgaattgagcagttatttgattgaaatcacggctgatattttccataagaaagatgaagcaggccaatatttggttgatgtgattttggatgaagcagcaaataaaggtacgggtaagtggaccagccagagctctctggatttagggattccagtgacgttgatcacagaatcggtatttgcacgttatatctcttctctgaaagatcagcgagttgctgcggctcaagttttgagcgggccggatgtacaaccatttaaaggtgataaggccgaatttattgagaaagtccgccgtgcgctttatttgggtaaaatcgtctcttatgcccaaggttttcagcaattgaaagcggcatctgatgagtaccagtgggatctcaattacggtgagattgctggaattttccgggcgggttgtattattcgtgctcaattcctgcaaaaaattactgacgcgtataacgaaaatgtggatattgctaacctgttgttggcaccttactttaagaaaattgctgatgaatatcagcaggcgttgcgtgatgtcgtctcgtatggggtgcagaatggtatcccaaccccgactttctctgctgctatttcttactacgatagttatcgttcagcggtactgcctgctaatttaattcaggctcagcgtgattattttggtgctcatacctataagcgtactgataaagaaggtgttttccatactgaatggatggagtaa

SEQ ID NO: 7308 - DNA, 1572 bp, Photorhabdus luminescens
atggaatggatcgctgatccgacgatatgggctgggctagttactcttatcgttctagaaattgtcctcggaattgacaacttggtctttattgccattctggcagataaacttcctgaaaaacaaagagacaaagcaagaattacaggtctaggttgtgcgttactgatgcgtatcgtactgctttttagtctttcctggttgataacgctaactcatccattaattacgctttgggaacatccatttagtgcccgtgacctgattatgctaataggtggtcttttcttactgttcaaagcgacaatggagctcaatgaacggctggaaggtaaagatgcccactcaggacaacaacgtaaaacatctaaattttggacggttgtcgttcagataattgtccttgacgctgtattctcactggattcagtggtgactgctgttggtatggtagacaacatcggtatcatgatcgcggccgtcaccattgcgatgttcctgatgatactggcaagtaaaccgttgaccactttcgtcaatgctcacccgactatcgttattctctgtctgagcttcttgttaatgatcggtttcagtctggtcgccgaaggttttggttatcatatccccaaaggttacttgtacgccgctatcggcttctccattatgattgaagccttaaaccaatttgctcaatttaaccgccgcagatttcttactgcttcccgttcactacgtgaaagaacagcggaagccgttttacgtatcctgagtggtaagcatgaaaatgcagaattggataatcatacatctaatctgatttctgataatcaggaagtgtttgatccacaagaacgtcaaatgattgccagggttctaggcatggcgcagcgtaacgttaacagtatcatgacttcccgtcacgacgtggagtaccttgatattcatgcaccaactgaaaatctgacgcaaatactgaataaaaatcctcacacacgcattgtggtaactgatgaaaatatcagtgacgaaccattaggtgttgtccatgttattgatctactgaatcaacaactcaaccaacagccttttgatttacattcgctgataaaacagcctctgattttccctgaacagctttcactactccaggcattggagcagttccgccaggcacaaactcacttcgcgtttgttgtcgatgaatttggttctgtggaaggtgtggtgactttgaccgacgtaatggaaactatcgcgggtaatttaccggtagatggcgaagaaactgatgcccgccatgatattcaagcgactgaacatgggggttggatcgccaatggttatatgccgctggatgatttgatcctttatgtccctttgcaactggatgaaaaacgtgaatatcaaaccttagcaggtttgttaatggaacattcacaacatattccacggcaaggtgagcaattacagattgataattatctgtttgaaccgttggaagtaaccagtcaccgaattaataaggtaaaaattacccctctggtgtcaaatgaagaaaataaaaaataa

SEQ ID NO: 7309 - DNA, 1833 bp, Photorhabdus luminescens
atgaagagattgctgacaacactgattattttgctggttgtgattattaccggtctggcagcattagtcatgttagtaaacccaaatgactttcgggcttatatggtcaagcaggtgcaaaagaagagtggctaccaactcgtcctgcaagatggtatgcgctggcatgtctggccaaaattgagcatcattaccgggcgtatgtcattaacggccccaggggcggcgcagccaacagtgatggcagaaaatatgcgtcttgatgtggcgttgtggccgcttctttctcatcagcttgccgttaaagaggtgatgctgaaaggggcgatattgagagtaaccccggagagccagtcgcagaaaaaagggaatacccctattgcaccaacagggagtacagccaatcctgttgcgaagggggagggttgggagcttgatattgccagagttaagatcgcggatagtttgcttatttggcagcgagatgatcatgagcagttaaatgtccgcgatattaatctgctaatggagcgagataaccaaaaccatatcagcgtagagttaagtagcaaagtcagtaagaatcagcaagacttggcttttaatcttaatgcagatgtcgatattactgattatccatatcgtgttgcgggtaatattgacttctttgattatcaactccagggcgcaggtatacctacgggaggaattagtggttcaggaaaagtacatgctgtttatcaaaaagagacgacagatgaactgcaaacaatttctttacaggcgctaagtttcaccgctaatgagagtgaactgcatggcagtataaaagcaatgttgggggctcatgcggattatcggatcgatttatcttcccaaaaactgaatttagataatctgatgggatgggacttgcttcctaaagagggttcagaagttaaacgttattaccggatagagaatagttcagctaaaccggtaatcgccgtttcaagctctgccgagcctgattatagcgctgcatttctgaatgactttaacgccaatgtgactattaatgcggacaaatttgtttatcgaggaatggagatcgataatctgatattgaaagcgacaaataatagtggtattgctgaaatttctactctgaatggcaaattatttggtggtgatttctctattccggttattttagatgcaacgggtaatcaacttaagttacacgcaaaacctttactgcggaatatagaactggaaccagtactcaaagccttttccttacctccggcatttagtggcaaattcgatctgaatggggatctttctggtaaaggatatgatggttatgcgatttcgcatatttggcagggtgatcttaatttcagtttagttaatgccaaaatgtatggattaaatatcccccaattaatccagcaatccgttgctcgtgcaacggataaagtgaatatccctgataatatggataatttcacccgcgctaaaaagcttgatgttaaagcggtactgaatcgaggtgatataaaaatcagtcgattgcatgcggtatccgatttgctgaatattgatgggcagggtaagactaatctgcttaaacaagatgttgatgtcgctttaaaagtacagataacacaaggatggggcaaggataatgaattggttagtcgtctgcgaaaaatgaaagtaccactgcgggtttacggtaattggagtaatctgcaatacaacttggatattgagcaattgctacataatgagttagagaacaaggtaaaacaggctattaacgattgggttgaacgcagcagtaattag

SEQ ID NO: 7310 - DNA, 582 bp, Photorhabdus luminescens
atgcgactctgtgaccgcgacattattaaatggcttgatgagggtaaattggtcattgctccacgtccgccgattgaacgcattaacggggcaactgctgatgtgcgccttgggaatcagtttcgtgttttctgtggtcatactgcggcatatattgatttgagtggtccgaaagatgaggtcagtgctgcgcttgatcgtgtgatgagtgatgaaataattctgcctgacgatgaggtttttttcctccatcctggcgagttggcactggccgttacgctggagtctgtcacattgccggatgatttggtgggctggcttgatggccgttcttcgcttgctcgtcttgggttgatggtgcacgtgacggcacaccggattgatccgggctggcatggtcaaattgttcttgaattctataactctggtaaattgcctctggcgttacgtccgggtatggtcatcggtgctttgagttttgaaccattgtctggttccgctgaccgtccgtataaccgtcgtcaagatgcgaaatataaaaaccaacagggtgcggtgagtagtcgtattgatgaagattaa

SEQ ID NO: 7311 - DNA, 642 bp, Photorhabdus luminescens
atggctgacgaagcatatcagtgcacaattgtaggaatttctggtgcatctgcctcaggtaaaagtctcattgctaatacactttatcgtgaattacgcgctcaggttggtgatcacaatatcggtattatacccgaggattgctattataaagatcagagcgatctatcaatggaagagcgttataagactaattatgaccatccaagctcaatggatcacaatctgctcttttctcacctacaagcgctgaaaatgggtgaatcaattgaattaccacaatacgattatgttgctcatactcgtaaaccagaagcgattcattttgcaccgaaaagggttattattctggaaggtattctattattgaccgataagcgcttgcgccaggagatggacttctctatttttgttgatacgccactggatatttgccttatgcgtcgtattaagcgggatgtgcatgaacgggggcgttctctggattcggtgattgagcaatatcataaaactgtgcgtccaatgttcctgcaatttattgaaccatcaaagcaatatgcagatattattgtgccgcgcgggggtaaaaaccgagtagcaattgatatattgaaagccaaaattggtcagttctgcgaataa

SEQ ID NO: 7312 - DNA, 1113 bp, Photorhabdus luminescens
atgaactcacaatcccccgagcagaccaatcctgacctgctgaaatctcaggtaacaaaaatacttgctacttttacacacctgacactagaacgtgatttgacaacattgaaggcgttacatcactgcacgatgcttgatggtgtcttgcacattgaattactgatgccgtttgtctggcaaagcggttttaaggcgttaaaagcggccaccacggaagaattacaggcggtaactggtgcgaaatcggtagcgtggaaattgatccatgatatcagcacattacgtcgggctaatgatctgccgggaattaatggtgtccgtaatattttggctgtcagctcgggtaaaggtggggtgggtaaatccagcacagccgtaaacctggcgctggcattggctcaggagggggcaaaagtcggtattctggatgcagatatctacggtccttctgttccgagtatgttgggaaccaccaaagagcgtccaacttccccagacgggcagcatatggcaccgattatgacgcatggccttgccactaactcgattggttatttagtcacagatgacaatgcaatggtatggcgcggcccaatggctagtaaagcattgatgcagatgttacaggatacattatggccggatctcgattatctggttatcgatatgccaccggggaccggtgatattcagctcactttgtcacaaaacatcccggtaacgggggcactggtggtaacaacgcctcaggatatcgccttaattgatgcaatgaaaggcatcgtcatgttccagaaagtgaaggtgcctgtactgggtattattgaaaatatgagtacacatatttgtggtaactgtggtcacctggaacctatttttggaacgggtggagcagaaaaattggcggctaaatatcactgtaaattattgggacaaatcccgctgcatatttcactgcgtgaagatcttgatcgtggtgagccaaccgttatcagtaatcctgatagtgaatttaccgatatttatcgcgaaattgccgcgaatatttcagcacagatgtattggcaaggcgagaagataccaacagaaatttcgttccgtgctgtttaa

SEQ ID NO: 7313 - DNA, 2028 bp, Photorhabdus luminescens
atgtctcaagtcgcaaaaaaattattggtgacgtgcgcgttgccatatgctaacggtccaatccatctcggtcacatgctggaacatatccaagcagatatttgggtccgttttcagcgaatgcgcggcaaagaggttcactttatctgtgccgatgacgctcatggaaccccaatcatgctgaaagctcagcaaatgggtattgctcctgaagagatgatcgcaacggtgaaccaagagcatcatcaggattttactggcttttcagtgagctatgataactatcactctacgcatagcgaagagaaccaaacgttatcaaccaaaatctatctcgaactgaaaaaaaacggtcatattaagaatcgtactatttctcagttatatgatcctgagaaaaatatgtttctgccggatcgctttgttaaaggtagctgcccgaaatgtaaggcagaagatcagtatggcgataactgtgaagtttgcggttcaacctacagcccaactgaactaatcaacccacgttctgctgtctccggcgcgacgccagaaatgcgtgaaacagagcacttcttcttcgatctgcccgcattcagtgacatgctgcaagcttggacccgctccggtgccttacaggagcaagttgctaacaaaatgcaggaatggtttgaatccggtttacaacagtgggatatcacccgtgacgccccctatttcggttttgaaattcctgatgcgccgggcaaatatttctatgtctggctggatgcgcctatcggctatatgggttctttccaaaacctatgtgataaacgcggaaatctgaactttgatgagttctgggcaaaagattccaccgctgatctgtatcattttatcggtaaagacattgtttatttccacagcctgttctggccggccatgttggaaggcagcggttatcgtaagccaaccaacgtgtttgttcatggctatgtcaccgtcaacggtgcgaagatgtccaaatcccgtggtacttttattaaagccagcacttatttggatcatctggatgcagactgtttgcgttattactatgcagccaaactctcggctcgcattgatgatatcgatctgaatctggaagattttgttcaacgtgttaacagcgatatcgttaataaagttgttaacctggcctcccgtaatgccggcttcattaataaacgctttaacggcaagctggcggataaactggctgatccggcgctttaccaacagtttattgatggggcaaaggtgattgcagaagagtttaataaccgcgaattcagcaaagcaatccgtgaaatcatggcactggctgatttggcaaaccgttatgtggatgagcaagcaccgtgggtggtggcaaaagaagaaggccgtgatgccgatcttcaagctatctgttcaatgggcatcaacctgttccgcgttttgatgactttcctgaaacccgttttgccaagtctggcagaacgcgcagaagcgttcttaaatacagaactcacctggcatggtattgaacagccgctgctggatcatcaagtttctgcctttaaggccctgttcaatcgcattgatatggataaagtggacgctatggttgtggcatctaaagagagcatcaacacaccacaaaaagtcagcggtccactggcagaagatccaattcaggacaccattacctttgatgattttgccaaagttgatatgcgcgtcgcccttattaaacaggctgattttgtcgaaggctcagataagttgctgaaactgatgctggatcttggtggcgaaactcgccaggtattttcgggtattcgctccagttatcctgatccaaaagcactggaaggccgtttaaccattatggttgctaatctggcaccacgcaaaatgcgctttggtatttcggaagggatggttatggccgccggacctggcggaaaagatatctttttactcagccctgacagcggcgcccaacccggtatgcaagtgaaataa

SEQ ID NO: 7314 - DNA, 309 bp, Photorhabdus luminescens
atgagtttcgaaaaagaatttgatcgggcatctccatacctttataaagctgttgccactggacagacgttacaatctgccaatatcaaatggtacagaatagacaatgcaggtcaggaagaggagtatttccatatccttatgagcggagtgaaaattgtttcaatttctccagtaatgcataatataaaagatccatcttatcaacatcttaatcatctagaatccgttgaaatcagatacgagaaaattacgtggaaataccttgacggtaacatcatttactctgattcgtggaaagagcgctaa

SEQ ID NO: 7315 - DNA, 156 bp, Photorhabdus luminescens
gtggtagaacgtttcctgaataggataaatttgggttggttaggaggaaattacgaggatagctggattgaattgtttatagacatctttgcactcttaatgatagctctaattatacacaaaatcgccagtcggatctttaatagacttcggtaa

SEQ ID NO: 7316 - DNA, 537 bp, Photorhabdus luminescens
atgggaataaccatgcaaatttgtaggatgaattataacgacctgtccgataatggacgaaaggctaaatttcattgttatggcgttggtatatttgacgttttctctggtcaagatccatacgtcaacaagtctgaatgttcttacattgagaaatcagcaattcctccaggtcagtattggattgttgatcgtccggttggtagcatagcgaaccaagtcagaggcacagctcttgatatgattcatggtactaatcattctcaatggtttgggttatatagttttcagacaatgaatgattatatattcgtgaacggtgttcgacgcggagcatttcgtcttcatccattgcgtccgaatggtagcggcgagtcttggggatgtatcaccttttatcgtgtttctgactttaatatcgtacgaaacgctctgctccgtacccataagtttaaagtaccgggcagctcattgatggcatacggtagagttgatgttacggggaatacaaattttggtgcgtgtaaagtttcttag

SEQ ID NO: 7317 - DNA, 438 bp, Photorhabdus luminescens
atgtcgtttcgtgaagtactgattgttggttggcagtatctaagagcatttgttctgatttatttatgtttgctgacaggtaatgccatttcttccctactacctatcattattcccggcagtattatcggtatgttgatcttgttcgttttattagctttccagctaattcctgctcattgggcaaaaccaggctgtagtctgttactaaaaaatatgactttgctgtttctgcctattggcgtaggcgtaatgaattattacgatcaactcagccaacagataattccgattgttttttcatgcctgatcagtactgcaattgttatgattatcgttgcttacagttcccattatgttcatcgtgaacgtccgattgtaggatccacatcagaaattaacaatgaacaacagaaacaagagaaacaagagaaataa

SEQ ID NO: 7318 - DNA, 696 bp, Photorhabdus luminescens
atgttaagtcacatttggtggtcactgccattaacattgattgtattttacaccgcaagaaaactttcactacgatgcaaaattcccattctgaaccccttattggtttctatcgccgtccttgttccaatattattaataacccacacgccttatgaacactattttgccggcagtcgaattctaaatgatctactccagcccgccgtagttgcactggcatttcctctatatgagcagatacaccagatccgagcccaatggaagtccattattagcatctgttttatcggcagtattgtcgctatggtgacaggcactgctattgccttgtggatgggcgcaacgcctgaaatggccgcttcgatactgcctaaatctgtcacaacaccaatagcaatggcagttgcagatgccattggcggtattcccgcaatcagtgctgcttgcgtcatttttgtcggcattctcggcgcaatatttggtcataacctgttcgatcttttacaggtaaaaaccaaagcatcccgcggcttagcaatgggaacggcatcacatgctttgggtaccgcccgctgtgcagaggtcaatttcgttgaaggcgcatacagctcattggcattgatgacctgcggtatcattacttcactaacagccccttttgtattcccggtgctgctatacctatttagctag

SEQ ID NO: 7319 - DNA, 885 bp, Photorhabdus luminescens
atgcaagctcgttttcaccccatatgggtacagttgccctctaaactacaggatgcacttttaccttacgcaggaaacgatgactttcctgccatgctcactgctgagcaagctaaatcgattaagaaagcctgcggttttgacgataacaccttggctgtcgccctgttaccactcgcagcggccagttccctgacaccaatctcacattttaatgttggtgcaattgcccgcggtgaaagcggaaacctctattttggcgctaatatggaatttgctggcgtaccactacagcaaacgattcatgctgaacaatgtgcgattactcacgcttggttattgggcgagaaaagactggcatctgttactgtgaattactctccgtgcggccactgccgtcaatttatgaatgaacttaatagtggcacacaattagagattcatctgccaaaacaggcatcttcaacattagatcactatctgccagattcttttggcccaaacgatctgggcatcacaactttgttgatggatccggtcaatcatggctataaactagaaacgacggataaattagtactaacggcattagatgcagcaaaccagagctatgccccatacagtaattcctacagtggtaccgcacttctgggaaaagatggaataatttatcctgggcgttatgcagaaaatgcggcatttaacccaagcttgcccccattacaagcagcactgattctgatgaacatttctggtggtgattgcctggctatcgaaagagcggtgttagttgagggaaaacacagtgatttatcccaacggagtgcgactcaatctatacttgctgcactcggttgcagcaaatttgattactacactttctga

SEQ ID NO: 7320 - DNA, 1698 bp, Photorhabdus luminescens
atggaactggaacacgaaagtaaacgtccactatatattccctattctggcccaattctgttggaattccccctgctgaataaaggcagcgctttcactgaagaagaacgtaggaactttaatcttcacggtttattaccggaagcggtcgaaaccatcgaagaacaagctgaacgtgcctatcggcaatatcttgatttcaaaaatgatgcagataagcacatttatctgcgaaatattcaggacactaacgaaaccctgttctaccgcctgctggatgcccatttgaacgaaatgatgccaatcatctacaccccaaccgtgggtgaagcgtgtgagcacttttccgatatttaccgccgtgcccgtggcctgttcatctcacatccaaacaaagcacatattgatgatatgctgcaaaatgcgaccaaacaaaatgtaaaagtcatcgttgttaccgatggtgagcgtatcctcggtttgggtgaccaaggtattggcggtatgggtattcctatcggtaagctctccttatatacctcctgcggtggtatcagccctgcttatacactgccagtcgtcctggatgtaggcaccaacaacccacaacgcctgaatgatccgttatatatgggctggcgtcacccacgtatcaccggtaaagaatatgatgaattcgtagacgaatttattcaggctgttaaacgccgctggccaaatgtgctactgcaatttgaagatttcgcacaaaaaaatgccatgcctcttcttaatcgctatcgccacgagatttgttgctttaatgatgatattcagggaactgccgctgttacgttaggtagcttaattgccgccagtcgcgcggctggccgtcaattaaaagatcaaacggtcaccttcctcggcgcaggttctgccggttgcggcattgcagaacagatcgtcgcccagatgaaatcagaaggtttaagtgacgaacaggctcgtgcccgtattttcatggttgaccgcttcggtttattgacagacaagctgccaaatctattggatttccagaacaagctggtgcagaaaagcagctcattggctaaatgggatgtaaacaacgattcaatctcgctgcttgatgttgtccgtaatgctaaaccgacagtattgattggtgtttcaggtcaggcaggtttgtttacagaagagatcatccgtgagatgcataaacattgtgaacgcccaatcgtcatgccattatcgaatccaacttcccgtgttgaagcccgtcccgaagatatcatcaactggacagatggtgccgctctggttgcgacaggtagcccatttaatccggtaaaatataaagatcaggaatatccaatagcacaatgtaacaacgcctatatctttcccggcattggtctgggtgtcatcgcatcaggggccaaactggttactgacggtatgttgatggcagcaagccgaacattggcgaattgctcacccttagcccaagaaggtcaaggtccgttactgccacttatcgatgatattcaagaagtgtcacgcaaaattgctaaacaagtcgccaaagaagcacaaatacagggcgttgccactgtgacctcagatggagcactggatgaagcgattgaacgcaacttctggaaacctgaataccgcgtgtacaaacggacttcattctga

SEQ ID NO: 7321 - DNA, 741 bp, Photorhabdus luminescens
atgtggaatcgcctgataacaagtctgttattcatcacagggatgctgatactgacagctattgcacttgaccgctggatgagttggaaaacagccccctatgtctttgatgatctcaaacaacttcctgaacgtgaagtgggtatagtacttggtactgctaaatattacctctctggtgcgccaaatcagtactatatgtaccgtattcagggagccattaatgcttataacagcgacaaaatcaaatacttgttactgagtggtgacaatgctcagcaaagttataacgaaccggtcactatgcgcagggatttggtaaaagcgggtattcctgctgcaaatatcgtactggattttgctggtttcagaacacttgactcaatagtcagaacccggaaagtttttaacactaatgatttcacgattattacccaacgatttcattgcgaacgagccctgtttatcgctatgcatatgggaattgatgctcagtgttatgcagtttctacccccaagaatatgattaccgttcgattacgtgaaatcattgcccgtcttggtgctttgactgatctttatattctgaaacgcgaacctcgtttcttgggcccgttgatccctattcctgctccgtataaggtaccaaaaggtatgactaattaccccgccgtcactccagaagagttacggacaatggataaaacccagcttaagccgaccgggccaacaccgccgtga

SEQ ID NO: 7322 - DNA, 1125 bp, Photorhabdus luminescens
ctggatagtattcgtggcttggcaatactggggatattgctactcaatatctccggttttgctttgccatccgccgcttatttgaatccggtatataatggttcagcttctttaactgatttgattgtctggtctgtacttagcgtccttgttcagggaaagttcctgtgtattttggccttcttatttggtgcagcattggagttactattaccaaggggcaaaatctggaattatccacgattaaccatacttgctctaattggaatgggacatggtatcctattctgggatggcgatattttgctctcgtatagtttagcaggttttttcagttttcaattgattagccaaaatagcgccagtaaccggttatttatgaaaggcgctattttttatctgatcggattagtgctattgtttattctcggctttttttccagcggcgaatctaatgatgtttcttggcagttgacggaattccagatgttatacgaaacatattggaaaacgtctggtggatggctggcagtaaaagagcgtttcaatcaggtcatgttgatgatggtcatgctgtttgttcagtatggttggcagcttatcggtattatgtcatgtggtgctggattaatgcgtaatggttggctaaaaggtgaattttcagtgagccattatcgaaatgtggcgctagtgctgataccgctcagtattgctgttcagatattctctgtggttttccaatatatccataattgggattacttttggtcaggtattgtcggttatatccttgctgagttggtaacgccatttcaggcactggggtatatggctttaatatatggtttctggccggtcatttcatgctggcgaattaattactggttcaatcaggttgggcgaatggcgatgagtaattacttgctacaaaccttaatctgcaccctgctattttataactttgggttgtttggtcaatttagccgtttggaactacttgcctttattcttcccatttgggcggtgaatattcttttttcatgctggtggttacgtcgtcacccgcaagggccagtagaacagcggtggcgtgatatcacggcggtgttggcccggtcggcttaa

SEQ ID NO: 7323 - DNA, 660 bp, Photorhabdus luminescens
atgtcatccttaagtaaagaagctgagcttgtgcattcggcgctggaaactcgtggccttgaaacgcctttgcgtggtcaggcattggtaccggaagtgcgcaaagcgcggattgaggagcatatgacggaagttatgaaactgttgaatctcgatttgcgtgatgacagtttggcagaaaccccaggtcgtattgcgaaaatgtatgtcgatgagattttttcaggattggactacagcaatttcccgaaaatcacattgatagagaataaaatgaaagtggacgaaatggtgaccgttcgtgatatcacactcaccagtacctgcgaacaccattttgtgaccattgatggcaaggcgacggttgcctatattccaaaagataaagtgattgggttgtctaaaattaaccgtattgtgcaatttttttctcagcgtccacaggttcaggagcgcctgacccagcagattttgattgcattacagacactccttggtaccaataatgttgccgtatcgattgatgcggttcattactgtgtgaaagcgcggggtatccgtgatgcaaccagtaccacgacaacaacctctctggggggattgtttaaatctagccaaaatacccgtcaagagtttttacgtacaactcgccatgtgtaa

SEQ ID NO: 7324 - DNA, 1173 bp, Photorhabdus luminescens
atggctatgaacaattcaacttctcctcaacaaagtcaccgctacctcgcttttcatatcgcaatgagtggatttttggcgctggttgtcgctatgggaattgggcgtactgccttcactcctcaagtgcctttaatgatcgcagaattccagtttagtctaactggggcaggtatcgttgcggcttttaactatttgggatatctggctggttcttacgatgcaatgcgggcgcaccgtttgattgaatatcggctttgggccggattgtggggagcagtgattatcacattgctctctgcactactgtatggggcgatattgcacagtattgcccgttttcttattggttgggcaagtggctggacattggtattggtgacatcatgggccaatgaacagttggctaaattgaatcgtcctgcgttgagtgctgccatatttgcgggaccgggagtcgggatattcgttactggtatccttgctattggtattcaagcatggcaagtgagcgctgccgaagcatggatgttgtatggcattttggcgctgatttgtagtatctatattagtcggcatttaccccgtggtggtgagttacaccgttcacaggctgaggtgaagaaactgactttgacgcctgcaattaagcagttggtatggagttacagcttagcgggctttggttatattttgccagcgacttttctttcacaaatggcgagtgatcgtttccctggcagcttgtttgcgcagtttgtctggccaatatttggtggtgccgcagtcatcggcattggttttgctattctgacccgtcatatgctgacaacgcaaatccggcttgcgatcactttatggattcaggctgtgggcattcttatcgctgagatcattccgggaataggtggtctggcattaagctctttgttggttggtgggggttttatgtgtgtggtgcaaatggcgtttcaatatgggcgtgaattagcgccagaacatagccgttatatggccggattgttaaccaccggatatgctgtcgggcagctaattggtccgatgctgtcagcggtttctaccacaataaccgggagattggagccagcgttatatgttgcattgattaccttggtcattgccgggttattggtttgtgaccggggtgggtga

SEQ ID NO: 7325 - DNA, 747 bp, Photorhabdus luminescens
atgtataaagcatttcaaggtaagactgctattgtaaccggtggtggaaccggtataggacgggctatcagtattatgctggcgaaacaaggtgctgctgtcgcagtgatctattcacaaagtgaacttgaagcgcaggaaacaacagaggccattatcaaggatggggggcaagctatcgcgataaaagcagatgttgccgacgaatcggctgtacaagccatgataaacaccgtcgtggaaaaatttagcgggatcgactatctggtaaataacgcggcgacaactaggcaacttcaatttgaagatcttgatgccatatctagcgatatttgggatgccattattgatgttaatgtgaaaggcacatttcattgttgccggtatgcggcaccttatcttaaagcaagaacagggagtgctatcgtgaatgtcggtagtatcgccggcgaaaccggcctgggctcttgtatcccctacgccgcttccaaatcagcggttcacggactgacaaaatccttagctcgggcactggctccatcggtcagggttaactgcgtagcgccaggtgccgttgaaacaagatggtggaaagggagagaagagaaaatgcatacgctttgcacttatttgcccttagaaagaatttcaacgccagaagatgttgcagaaataaccttaatgttgttaaaagcagaatcgatgacaggacaaatcataaccgttgacagtggtcaaaccttataa

SEQ ID NO: 7326 - DNA, 1242 bp, Photorhabdus luminescens
atggatcactgtcatacctctgaattgatctctttgcagcaggcgttggaaaaacttctgacgcaagttacaccactgactgacacagaaaccgtcagcctcccgcgaacatcaggacgcattactgcaacaaatattatttctcctatcaatgtgcccccttttgctaactcagcaatggatggttatgccgtacgccatgcggatttaaacagcaataaaccactgcctctggcaggaaaagcactggctggcgtaccttttcaaggagaatggccagttgcaacttgtatccgcattatgactggcgcaccgattcccataggcgctgatacggtcattatgcaggagcacgcagaaactactgatgatggcatcgttttcactcagccagccaagcaaggtcagaatatccgtctggctggcgaagatattgctaaaggtgcagtagttttgtcggcaggcagcaaattatccaccgctcagttacccctaattgcatctttaggcatcaccgacgttgaggtggttcgcaaattaaaagtcgccattttctcgaccggtgatgagctacaagctatcggtcacccacttaaggaagggcaaatttatgataccaaccgtcttaccgttcgactgatgctggagaaactggattgcgacgttattgatttcggggttattgcagacaatcctcaagctttacgccatgttttcgcacaagcagatcaaaaagcagatttagtcatcagcagtggtggcgtttctgtaggtgaagcagactacactaagcagatactggatgaattaggcgaaatcagtttctggaaactggcaatgaaaccgggtaaacctttcgcttttggcaaactaaaaaacgcctggttctgcggtttgcccggtaatccagtttcagccgttctcactttctatcaattagttcaacctttaatcgcgcgtctatccggttttacggcatggcaaccccctatgcgtatgcgcgccaaggtcaccacgccattgaaaaagagaccgggaagaatggattttcaacggggcattacttcggtgaatgaacaaggtgaactagaagttcgtacaacaggacatcaaggctctcatatatttagttcattcagtcaggggaactgcttcattgttctggaacgtgaacgtggacaggtagaagttggtgaaaatgttgaaatcgaattgttcaatcacttactgaaaaatgaataa

SEQ ID NO: 7327 - DNA, 753 bp, Photorhabdus luminescens
atgaccattgaactaacagatgcagaaaccctacgctataaccgccagattgttctacgcgggttcgattttgacggtcaggaaaaattgaaatcttcggcgatcctgatagttggtgccggtggtttaggttgcgcagcatcccagtatttgaccgcagcaggtgtgggaacaataacactgctggattttgataccgtttctctctcgaacttgcaacggcagatcctacatcgagatgaacgtatcggcatggctaaagtgcattcagcccagttgacactccgagcaataaacccacatgtcacgattaaaaccgttaatggattactggaagatcaagcgctagatgaacttatcagccagaatgatgttgtcttggattgtactgataatgtaacaatccgcgagcaactgaaccgcctgtgtctggcaaggaaaacgccactggtttccggcgcagctattcgcatggaaggacaactcactacatttacttatcagccaaatgccccctgctaccgttgcctgagcagactgtttggcgaaaataatctaacgtgcgtggaaacgggagttatggcaccattggtcggtaccatcggtacattacaggcaatggaaaccatcaaactccttactggatatggcaaagtcagcagtggaaaggttttactgtttgatgcgatgacaatgcaatttcgtgatattaaattacttaaagatcccaattgcgaagtgtgcaacagttaa

SEQ ID NO: 7328 - DNA, 1596 bp, Photorhabdus luminescens
gtgttaagtacaaacaacatcaccatgcagtttggcagtaagcccctgtttgaaaacatttctgtcaagtttggcaacggtaaccgttatggtctgattggcgctaatggttctggtaaatccacttttatgaaaattctgggaggtgatctgacaccctctgtcggcaatgtcagcaccgatcccaatgaacgtattggtaaactgcgtcaggatcagtttgcttttgaagagttcacggtgttggataccgtgattatggggcacacggaactgtggcaggtaaagcaggagcgtgaccgcatctatgccatggcagaaatgagtgaagaggatggctatcgcgttgccgatctggaagtcgcttatggcgagatggatggttatagtgccgaagcgcgtgccggagagttgttgttaggtgttggtattccagtagaacagcattacggtttgatgagcgaagtggcaccaggctggaaattgcgtgtattgctggctcaagcgctgttttctaatcctgatgttctgttattggatgaaccgacgaataacctggatattgatactattcgttggttagagcaaatactgaatgaacgaaacagcaccatgattattatttcccatgatcgtcacttcctgaatacagtttgtactcatatggccgatcttgattacggtgagttgcgtctgttccccggtaattatgatgaatatatggttgccgccactcaggctcgtgaacgtctgctagctgataatgcgaagaagaaagcacagattgcggaattgcagtcttttgtcagccgttttagtgctaatgcttctaaatcaaaacaggcgacttcgcgtgctcgtcagattgataaaatccagttggaagaagttaaagcatccagccgtcagaatccttatatccgttttgagcaagataagaaattgttccgtaatgctctggaattggaaggttttactaaaggctatgataatggccctctgtttaaaaatcttaatctcctgctggaagttggtgaaaaactcgctgttattggtgctaacggtattggtaaaacaactttcttgaaaacgctcgttggtgaaacagagccaaccagtggtgtagttaagtggtctgaaaatagtagcattgggtactatgctcaggatcatgccagtgattttgactgtgatctgacagtttttgactggatgagtcaatggaagagagaaggggatgatgaacaagctgttcgtagtgtattaggccgtttgttgttcagccaggatgacattaagaaaaaagtcaaagtattatcgggtggcgaaaaaggacggatgttatttggtaagttgatgatgcaacagccaaatattctgataatggatgaaccaacaaaccacttggatatggaatctattgaatctttgaaccttgcgcttgaattgtataaaggtactttgatatttgtttctcatgatcgggaatttgttagctcattggcaagccgagtgatggaaattaaatctgataaggtcattgatttcaaaggtacttatgatgaatatctaagaagtcagggaattattgagtaa

SEQ ID NO: 7329 - DNA, 411 bp, Photorhabdus luminescens
atgtcagagatcgaagtaatttctttaaaagcaccaattagcgttattgcaaaagtaactaacaaatcaccatataaacttaaacttatccaggattctattcgtctggatcaaggtgagtggactactcttcctcctcaagtcattaatagaagcaatgatagcacacctggaaaagcgatttggagaagtgattcaaacagcctgataggtggtgttgcagggcgctgtacttatgtatttgtggatagcaaaggcgaaatctatagtatctatattacatggagtaaccctttgattggcagcagcagctattcaatctcaaccgattatttaggtgatgatttacatttatcctatacagcagatggcggtaataatccagtagtagaatatatgattgtaagctaa

SEQ ID NO: 7330 - DNA, 564 bp, Photorhabdus luminescens
atgaaaagtattgctgtttattgtggttcaagtctgggtatatctgaaatctataaagaaaatgtcattatcttcgcaaaggaattggttaaacgtaatcttacgctcatttatggtggcgcaagtgtgggcattatgggaactgttgctaatacggttttggcagagggtgggaaagtcattggtgttattccaacattattggagtcgcgggaaatatcacataaaaatctgacagaattatacgttgttgaaactatgcatcagcgtaaaaacaaaatgattgagttagctgatggttttgttgctttgcctgggggttttggcacattggaagagttcagtgaggtatttacctggagtcagattgggttacatacgaaaccttgcggtattcttaatattaataacttttatgatccgttaattgcgatgattaataaaatggctgatgaacaattcttacatgaaaaatatcgtcatatggcaataattgagcaagatcctgctatcttactcgatcgttttaatacttatcggtcgccatctataaaaacatattaa

SEQ ID NO: 7331 - DNA, 87 bp, Photorhabdus luminescens
ttggaaggagacatccgggcaaaacctcaattaaaatcaagtgatctgaccgataatcttcgcagtgaaatgcagataactcaatag

SEQ ID NO: 7332 - DNA, 894 bp, Photorhabdus luminescens
atgtctccttccaagctccaaaagagtgcctttccattaatacctgtaatactgttactactggctatgacatcaattcagggcggtgcttctcttgccaaaacgctgtttccggtcatcggtgcaccgggtgttaccgcactgcgcctaggtcttggaactctcattctgtttattatttttaaaccctggcgcctgcgttttagccgaaaatccatcatgccactgcttacatatggtattgctcttggcgcgatgaattatacattctatatggcactgacaactattcctttaggtattgccgtggcccttgaatttaccggcccattggctgtagctatgttttcatcacgccgaccaatagattttctttgggtggcattggttatcgccggcttagctttcctactccccattggcaataataatattaatagtttagatcctatagggattatttatgcactcagcgcaggtgtttgctgggcactgtatattattttcggccaacgcgccggtgcaggtcatggagcagcaacggtgtctattggttcatttatcgctgctatgatatttttccctgtcggtttaatacaaacggggccagaactattatttgatatgtcaattctccctctggcactggcaattgcgattctgtctactgcattcccatatacactagaaatgattgccctaacccgtttacctgcacaaacatttggtactctaatgagtcttgaacccgcactgggtgcgctatctggtattgtgtttctgaatgaacatttaactataacgcaatggctggcgctgttctgtattatttttgcctccatcggttctacatcaacaataaaaagaaaacctaaaatcaccgaagttgattaa

SEQ ID NO: 7333 - DNA, 348 bp, Photorhabdus luminescens
atgcgtggcaaaaatttcatttccatccatgaaatgctggatacctttcgtgccacaattattgaacattcagatatctttgcagaaagagtcgtacaacttggtggaatagctctcggcaccgtacaagaagttaatagacacacagcactgaaaagctacccaacaaatatccatgacgtgcaggaccatctaaaagcactggccgaccgttatgctgttgtcgctaatgatatccgcaaagcgctgaacgaagttgaagatgaaaacaccgcagatatgttaaccgccgcctcccgtgatctcgacaaattcttatggtttattgaagcaagcgttgagcagtaa

SEQ ID NO: 7334 - DNA, 222 bp, Photorhabdus luminescens
atggacaacgaagtaaaagacagcaatggcaccctacttaatgatggcgattctgtacaggtcatcaaagatctaaaagtaaaaggcacatcagcaacgttaaaacgcggcactttgattaaaaatatccgtcttacccatcgtgaagatgaaatcgaatgtaacgcagataaaatcagagggttagtactgaaaacctgttttctgaaaaaagtaggataa

SEQ ID NO: 7335 - DNA, 696 bp, Photorhabdus luminescens
atggaaccaacaatcatcatccccggtcatttatgcacatccgagttatttgcctaccaaatacctaatctttggaagcatagttccgttacaataccatcaatactggaaggtagtagtcttacagaaatggcgaaagatatcatccagaaggcaccttcctatttttctcttgctggcatgtctatgggaggtttcatttgtctggaaataatgaagttagctccggagcgcgtaagccgattagctttacttaatagctctgcgcgtccagagacagaagagcaaaaaaagatgagagaaaatttactaaataaaaccactctggaaaatttcgaagaaatcttaaaaaatatggctaccacaggagtgcacaaatctcgtcagcacgataaaaatcttataaatactattattcgcatggggaaagaaactggctttgatgcttatgttcgtcaatccaaggctttaggtgatcgtacagataatcgaaatattttaacccatatcagtgtacctacattggttcttgtcggtgacagtgacaccataactccacctgaatattcagaagaaatggctgaaaagataccaaacgcaaaattaattaaattatacaggtgtggacatgccacaacacttgagcagccagaagaagtgaacaaagcgctcatcgagtggttaaatatgagttaa

SEQ ID NO: 7336 - DNA, 939 bp, Photorhabdus luminescens
atgttaacatacaataaagctctagagttctttggtcgtgatttcaaatttccccacacaattaaagaacttccagagaagttatccgatttgaaagatcttgaaattggtttttttaaaacaagtgatgaggtatctctctctttttggaaggccggtaaaggagaaactttaatattcatccccggttggtcctcacatggtgcagaatatataaatataatatatcttctcagcaagaaatatgaagtttatgtattggatcagcgtaatcatggtttatctcaaaaagtaaattatggaaatagaatttctcgtttttctgctgatcttcatgaatttattgttgctgttaatataaagaaagcatatttctgtgggtggtctatgggatgttcggtactatggagctacattgatcttttcggattggaagtaataaaaaaaatagcattgattgatgaaccaccttctatttattgccacgcagattggtcagaggaagaaagaattaaagcaggagcttttacaaattcgccagaagctttgatagacgtctatagtggaaaaattcccgggaataaaatgttctttaattctgatatacttaaatattatacaacagaaggagcacccgcatttttcaattcacaaacctttgccaatgaatttgttccacaaagtatagatgatttgaaatcagtactatttgaacatattttaaatgattggcgagatgttatttcccataaaataaccgttcctactttaattttttcaggtgaaaacagcgactggatagaaagccaacaatggatttcatctactgtaccaaaaggggaaattataatttatggtcgggaagagcatggagatcacttcttagcgcttaaagatccattaagattttcaaaggatctttctgctttcttttattaa

SEQ ID NO: 7337 - DNA, 894 bp, Photorhabdus luminescens
atgtttaccggactaagtgcttttcctttaacaccgctgtatggcaacaaggtagatgagaagacatttatctcgcttattgaaaatcttgttgaagctggagtggattctatcggcgcactgggatcgacgggtagctacgcctatcttacattatcggagcgcgcgcatgtcgcccgactggctgttgaacatgcgaacagtataccggtgatggtcagcattggagcgctgcgtgtagcggatatactcagccttgctgaagatgctcaacacgcgggtgttagcgccgtaatgctggcacctgtttcttaccagcgtcccacaccggacgaggtgtattcgctctatgaagaagtcagccgttatctatccgtaccgctttgcgtctatgataatcctgcaacgacaggttttgaatttagcgatgagctgctgattaacattgccaatttaccgtctgtcagctcgctcaaacttgctcgcttgccgcaggcactgtctctggctacacaacaggtgaatgcgcttcgttcccgccttcccagccacgtttcgctcggaatcagcggggactggcaagcggcgacgggcctctgcgctggatgtgatgtctggttctctgtcatgggtggactttttccgcgaactgcactggctatcactcgcgcagcaaaggataatgatacaaaaacggtacagatgttgtcggctacccttgaacctgtctggaggctcttcaaaacctatggtagcctcagggtcaccgcagccgccgctgagttactgggcaaagtaaccgccccttgtcttccctttccactcaagtcattatcaggtcagccccgtgatcagctaggcaccattctcgaagatttaaaaaaccttatttaa

SEQ ID NO: 7338 - DNA, 300 bp, Photorhabdus luminescens
gtgcttgtagatgatgcgatggtgccgcttctccgcgaagaccctgaatttgcgcagcattatctgcatcaggcttttattgatatggatgaagaaggcgggcaggaagcgtttctaatggcattgcgccacgtagtagaggcgcgtggaggaatggctcaagttgctgaaaaagcaggcatttctcgtgagacactgtatcgcacactgtcgccgaaaggcaatccaacactcaaaactctgcgtagcgtagttgcagcaacagggttccaattctcgcatattgctacgatagcttag

SEQ ID NO: 7339 - DNA, 333 bp, Photorhabdus luminescens
atgctcccggggattcgttcccttgccgccgcgatgcatcttgaaatccattgggtatatacccgtattctagtttttgtggacgatgcaatcagccaccttatacaactgcgctttgttaaatctgaattaatgtttacctacttcgaggctactcgtggatatctggaaaaacatgataaaccacgggtacctctgatgctgtgccacgacagtctggagggatgtagaagatggcgattacagggaagagcagccttaagttgctgcttatacccgttatctttcaagttgcctctttgttggctgcgctcgttcaccccggtcacatag

SEQ ID NO: 7340 - DNA, 807 bp, Photorhabdus luminescens
atgtctgttcctgcatttggattaggtacttttcgtctgaaagatgatgttgtgatcacatcggtaaaaaatgcccttgaattgggatatcgtgcgattgatacagcacaaatttatgagaatgaagccgcagtaggacaagccatagaagaaagcggtgtagctcgtgaagatatctatatcacgacaaaaatctggacagaaaatttaagcaaagaaaaattgataccaagtcttaaagagagtatagcgaagctgcgcactgattatgttgatttgacgctaattcattggccatcaccacacaacgttgtcagtgttgatgaaacaatgaatgcgttactggacgctaaaaatatggggttgacacgtgaaatcggtgtttcaaactttacgattgatctcatgcaacaggctatcgatgcagtaggtgctgaacacatcaccacgaaccaaattgaactttctccctatctacaaaactgccacgtgacagcttgggcgaaagatcatggaattcatatcacttcctatatgaccctcgcttatagtaaagctcttcaagatgaagttatcagacgcatagccaccaaacatcaagccacgcctgcgcaggtgattttgtcttgggcgatggcattgggttatagcgtgatcccatcttcaactaagcgcgaaaatttacaaagtaatctgagagcctccgtgcttaaacttgatgcagacgacatggcggcgatcgccacacttgatcacaacgaacgtctcgttaatccagaaggacttgctccccaatgggataattaa

SEQ ID NO: 7341 - DNA, 1113 bp, Photorhabdus luminescens
gtgagaaatattatgctttttgaacgctattctctgaatggtctgtcgttatctaatcgtattgttatgccaccgatgactcgttcacgggctggaacaaacggtatagcgactgatttgatggctgaatattatgcacaacgtgccagtgcaggactaattatcagcgaaggtacacaaatcagccaacaggggcaaggatatgcatggacgccaggtatttataagcctgagcagataataggatggaaaaaagtaacagatgcggtacatatggcaggaggcaaaatttttgctcaattatggcatgtaggacgtgtttcacacacgattctacaacccaataattctgagccggtttctccctctgcccttcaagcaaaaggtgtaaaagtttttctggatgtggcaggccgtggacctgaacatggtatcggtgaaatggtacaacactcgcagccacgagcactgacacttgatgaaattccagatatcgtaaatgattatgttcaagcagcaaataatgctattgcagcaggttttgatggtgtagagcttcatgcggcgaatggttatcttattaatcagtttattgattctcagactaacctacgagatgacgaatatggtggaactttacaaaatcgtttacgtttcttgagagaagtcgctacatcagtggctagcgcgatagggaaagataagctaggtgttcgcctggcaccactcacaaccctgatgggttcaaaagatgatacgcccgaagccacttatctggctgccgcgagtgtgctaaatgatatcggcatagcctatattcatattgccgaagcggattgggaagacgctcccgtcatgccagtaaccttcaaagaagcttttcgcctcctttatcacggcacgttgatatattccggtaaatacactttggaacgagcggaagaagcgctaactaaaggctgggcggatttgatcggatttggtcgcccttttattgctaacccagatttaccctatcgtcttgctaataagctagagctaaacccgccgataaaagaaaaatttttcggtggtaatatggaaggttataccgattatttggctataaactaa

SEQ ID NO: 7342 - DNA, 909 bp, Photorhabdus luminescens
atgaaggcaaattcagaagagttaacaattttcgtgtcagtcgtggaaaacgggagtttcagtcgtgcggcggaacacctgcaattagcaaattccgccgtgagccgttctataaaaaaactggaaaagaaactaggcgtgagtctgctcaatcgcacaacacgtcagcttagcttaaccgaagaaggtgagcgttatttccgccgagttcagcatgttctacaagaaatggccgccgctgaaactgaaattatggaatctaaacacactccaagtggtttattgcgtatcgatgctgcaacacccgtcgtattacatttactgataccactgattaaaccttttcgcgaacgctacccagaaataacgttatcactgatttcttcggaaacgtatatcaatctgattgaacgcaaagtggatattgccattcgtgtaggcaacttaaccgactccagtctacgagctcgaccacttttttccagctatcgaaaaatcgtcgcctctcctgaatatctgaaaaaatatggcataccgcaatgcattgaggagttgaaaaaccatatttgtcttggctttaccgaaccggtatcactgaatacctggccgatagcttgtcaggacggacaactgcatgaaataaccgtgggactttcttccaacagtggtgaaaccctgaaacaactgtgtgtaacgggtaatggtatcgcgtgtctgtctgattatatgattgataaggagattaccagtggtgaacttgttgaactactggttgaaaaacgtttacccgtcgggatgcctttcaatgccgtatattacagcgatcaggctgtaagcacccgaatcagggcatttatcgattttctgagtgaatatgtcaatgactcccgtaaatactttggtcgttaa

SEQ ID NO: 7343 - DNA, 2148 bp, Photorhabdus luminescens
atggcactttccaattcaataaaaaatcagataagtcagtggtataagatattacctcaacatattaatggttttatttctcgtgctccgcagcggcagatgattgccgaagttgcaaaaacacttgcggatcaggaaggtcgtcatttggttattgaggcaccaacgggaatcggtaaaaccctttcttacctgctacctggcattgctatcagtagagcggaaagtaagccattggttgtaagtacggcgaatgttgctttacaagatcagatttacagtaaagacctgccactgttgcgcaaaattattcccgatctgaaatttaccggtgcttttggtcgtggtcgttatgtttgccctcgcaatcttgacgctatctgtgcaaccgatagcgaacagattgatcttatgtttttggttgaggacaaaacagagcttgccagtagtgaagagcgggaattgtgtcgtcggttgcgtagtgattacacaacctttgcctgggatgggttgcgtgatcaccataaattggctttgtccgatgctttgtgggggaaagtgagtacggataaagcaaattgtctgggacgtaactgtcagtattatcatcgttgcccattttttattgctcgccgtgagatagaaaatgtcgatgtggtggtggttaaccatgcgttagtgatggcggcattggagagtgaatcggtactgcctgatgctaaaaatttgttattggtactcgacgaagggcaccatataccggatgttgccagggattctctggaagttgaaggggaaatcaccctgtttcaacttaatggtcaattggatacttttgttcgtcatgttgagcaatatctggtgcaattccatccggcaaagccaccacgcttagcgaatgccagtcgcctgaatgaacacagtgaaaaattacgggaatgctttagagagctcgcaattatcactcaggcgtttttaccggaaaagaatgaagtcgatgagtatctgtttgagcggggtaaattaccggataacttgctactttgctgccagcagctatttaaactgactgatggtttacggggtttggcagaagcgatactgaatgatttgactgagcggacggctaaacaggatattgtcagattacatcggtctattttgcataccagtcgtgcgcttggatattttgaaaatatgactaagttgtggcgtttggcagcgttggaagagtcatccagtgcaccgatatcaaaatggcttagacgccgtgatgagaaaaatcaatcgcacctctatttccattgtgccggtatcagagtcagtgaacagcttaatcaactgctttggcgtagcattcctcatgtggtcgtgacatcggcaacgcttcgttctctgaatagtttttctcgtattcaggaattgaccgggttaactgaaaaagccggggaccgttttgtcgcattgtcatcaccttttgaccatgtacggcagggtaaattggttattcccaaaatgtcatgggaaccgacactgcacaatgaagccgctcatttgcaagagatggcgggttatttcagggctcaattgctgagtcagcaacataaaggcatgttggttttgttcagcagtcagagagcgatggatatctttctctcttatgtaacggatttacgcctgatgttacttgtgcagggggatcagccacgttatcggttagtggaaacacattgtcagcgtattaatgaagggcaatgtagtgtactgattggattgcaatcttttgcggaagggctggatttaaagggagattacctgtcccaagttcatattcaaaaaatttcatttccgccggtgaataatccggtcattattactgaaagcgagtggttgaaatcacttaaacgttatccttttgaagtgcagagtttaccaagtgcttcttttagccttattcagcaagtaggaaggcttatccgtagccatgaatgttatggtgatgtggtgatttatgacaggcgcttactgagcaaaaggtatggcccaagattattgcaagcgctgcccgttttccccattgagcagccggaagttctttcagaggcggaaattggggacatgaatactcttttgcaaggaaggcaataa

SEQ ID NO: 7344 - DNA, 837 bp, Photorhabdus luminescens
atgaataacgcatactttgtcactccacaatggctaaaagatcatcttgatgataagaatctcgtcatccttgatgcaaccgccccaccaccacctcaacaaattgattgtcataaactttggctgaatacccatatccccggtgcccaatttcttgatttagacaaaattgccaatcatcaaagtggattacctcacatgctgcccgatccgcaaacttttagtcaggctgttggcgcaatgggcattagtgaaaatcatttagtcgtgatttatgaccaaggcaatatgttctccgctcctcgcgcatggtggacatttaagatattcggtagccacaacgtccgtattcttgatggcggtttacaaggctggcaacaggcaggatttccaacagcatcaggggaagtgaagcgcaatcctcaaatctttaataccgatttcaatgccgacaaagtgaaatcactggaacaaattctgggtgcgctaaatgatcaacaaatccaaattgtcgatgctagagcgacagaccgctttcaagctaaggccccagaaccgcgtcccggattaagaatgggccatattcccggtagtaaaaacattccgtggaccatgttagtagagaatggccactttaaatcagaaactgaaattaccgatattttccataaacaaggcgtcgatttaaacaaaccggttatcaccagttgtggatcgggaatgaccgctgccgttttggtactgggcttagatatcatcggcaagaaagatgtttatttatatgacggctcatgggctgaatggggagcagatgaagccttaccacttgaaaaataa

SEQ ID NO: 7345 - DNA, 573 bp, Photorhabdus luminescens
atgttaagacccccccctctccagactttcccgccagaaacgctctcgcttgacgagctggtccctaaaaatcatttggtccgtcaagtcgatgctgccattgatttcgaatttatccgcgaattagtcgccccgttgtattgccacaataatggccgtcctgctatcgatccggtcatgctgattaaaatgatgttactcggctacttgtttggcgtccccagtgaacgccgtctggtacaggaaattcaggttaatgtggcttaccgctggtttctgcgcctcggactgacagaaaaggtccctgatgcctcaaccctgagccagaaccgccgccgccgtttcaatcataccgcggtcttccaacagatttttgaccacattgttgaacaggcgatagccaaaggatttgtgggcggacacgtactctataccgacagcacccacctgaaagccagtgccaatccgcataaatcggagaatgtcatgcggtcggttccccccggcgcctatgttgacgcactggataaagccgtcactcaagaccgggcggcagctggaaaaaaagcctga

SEQ ID NO: 7346 - DNA, 705 bp, Photorhabdus luminescens
gtggatgggcaagtcggtattatcaccgatacctacgccacaccgggtaatgtccacgacagccagccttttatcaagcgtttgacgcgtcagttagagcgttttgctctcaatcccctcgcggttgggttggatgcgggctattttacggccccggtttgttatctgacggaacagttaggcattatccccatcataggttatcgccggccgaataagggaccaaatacctttcagaagaaacatttcacctatgaccagctacaggattgttatgtctgcccgcagggagaaaaactgatttataccacaaccgaccgtcagggataccggcattatcaggccccggcggctatctgccagtgttgcccgcagcgtgatgcctgcacgcacgcgaaaggcggaaaaacgataacccgtcatatctgggaggccagtaaagagcaggccagagaaaaccggctaacggaatggggtaaaaaagtttacaagcgacgaaaggaaacaatagagcgcagttttgcggatgcgaagcaacatcacgggcaccgttatgcccattttcgcgggttgcagaaggtgcaaatacagtgtcttttggcggcaactgcccaaaatatcaagaagatagccttgctggtcgcgatgctttgttgtttttatctctggagggcgagccagtcaatgcccgcgaagcgaaaataa

SEQ ID NO: 7347 - DNA, 1125 bp, Photorhabdus luminescens
atgactatttctcttaaagatcaaagaataaatctcgcgctcagctttattagtggtgctggaagtataataaccgaaaaaccagaaccgactatggttgcggaaaacattcaagcatcattggaaaagagtaaagtaactgccaatagattctctattatttgggggcccgctgtttttcgtgttgataatggaaaaaacagtaaagataataaggacgaccacgttttattcattgtaaaaaatcgcaaaattccccatgattatcgcatcgttatccgaggatcatggtctgatgttaactggcaggttgaaaactttgctgtacacgaaaccgtaaattggtcactttgggatcaaaatatcccggaagagtttaaagacgctaagatctcttatggaactcacatagcattagactatattgttaatcaagtaaaaagtaacaatattcctggtcatggagaatcacttattgacgcaattaataaaattgcttcggaaaaaggcatacataatattaccattaccgggcacagtttaggtggtattctcgcctctacccttggattatatttaaaacgcttataccttaataaagggaataacaatattcgtattcatgtttgttcttttgctaacccaaataccggtaatgacgtttttgcctcttacattaaatctgttttcaaccacacgtcagcaactagctataagagccattttttaaggatatataatcgtaaagatgttatttccctcatttggaatctggatggattagcaaaaatcccaactatctatgaaccattaattaaattagatgagaaactaattgacagatttaaaaagattgttcttctcgtgcaagataaaggttacaccaaactcacaccagatttaccttttacagcacctattgcagaactggatctcaataagcaagttgtttttcaacatattaaagcctatgccaaccaatatggcatgaatttagtggaggttaatgacggtactcaaccacctattgatgatcttgtggttattaatagtaatctatctcaagatatcgtcgcttatttcttacggatatctctgcctgataacaatattaatatctcataa

SEQ ID NO: 7348 - DNA, 1119 bp, Photorhabdus luminescens
atgactatttctcgtgaagatcaaaaaataaatctcgcgctcagcttcgttattaactctggaggaatcaaaactagcaaatcagaaccgagcattgtttcggaaaatatccacagatcattagaaaacagtaaagcaacagcaaataaattcactatcatctggggccccgcggtgtttcgcgttgacgacgttaatgtgaaaaaaagcgttatagacaaaaaggacgatcatgttctattcattgcgcaaaatcgccatgatccaaatgactaccgcgtggttattcggggatcatggtccgatattaactggcttaatgaagatattattgtctgtaaaactcaagattgggcacgatgggattcaagatcacctgaaaatgccaagatagcctacggaactgacatggcattaggctatattattaatcaaatgaaaagcaacaatcctccgggttatggagaatcgcttattgatgcgatcgataaaattgccctgaaagaagggatacaaaatattactatcacaggacacagtttgggtggtgtactatcttctaccattggtttatatctaaagagacgatatcttgacaaaggaaacaataatattcggattaatgtttgtgcttttgcaggcccaactgcgggtaatgatgctttcgcatcctactccgaatctattttcaatgacatatcagtagccggttataaaagtcatttcctgagaattcataatagtatagatgtggttcccctagcctggcatataaaaggtttggaggaagttaaagctatctatcccgtgttaactgtcacaattaatggtcttatcctttctgtccttgataagaattacacgcaaattttcccagatttccctattcattcacagattccaatctcaccaataacatcgtttgacaatttactggctaatattggcaatcaacatactcatgcctataccaaagagtatgatatgagtttcatcaccattgatgataattcaaatataccgactgattacgatattgttgtagttaatgatagcctatccgaaagtattattgatctcttcaagtttctaaccaaagataaaatcaatattacataa

SEQ ID NO: 7349 - DNA, 1131 bp, Photorhabdus luminescens
atggttatatcttgtgaagatcaaaaattaaatctcgcgttaagccttattattaactctggagaaattaacggcgaaccagacgaaatagaaaccattaaatctgatattaaaaaatcacttaacagcagtaagacaacggcaaataaattctctatctgttggggaccggaggtgttcaatattaaggaaaaacaccatgacaaaaaatatgatcacgttgtcatgattgtgaaaaataaaaataatccaaatgattatcgccttgttattcgaggaacctggtctaagattaatgcgattgatgaagatctctgtgtatttaaaactgtagactggtcaaagtgggacacagatatccctcaagaatttaaaggcgctaagatctcccacggaacagacttagcattaaacacgcttattaatggcaaacctattgataaggacaaacctaataatgaggataccgactcactatcgctaatcgaggctcttcaacaaattatcgcagaagaagggaaagataagatactgaatattaccgtcacggggcatagtttgggtggtttactcgcttctactattggtttatatcttaaaaagcgctacatcaacaacaacaatatacgtattcacgcttgctccttcgcaggcccaactgccggcaatgatattttcgcctcctattctgacgctgtttttaaaggaacattaagccctaacgtttatgaaagtcattttctgagaattcataataaccatgatatcgttcccttagcatgggctatcaaagacttgaataaaattcaggatatctatccacatatagaaataaaattacttgttgatgctgttattctttttgtcctcgataaaaattacacccagctctttccagattgctcttttactattacaaagactctaggcaccattgacaacttatctaaaatgataggttatcaacatatcgatgcatatcccgaaggctatggcatgagtttcattcgaactgagaatgctccagtgacgccgaatgatcacgatatcgttgtggttaatgatagcctatccgaaaggattattgatctcttcgagtctctaaccaaaggtaaaatcgatattacataa

SEQ ID NO: 7350 - DNA, 1119 bp, Photorhabdus luminescens
ttggaaacaaaaatgacaatttctcttgaagatcaaaaaataaatcttgcgttaggctttattattaactcgggaagtataataacgaatcaaccagaaccggctatcgtttcagaaaatattcaaaaatcattagcaaatagtaaagcgacagcaaatagattctctatcatttggggacctgctgtttttcgtgtcggtagtgttaataataaaacaagcgttacagataaaaaagatgatcacgttttattcattgtaaaagatctcaaaaatccaaatgattatcgaatcgttattcgtggttcatggtccatgacgaactggtttgatgagaatttcaatgtaggcacaactgaaaactggtcaatttgggattcaaaagcccccaaagacgctaaaatttcaaaaggaacccatataactttagactatgttatcaaccaaataaagagcaataaccctcccggttatggagaatcattgattgaggcaattgataaaattgctctggaagaaggagtacataatattactcttacgggacatagtttaggcggtgtaatggcctctacgcttggtctgtatttaaagagacgttatattgataaaggaaacaataatattcgtattcatatttcctcctttgctgccccaactgccggtaatgatgtttttgcatcctatagtgaatctgtttttaatggaacattactatctagctatgaaagtcattttctccgggtccataatcgtaaagatatcgttaccctagcctggagcgtaaaaggattagaagaaatcaaggttctctatccaatatcaactttaattgttaacggttttatttcagtcgttaaagataagaattacactcaacttacgcctgatttaccttttactgcacctgatttaaaaccttctacaggtttaattgaaaaactcgtacttcaacatattgatgcttatgccaaagagtacggcatgagttttattgtagttaatgatcgtgctaatccaccaactgattatgatattgttgtcattaacgatggtcaatctcgcaatattagaaaacttttctcatctattattcaagatgaagataatatccaataa

SEQ ID NO: 7351 - DNA, 1059 bp, Photorhabdus luminescens
atgaagaaaatagcaaattatattcaagtagggaaatataaatcaggtgggatttttggagttggttcgaaacaacaaattatagaaaattatttaaaatggaagaatttagttaaggtttctagccttttgaagttaccgactcacgaaaaagaaatcacagaaacaattaaatcaaatttacccgagatatgtgataatgaaataaaagaaataatctcattcttagatgaaaaccatgctctgatggattttaatgaatacaatcaaaatgacagatatagtaggaactatttattttatagatatgcaggggcaatacctagtttagttcaagatagaataaagaaatcaacagttactataattggatgtggtgggattggaaaccatatatcatatctgctgtctacatcaggggtaggaaaaattacacttattgatgatgacacaatagagctaagcaacttaacaagacaagttcttttttcacaaaatgatatagggagaaaaaaaacagaagttttagagagagaattaaataaaaggaattctgaaacaaatatagaaacaattaatatgttcatatcatcaattaatgatttatataaaatacctcgttctgatttattcatagtttcagccgaccacccgtttgaattaattaactggattaatgaattctgtgttaaagaacgacaagcatatataaacattggttatattaatgatatctccgttattggaccattttatataccaaataaaacatcctgcataaaatgtcaaaacattatgccagagtatcacccaaaagatgacattttagagcatatagaaaatgtaaacaaagactttaaagcagcaacattccctagcgttaatggtgtcgcagcatcttatgcttttggggatattatgaaataccttggaagctttggtaacattctcagtactaataaaagaatcggaatacactcactaagcataaaaattgaagaacaatcaatacataaaaatgataagtgtgacgtatgctctcaaaaacaaaaattataa

SEQ ID NO: 7352 - DNA, 1146 bp, Photorhabdus luminescens
atgcggatgttagtgggtgcaacatctacaatatttatcttaaatcatggtcttactctagttgatattggattgatgaagactatccaatcatttatatattttttatttgatattccatcatcatatctagctgacaaatttggtaggaaattcgctattattttatcgaccacttttggtggtgtatggctaataataacgggcattgcagattcaaaatatttattttatatcgcagaaatatttaattcaatatccttaactatattaggaggggttttctattcatacctaatagataactcattaaacgataatgacacccacaaaatattgggagaaagcaataaattacaatttctattcatggctatattctcaataataggatctctaataactgattttgatgacagattagtatggctaatagcaggctctggatgcattattctatctgtaagcctttcatggttcctaccaaaatcaattactaaaaatagacaaccaaacttatcattccttaaagaaataaaaacatcaatagcaatgctgaaagataataaaaattatcttttcataacatctatttctctatcatcctctctgctatatttccaaattatcctccaatattggcaaccattaataaattacatcatagaagagcttggtgtcagcatctttttcgggattgtattttctgcaattttattatctcaatcaatatcaggatggataatctcaaaaaatgaagacaacaacaaaaaccatctttatagtatagtaatcctattggtatgtagcttaacgtgcatttatggtgtatatgaaaagaaccatataaccaccatatcgacgattattatgtttggagcaaaccaagtaatgacaacatcattaagatccaactaccaccaaataataccatcagaattaagatcaacatttgactcattcatatctacaattacaaggctgatagcagtaatagtgataccgttaatcgcgttaatcactgagaattttggatggatatatttccctatattgatatcattaattatttcaattaacatcctttgctacttctttataaaaaaacatcacaaaaggaaaccaacatggaaccccaaaagttag

SEQ ID NO: 7353 - DNA, 543 bp, Photorhabdus luminescens
atggaaccccaaaagttagaaaccagaagattaatattacatcctttagaaagtaaggattatatacaaattcaaaagatctttcctcagtgggaaattgttcgttatcttgtagcaagcaccccgtggccctacccagatgatggtgccctggaatatataaataagatcgcgctaccatcaatggcaaaaggaaatgcatggttttggactataagaaggagggatgaaccatcaataataataggaatgatatcgctatatgatcaagaaaataataatagaggtttctggctagacccacaatggcaccggaacggatttatgactgaggcggtccaagtcgttactgatttttggtttaataccctaaatcgcaatgtactcagagcgcctaaatccagcgacaatattgcctcaaagaaaatatcaattaaaagtggtatgcgattaataagactagaaaatagagactttgttagcggaagaatgccttcggaaacatgggaaataactcgtgatgagtggaatagaaataactaa

SEQ ID NO: 7354 - DNA, 933 bp, Photorhabdus luminescens
atgcgggttttactggctccgatggaaggtgtgctggactctttggttagggaacttctgagtgaaatcaatgagtacgatttgtgcattacggaatttttacgggttgtcgatagcctgttgccggtaaaatctttttatcgactttgtcctgaattacgtaaccaaagccggacaccatccggcacattggtacggattcagcttttgggtcaatatccacagtggctggcggaaaatgcggcacgagcgattgaattaggatcctatggggttgatttaaattgcggttgcccgtcaaaaacggtcaatggtagcggtggcggagcaacgttgctaaaagatcctgaactgatttatcagggagcgaaagcgatacgtgaagcggtacctgctcatttgcctgtgacggttaaggttcgcttgggttgggatagcggtgatcggcaatttgaaattgccgatgcggtacaacaggcgggtgcgacggaaatgacagttcatgggcgaaccaaagagcatggttaccgagcggagcgtattaactggcaagcgattggtgaaattcgtcaacgtctctctattccggttatcgctaacggtgaaatttgggattggcaaagtgcgcagaattgccagagtgtgacaggctgcgatgcggtcatgattgggcggggtgcgcttcacgttcctaatttgagccgagtggtgaaatataacgaaccaaaaatgtgctggcaggacgttgttcaactattgcaaaaatatatccgattggaaaagcagggtgataccgggcaatatcatgttgctcggattaaacagtggcttggttatttgcgtaaagaatatgaagaagcaacaatgctgtttgaagagataagaaagttaaaaacatctgctgatatagcgcatgtgatctctttggtatga

SEQ ID NO: 7355 - DNA, 1305 bp, Photorhabdus luminescens
ctggagcatttcttatttatgaatttcaaatcacttggcttaagtgctgatattttgcgtgccgttgaagaacagggttattcagcgccgacaccaatccaacaacaggcaattcctgttgtattagcaggtaaagatttattagcgagtgctcaaacaggcacaggtaaaaccgcaggttttaccttacccatgctgcaacggttaaatgattcccctattcagatgaaagggcgccggccagtcagagcattaatcctgactccaactcgtgaattggctgctcaagtgggtgaaaatgtccgcgactacagtaaatacctcagactgcgctctctggttgtttttggcggtgtcagtattaaccctcagatgatgaaattgcgtgggggtgtggatattttagtcgcaacaccggggcggttactggatcttgaacatcaaaatgcggttgatttatcccgggtagaaattttggtattggatgaagctgaccggatgctggatatggggtttattcatgatattcgtcgagtgctgaataaattaccaccgaaacggcaaaatttactgttttccgcgactttctctgacgatatcaaaagcttagccagtaagttattgcgtgatcccgtcagtgttgaagttgcacgtcgtaactctgcttctgaacagattgaacagcttgttcactttgtcgataaaaagcgtaaaggtgagctgctctctttcttgatcggcagccgtaactggcagcaagttctggtatttacccgaaccaaacatggcgcgaaccgtttggcagaacagttaaataaagatggtgtaacggcttcggctattcatggtaataaaagtcagggggcgagaacccgtgcactggctgattttaaagatggccggatcagagtgctggtagcgacagatattgcggcccgtggtctggacattgatcaactgccttatgtggtgaattttgaattgcctaatgtcgctgaagattatgtccaccgtattggtcgtactggccgagcagatgcaacagggcaggcactttctctggtctgtgttgatgagcataagctgttgaaagatattgagcgtttgttaaaacgggagattccccgtatggcaattcccggttatgagccagatccaacgatcaaggctgaacctatccaaaacggtcgtcaggcacgtggcgataatcggcagaaaaatagccatcgccgttctggggcaccttcgcgtcagcgtagcagcagtcatgatgtatcccataaatcgcctaacgtcagaggttaa

SEQ ID NO: 7356 - DNA, 693 bp, Photorhabdus luminescens
atgtcgatgtcagtcaacaacacccaaaccgccagaggcgaacaagccaaacaacagctactcgaagcagcccttgaaattttcggtaaatcaggactgaccggtgcaacgactagggaaattgcattacatgctcaacaaaacattgccgccatagcttattattttggctctaaagaggggctttatcaggcagttgcccagcatattactgacacaattaagactgagttcacgcatctttttaaggaaattgatgattttttttcatcatcagccccgtactcagcagaaaatatattgaggatgattcatgaaggattccttggcattaaccgcctgatgattgaaaaagagagtattaatatcagccggataatggccagagaacaacttgcaccaacggatgcttataccctaatccataagcaagcacttgtacctcttcacagcagattaaataaactgattgccagctatatcgatgccgatgaacatcagctttctaccatgctacacactcatgctttaatgggagaagttctcactttccgcatggcgagggaaacgttattacgtcagacaggctggaataatatcgggcccgaagaatataaattgattgatcagatccttatccagcatatcgatttattactgaatggactgaaaaaacataatctgaataaataa

SEQ ID NO: 7357 - DNA, 993 bp, Photorhabdus luminescens
atgtacaacaaaaaactcactctggcaatattggtgaccgcaattattcttagtgccattttaggcagttactattatcaaggtaaaagtgataaaactttgaccctctatggcaatgtagatatacgtactgttaatcttagtttccgggttggtggtaaactcgctagtctacaagttgatgaaggcgataccattgcggccaatcaagtcatcggccaactggataatgggccatttactaacgccctcaataaagcaaaagccactcgtgatagcactaaagcacgtttagccatgatggaagagggttatcgcacggaagaaattgcccaagtccgttcggaagtggcacaacgcgaggctgcctggcatttcgctaatagtttcttcaaacgccagcaaggtttgtggcaaagcaaagttatttcggctaacgaattagatgatgctaaaacgaatcacaatcaagcattagcggctttacaagccgctaaagataaactgaaccagttcgaaaccggttatcgtaaagaagaaattgcagaagctaaaggccagcttgctcaagccgaagcggctgttgctcaggctgaattggacttacaagatactcaactgacttccccctcatccggtactatcctgacccgcgccattgaaccaggcactatgctgtcagccggcaatacggtgtttaccctttctctgactgatccggtttgggtaagagcctatatcgctgaaagccatctcggacaggcaacgccagggcgtgaaattttactttataccgacagccgcaaagataaaccttatcacggcaaaattggctttgtttcacccaccgccgaatttacaccaaagaatgtagagacccccgatctacgtactgatctagtctatcggttgcgcattattgtcaccgacccggatgatgccctgcgtcaaggtatgccagttactctgcatttttctgattcagataaataa

SEQ ID NO: 7358 - DNA, 1740 bp, Photorhabdus luminescens
atgagcagctctgcatatacgataaggttagagaaagtcgaaaaaacttttcccagcctgaataatcctgcggtatccagcctgaccgcagagatctacggtggctccgttaccggccttgtcgggccggatggagcaggaaaaactacgctgatacgcatgttagcgggtttactgaaacccgatagcggttctattgagataatggggcttgacccgataaaagatggcgtacaagtgcgttttgaactgggctatatgccacagaaatttggcctgtatgaagatttaaccgtattagagaacctgaatctatatgcagatctgcgtggcgtactgggtgacgagcgtaaaaaaacctatgagcaactccttacgtttactgatctgacccgttttaccgggcgactggcgggcaaactttcaggcggcatgaagcaaaaactggggcttgcctgtactctgcttggcaaacccaaagttctgctgctggacgaacccggcgttggagttgacccgatagcccgccgcgaactctggcggatggttcacgaactggcagatgatgggatgctaatcctttggagtacttcttatctggatgaagctgaacagtgtcgtgatgtcctgttacttaatcaaggaaaactgctctacagcggacaaccacaaaaactgacccaaaagatgtccgggcgttcttttctgcttggtgccaaacaggattcccgtagaaaaatgctgcaacacgctcttaccttgccacaagtaaccgatggcgtgattcaggggaaatatgttcgtcttattctcaaacctgatgcctctccgcaagaattacttaatcagcttgaactgccagatgctgaaatcattaaagccgccccccgttttgaagatgcttttatcgatttactcggtgggggttccacccgccattcggaactggcagagatcatgccacgaattgctgctaacccggcagaaacagttattgaagcacaggatttaactaagaaatttggcgattttgctgccactgaccatgttgattttcaggtgaaacgtggagaaatctttggtctgcttggcccgaacggtgccggtaaatccaccacgtttaaaatgatgtgcgggctcatggtgccgactggcggtaaggcgctggtattgggaatggatctaaaaaccagctctgggaaagcccgccaacatttgggttatatggcgcagaaattttctctgtatggcaacctgacggttgaacagaacctgaaattcttttccggcatttacggcctgcaagggcgcaaacaaaaagaaaaaattgatggcatgatcgacgctttcaatctcaaatctgttttacatcaaaccaccgaccaattgcctctgggatataaacagcgtcttgccctttcctgcgcactgatgcatgagccagatattttgttcctggacgagccaacttcgggggttgatccgcagatacgacgggaattctggctacatatcaacggcatggtagataaaggcgttaccgttatggtgaccacccactttatggatgaagcagaatattgtgaccgaatagggttggtattccgcggtaaattaattgccgccggaacgcctgatgacttgaaacaattggttgctactgatgaaaatcctgacccatcaatggaacaggcatttattgatctggtcgttaattatgatgaggagctacaacaatga

SEQ ID NO: 7359 - DNA, 1161 bp, Photorhabdus luminescens
atgagtagcccaacgcaacatgctccacagcaagctgtccgcttctcttggtggcgattgaaagcactttgtgtaaaagagacaaaacagattttacgtgatcccaccagcggattaatttctattgtcattccattgattctgctgtttatctttggttacggtattaatctcgactccagtaccgtccgccttggtattctggtagagcagcaaagtgaagatgctcgtgaattaatacaggcttttgccggttcaccctatattgaacccaaaatcagcgataatcgtcagcaattaattaatatgatgcaatcaggagaaatacgtggactggttgtcattcctgttaatttcgatgcgcaacttgctcgtcctgatggtaaagcacaaattcaagtcattactgacggcagtgaacccaatacagcaagttttgtacaaaattatgctaaaggagtgtggcagatttggctacaacaaagagggcaagatcaggggaacgctgttaatccgttaattgatatgcaggttcgttattggttcaatccagcaacaattagccaacatttcatcattcccggcgcaataaccattatcatcaccgtggttggtgccattctgacatcattggtggttgcccgtgaatgggaacgcggtacgatggaagccctgctttcgactcaaattacccgcaccgaattactgctttctaaactcttgccttatcaagtgcttggatcattctccatgctgctctgtatgctggtggcaatatttgtgctggatgtcccctaccgaggctcgttatggatattgtctgcaatcactagcctttacttggctacggcccttggtattgggcttttgatctctacggtgacacgcaaccaatttaatgctgcaatgatagcgctgaatgtcgcttttctgcctgcgattatgctttccggcttcatctttgaaataaacagcatgcctgcctttattcaggtagtgacctatttcatcccggctcgttattttgtcagtagtttgcatactctctttctggctggaaatatcagtacggtactggtgataaatctattattactgatcgcctccgctattgtgtttattggcctgacagcatggaaaacccagcggcgtctggattaa

SEQ ID NO: 7360 - DNA, 1107 bp, Photorhabdus luminescens
atgttttatcgtctttacactctgattattaaagaattgcaatctctactcagagatccgcaaacacgggctatcttagttatgccggttatcttccagatgatcttatttcctttatccgcaacccttgatgtgactaatgcaactattgctatttttgatgaagacaaaggcaaagcctctattgaactcacccaacggttggcaaaatcaaaagcatttcctgacgtgctattactgaaccattcacaagaaatacaaccggtaatcgatcaccaaaaagccttattactggtacggttcccacaagatttcagtgctaaaattgccagtcatgacccggtttccctccaagtattgctggatgggcgcaactctaacagcgctcaaattgccgcgggctatatccaagaaattgtccttaactatcaacaggagctgatgggtaacctgccgaaagccaataatagcgagttggtgatccgcaactggtataaccctaacttggattataaatggtttgtcgtgccctctttggtggcactgattactacggttgggatattaacagtcacggcactgtcaattgcgcgcgaaagggaacagggaacgctggatcaattactcgtttcacccatgaccacctggcagattttcattggcaaagccgttcctgcggtgattgtcgctacctttcaagcaactttagtgctcgccattggcatattctgctatcaaattcccttttctggttcactggcgctgttttactgcgctatgctgatctacagtttatcgctagtgggatttggcctgttaatctcttccctttgctacactcagcaacaggcgtttattggcgtatttgtctttatcatgcccgctatcttaatctccggttatatttctccggttgaaaatatgcccggatggttacaagacatcacctggattaatcctatctggcactttaacgacatcaccaagcaaatttatctcaaagatgccgatttcacggttatctggagaagtctatggcctcttttagccattactgccacaaccggtaatcttgcctattggttatttagacggaagattgcttaa

SEQ ID NO: 7361 - DNA, 1155 bp, Photorhabdus luminescens
atgaaaaaaaatttattattaataccatgtatatccatttttatagcccaacttggtatgaccatgtatctccctgctgtacctgaaatcgcgtcagatttacacttaaatataaaccatacttcatggatgctttcatcatacttaattggaatggcttcattaatgctggtgtggggcggaatatgtgatatttgggggggaaagaaatcaatgttttttgctcttattatattatttgcatgtagtgttggtgtgacgctatcaactaatatttattctttgattttaattaggttctttcagggtgttggcgctggtggagtttctgttattgcccgatcaattttgcgtgataattttagaggagatgagttggcaaaagcattatcttacttatctatagcatttgtcatttctttgggcattgggcaatcgataggttctgttatactgactattctgggatggaaatctatattttatgttttggcttttggagcattaatctcaatgctgttgttatcagcaaaaaaatataatcatagtaaaaatgaaaaaaattcagtatataaatatatcaatttgttaaaaaataaatattatatatatgcggttttcattggtggaattggctatggtgcaattatatcattcaatattatggctccattgatttttaagtttaattttggttggtcggaaagccaatatggtattataggcattccaatcagtatgtcttatttacttggagcgataattttaaatcgatacatagtatattgcggtagagctaatctcatgaaaataggaataattttaattcttattggtggtgtggttatgtttgttgggagtattgtggggggcattctggagataatactatatagtgcttatttcttagttgttcttggacaagcgataaactacccgatcagtttatctattgcctcagataaaacacctgtaacaggttcttctgtgatggcattaattggttttattcatcaaatcatagccgcgtttgttggtggtataaccggtcttttttcatataaagaatcttatattctgcctttaacgataatagtgttatcatcatttttactatttctgttttataaagttaataaaaaatctgagaaatga

SEQ ID NO: 7362 - DNA, 1347 bp, Photorhabdus luminescens
ttgattcatggtaatataaattgctacaaagggaaggtttattatataggagccatgattcacgatattcttacaagagaattcaatggggtttattatatgaacaataataaatttataaattacaagaaaattattaacatctcagaaagtgattgggaaaatgcagaaaataataagatatcaggtttagatgtaaaggtatctggtataaattatatgacagaccaatatggccgagagtttcatcatttctgtactacatcatatcttggtctggattatcataaagatatattaaatggtgctatagacgcgataaaagaaactgggtcacttcgtatacctaactcgaagaataggtgtaaactttccatcttagaagattatgaacgggaattgtcagcgttatttaatgccgaatgtttaagtacattatcatgtagttctgcaagttcaggtatattgcctttgcttgcatcgggtgttttcactggaaacgtaaaccctgtgatggtatttgacaaatattctcattattctatgaatcatttaaaaccatcatgtgctgatgaaacagaggtgataacagccccacataacgatatgggttatcttgaagatatatgtaaaatacataagaaagtggtttatgtagcagatggtgtatatagtatgggaggtgttgctgacataaattcaataatgtatttaaaagagcgatatgggttattcacctacttggatgattcacatgctttatctgctataggagataaaggctgtggatatgtaaggtcacatattaaggagctggatgaggactccattatcgttgcttctttggctaaatcatttgcagccagtggtggtttagtcatgttgggtagtcgtaatcaaaagaaactcattcatcgctatggtggcccgagtaattggtctcagagcttaaattcagcggcaataggagctggaagagcttcaattaggatacattacaagcctgagcttaaagagcttcaggaaaaattgaaaaaaaatatacaattatttgacagtttaataactacagatcaatttggcagttcgactgcaatacgattaattcaatgtggtgatgcttcgttggcaaataaaacggctgcatttctagctgaaaatggcttttttacatcgtcagtttttttccctgtcgttcctcaagggcgggctgcaattagagtgactctcagagctgatatggatagtgatttaattaaacgattttgttatttaattactgatttcttaagagagtccttatatcaagagagtgccactttaaactccctaataagtgtagcgtaa

SEQ ID NO: 7363 - DNA, 711 bp, Photorhabdus luminescens
atggatcgatatccacgctctaatggttcgataatccagcaagctggaaccggcctacaaacttatatggcccaggtttatggttggatgacttgtggtctgttgttaaccgcgtttgtggcttggtatgtgtcacaaaatcagaatgttgttttatatattttctcaaattcaatactattttatgggttgattattgctcagtttgggttggttttcgtcctctctggcatgattaaccgcataggagcttcgttagccacagggttgtttatgctctattcagctctgaccggcctgacgctttccagtattttcgttatctatactattggctccgttgcgagcacttttgtcgtgacggccgggatgtttggtgcgctgagtttttatggctataccaccaaacgtagcctgagtggccttggtagcttcttatttatggggctgatcggcatcattttggcttctctgattaacttatggttaaagagtgaagcgttgacgtgggcggtaacctacattggtgtcgttatttttgcgggcttaaccgcttacgacactcagaagctgaaagagatgggtgaagatttggatgtgaatgacaaagagaatttgcgtaaattttctattgttggtgcattgacgctgtatttagacttcatcaatatgttcttgatgttattgcgtatttttggcgatcgccgttaa

SEQ ID NO: 7364 - DNA, 453 bp, Photorhabdus luminescens
atggaaaacacccgcattttcgttgggccgaagaatttcaagctaggggatgaatatcaatggcttgctcaatgtgatgaagatggtgctattgtcactttcaccggcaaagtccgcaatcataatttgggagataatgtcggggcgctgagattggaacactatccgggaatgacggaaaaaacattacggcgtattgtcaccgaagcacgcagtcgctggccgttgcagcgaatcagtgttgtccatcgggttggtacattgtatccgggtgatgagatcgtgtttgtgggtgtgaccggtgctcatcgtcatatggcttttgaagcggctgaatttattatggattttttgaaaacgcaggcacctttctggaaaaaggagttcttgcctgatggtgaacgttgggttgaatcccgagagagcgatcaggaagccgtgaaacgctggtaa

SEQ ID NO: 7365 - DNA, 246 bp, Photorhabdus luminescens
atgattaaagtcctgttttttgctcaggtacgtgagctggtaggtactgattcactggatctcgataatcgttacacaaccgttgacagtttgagaatggcgttaatatcaaagggagaacgttgggctttggcattggaaaatggaaaattgttgtcagcggtaaaccaatctctggttcatggcgggcaccgattacaggatggcgatgaagtggcctttttcccgccggtgactgggggataa

SEQ ID NO: 7366 - DNA, 480 bp, Photorhabdus luminescens
atgtctcaattaacccacatcaattctaccggtgaagcgcatatggttgatgtttctgctaaagctgaaacatcacgcgaggcacgggcagaagcgtttgttggaatgaagccggaaacactggcgatgattattgaaggtcgccatcacaaaggtgatgtatttgccaccgcgaggattgcgggtatccaagcagccaagcgcacatgggaattaattccgctgtgtcatccattactgctcactaaagtagaagtccagttggaagctcagacaaaatataaccgggtcagaattgaatcctgttgtcgtctgactgggaaaaccggtgttgaaatggaggccctgacagcggcgtcagtcgcggctttgacaatttacgatatgtgtaaagcggtacagaaagatatggtcattgggccagtgcgtttactggagaaaatcggtggtaaattaggccattttaaggtggagcaatga

SEQ ID NO: 7367 - DNA, 984 bp, Photorhabdus luminescens
atggtgaaacaactcacagatgcttttgcccgcaaattttactatttgcggctatcaatcaccgatgtatgtaattttcggtgcacttattgtttgccggatggttataaaccccgtggacatcactcctttttgacattacccgaaatccgtcttgttggccgggcatttgccgatctgggtaccgagaaaatccgtttgacggggggtgaaccgaccatgcgccgcgatttcaccgatattatttccgtcatacgtgaaaataagttgattaaaaccctcgcggtaaccactaacggttatcgaatggagcgagatattgctaagtggaaagaggcgggtttaaccgcagtgaatgtcagtatggattcgcttgatccccgccaatttcatgcgattaccgggcaggacaaattttttcaggtgatgcgtggtattgatgcagcatttgcggtgggttttagtaaagtgaaagtcaacgtggtgctgatgaaaaatgttaacgatatcagcctgtcggctttcctgcattggataaaagatcgtccgattcaactaagatttatcgaattgatggaaacgggtgacggtggtgaaatgtttcgccaataccacatttcgggggaaattatccgggaacgcctgctgctcgatggctggcatttgcttcaacgttcacgcagtgatggccctgcacaggtttttagccatcctgattatcagggagaagtgggtttaattatgccttatgagaaaaatttttgtcagagttgtaatcgattacgtgtttcttcaataggtcatcttcatttatgcctgtttggtgaacaggggataccactgcgtgacttattggcgagtgaaaaacaactcgatgatctgaaattgcgtattcaggatggattgcggcataaacgggaaacccattttcttcatcaaggtgacagcggtatcacgccaaatctttccgtcatcggcggttaa

SEQ ID NO: 7368 - DNA, 108 bp, Photorhabdus luminescens
atgggagacgtgggcatttctgcctcacatcctggtgactcagtggtcacggccaaaacatcatatcgctgtgtaaaaagtgacttagatgcagaggctaggagttaa

SEQ ID NO: 7369 - DNA, 909 bp, Photorhabdus luminescens
atgcgaaaccgcacattagccgatttagatcgggtagttgccttaggcggaggtcatggccttggacgcgttatgtcctctctttcatcactaggctctcgcctaacaggcattgtcaccacgacagataatggcggctcaaccggcaggatccggcgttcagaaggtggtattgcctggggtgatacccgcaattgtttaaatcagcttattaccgaacccagtgtcgcgtcggcaatgttcgaataccgtttcagtggcaatggcgaactggcagggcataatctggggaatctgatgcttaaagcgttagatcatctaagtgtcagaccccttgaggcaattaatttaatccgcagtttgttgaaagttaatgctcatcttattccaatgtctgagcagcccgttgacctgatggcgatagatgatcaaggcaacaccatttatggcgaagttaatgttgatcaattgaattgtattcctcaggagttgatgctttatccacctgcggccgcaacaaaagaggcattggatgctatcactcaagcagatctgattattatcggccctggcagcttcttcaccagtctgatgccattgcttctgcttgaagatctcacccaagcactgcgccgtagcaacgccaatatgatttatatcggtaaccttggcaaagaactcagtgccgcggccgctgaactgacactgaaagataagctggaaataatggaaaacaaaattggcagccggataattgatgcggtaattgttggcccgtgcacaaatatcagcgagcttaacgaccggattattactcagcaaatactcgaagcacaggatgttccctatcgccacgaccgtgaattattgcatcaggcgttagagaataccctgcaaaaccttgggtga

SEQ ID NO: 7370 - DNA, 1014 bp, Photorhabdus luminescens
atgcctatcatagcacctataccccgcaatgaacgacgccagatgaaaaaaattatccagaacacccgagataaagattatgctcgcaggctcatggccatattgatgctgcatcgaggcgagtctgtctctctggtcgccaaaaccctttgcgccagtcgttcttctgtctatcgctggataaactggttgactttatatggtctggaaggactcaaaagcctgcctgtgggcagacccgctgtctggaatttaatcccgctttatcctttactgtcttttttattgcaatattctccccagcaattgggctgcctgcgttctcgctggagtcttgagttttttataattaaaatcaatgaattattaaacataaaattatccatcagtaccttctatcgttacttacataaaatgggtatcgtgtggcgaagggcagccccgacgcttaaattacccgatcccgagtaccatgaaaaaatggcgaaaattaccgaggcattgtcaacgtgttcagaaaaacatcccgttttttatgaagatgaagtcgacatcgagctgaatccaaaaatcggggctgactggtatttaaaagggcaacagaaacgtatagtgacaccaggaaaaaaccaaaaacattattttgcaggttgcctgaatgttcaaacgggaaaagtgacttatgctgacgggttaaataagaattctcagttatttatcaatgtattggaagaacttgaacgccagtattgtcatgctgaaaccctcactttgattttggataattacagtatccataaaagccgacgggtcagagattggctggcttgtcatcctaaatttaatctgttgtttttacctgtttattcaccctggctgaataaaattgagcgtctgtggcaatccttacatgaaacggtgacacgaaatcatggctgtcagtatatgtggcaattgcttgagaaagtgaaaacgtttttaaattcatgtccctacaggaatagcagagaataa

SEQ ID NO: 7371 - DNA, 273 bp, Photorhabdus luminescens
atgcgcagtgtagtggaaagtaaaaaagttatccttaaaggtgataccacaacaaccggaggtgaggttttaaagggttccgatttggtaaatcaacaactatcggttgcctgtaaaggtgacccggtgttttgtcccgcctgtaaacaaactggcgctgttgcggaaggttctaacttgtttaatatacaaggaatacctgtcgcgctggaggggcatcttgttaattgtggttgcccgaccggcgcttgtcgattaaaggtacggtcataa

SEQ ID NO: 7372 - DNA, 1146 bp, Photorhabdus luminescens
atggaaactgtagatgactttgcccagttgaaatcacaactggccgcgtttaccttcctcaatggcgatgggctgaccgtttctcgtcttgggatttctatcaccttgttttttaaacaaggctatactcaggagaaaaaacagcgcattctggcctgctaccgccgctttcgcgaagaatttggtactcatctgcgttttcacagtcatgagctggaaggactaaaaaaatattccccggaaaatattgccaaagtggaagaggccattcttaatcagaaaaagaatcagccctctagttgggtagtcagtgatgctaaaaatatctatgaagcccctcgttatctgatgcgttatctggattctgatgaggatgatggtgacgatgatagctcttacctaagcctgacactgccttgggattatctaaaagaacaagacggcatggctcgttttatggcctggctggattttctgtgtgaacaactcgaaccggacagtggtgactgtggctacagcttggccctacccagagattaccatgactactttcctttagagtaccagctagcgcaacgttacccctccctgcaagtcaattctacggttcatactgcggtattacagtatgaacactccatccgtggcattaattggatcaccctgctgtccaaacgctttgtaaaccgactgggtggagaattctggatacgtcaggtgctgcgcccctaccgggatgtggtgattacttcttaccgtgatggcctgattatccaggccggtcaatacccggacttaacgccactcccgggcagtgtcccggagagttattttgccattaaccaactgatacgtccgatacgggtgatacctcgtgaaggccattcattgcacttctatggtgaagggcattttaattcaacttctaccctggcctggtatgcccgttatgaccggggaccgctgcatgtaaccccgttgagaggtgatcatccggcactggtcagcgggatctggcaaaccgagagcctgccgggcaagcagtacttctttgctcagggggcgatggcttttgatgttgaaggtgcagaaccgggcacaactgcatggcatttaatacgagaaacggaaaatacaacggagtaa

SEQ ID NO: 7373 - DNA, 1146 bp, Photorhabdus luminescens
atggaaactgtagattactttgcccaactgagatcacaactgacctcttttctttttctcaatggcgatggactgactgtttcccgcctgggtctctcgataaccctgttttttaaacagggttatacccaggagaaaaaacagcgcattctggcctgttatcaccgctttcgcgaagagtttggtactcatctgcgttttcacagtcattcactgaaagggttaagcaaatattcaccggaaaatattattaaggtagaggaaggcattctcgccaggaaaaaaaatcagccttgtggttgggtcgtcagtgatgctaaaaacgaagatgaagcgcctcgttatctgatgcgttatctggattctgatgaggatgatggtgacgatagtagcgcctacctgagtctagtgctgccctgggattacctgaaagaacaagaaggcatggctcgttttatggcctggctggattttctgtgtgaacagcttgaacctgactggggagattgtggttactgtctggtcttacccaaagactactatgattattttcccctggagtaccaactggccctgcgctacccttccctgcaagtcaattccactgttcacaccacactggacgattatgcccattccatacgaagcatgaattggatcaccctgctgtccaaacgatttgtaaaccgactgggtggagaatattggatacgctgcacgctggcacgctacccggatgtggtgatcagttcttactccaatggtctgataatccgcgcaggcaaataccctgacttaacgccactaccgggtagtgtcccggagagttattttgccattaaccagttgatacgcccgatacgttttgttccgggagaaggtgattcactgcatttttatggagaaggtcattttgatgatatttccacactggcttggtatgcccgttatgaccggggaccgctgcatgtaacccctttgagaggtgatcatccggcactggtcagcgggatctggcaaaccgagagcctgccgggcaagcagtacttctttgctcagggggcgatggcttttgatgttgaaggtgcagagacaggtacaactatctggcatctgatacgggaagcggcaaatatgtgggaataa

SEQ ID NO: 7374 - DNA, 1206 bp, Photorhabdus luminescens
ctgggcgctattcgctttcttaatcaagtcattatgagtgggttgattaaggttgaggagcttaagcatgacttcctgtggccctataaagcagaagtggtgtttgctatccgagggcctaaagatgtacctctgcccatgctggcgaccagtctggcctctaaacagcgttatagtgataacttaccgcaatccagtaacccatttgcccggccttctgccgacgatgtagaaaaatttggtgttaaacgtatccgtcggcccgatattattttggttaaagacgaagttctccgttggccaggtagaaatgctacttactttgatggctccgtacaccccgataacctaaaaatgttgattgaggtgaaatttccgggggataagcttagtgaggatcaagaaaaagattatatccggattgcgacccgctctcgcttcggggtgatgcgtgtcgacgataaccgcacagaagagcaaaagcagtatgatgaagcatggcgaaaactttatcagcccagttcccaacactataaaaatccgatcccactggccccgctgctgcccggttcgcctcctgatgatgaagctttacccgctcctcccgcagagggtatgccggggactattccgcagccgttgacaaaaaaactcccgctggtcagtacttctccctggtcttttttacccagctatgaagactgggttatcctcgggcaggaggtggctggcctaacagaacaagggttggattatatccgcgacagtacccgcgaactccttgctcaatttggagcatggttaaatcaagctgggaagtgggtgtgtgaagagattattgacccgataagccatcaggccagctatgcgttttcctgggtcagtgcacaaacgggaaaaatcgtgacctggacggagagtgagataaaagcccggtggcagactgtgcaacagggttcggacatcaccctggaagagctaaaaaacattagctggatgcagatattaaaagaggtgggtgaaggaatgctggaaatggtagtgattattgccggtgttgccattgttatccttgtcacccttgccgtcgctgccgcgctgattgcactggtggaaattttagccgctgctgctgcggtaagcgccgctgcattggccaccgtcttggcaatattggcgagtgtgacatttgccaccgcttcataa

SEQ ID NO: 7375 - DNA, 2115 bp, Photorhabdus luminescens
atggatggattagttttcacctgccgaattggcgtactgccccaaaccacctttcaggtagcgcaatttactttacaggaagaactgtcgcagctttatcgcctgacgttaaaggtggtgagctcacgtgatgacattcccctgaatgaacagctgggggacagcgcgtcactgaccattacccgcaatggcgtcaccgaacggaccattaatggcatgataaccggcgctgaacagggtaataccgatggccgcagcactttttatattttcactgtccgccccaaaatgtggttgatgacgcttaatcaggatagccgtattttccatcggaagtctgtaccggaaatcttaacgatcctgcttaaagagcattatattttctttgcccgcgatacgctctataaacgccatgtcgaacgggaatacaccacgcaaaaacgcgaatccgcctatgatttctggtgccggctggcggcggaagagggcattatcttctggtttgaggaagaacagacgttgttctgtgattgccgcctgggcatgcaggcggacatcgatctgacttacaatacgcatcctgaaacggacgagaccgataccacggcgtaccagtggagttatggcgaatacctgtgttcgaatggcacgatccagaaagaccataactttcttaaccccaaatattctcttgagcatcagaagcaatccgacgatagcgggcaccattcggtgtttgaaagttacgggcgtttccagtgggacgaggaaggaaaaccttttacccaactgcggctggaacagttacgaaactacagcaaagtcggcaccgccaaaaccaattgtatccggcttcggccgggcaaaatttttaccctgcaatcccatcccatagaggccatgaacgcccgctggcaggtgatctctgtcacgcatcatgggtggcaacctgtcgcgtcaaacgacggaggcgaagggacaacactgaccaacgaggtcgcctttattcccggaaaccaggactggcggcccccttaccgctacaaacccctggcggacggtgatgaagttgccacggtggtcggggtgggaagcgaagagatttatgtgaacgaacacggcgcgatacggattcatttccactggaaccgttacgataaagcggacgacaacgcgtcttgttgggtacgggtggcacaaggctggaacggcaacggtttcggttttatggcgataccgcgcgtcgggcaggaggtgatcgtcagctatctcaacggcgatatcgaccgtccgattgtgacggggtgtacctataacggcctcaaccgtccgcctcttgatttaccgcgggagaaaacccgtaccacttttaaaacccggactcttggagggcagggatttaatgaactgcgctttgaggataacaaaggaagagaggaagtgtttattcatgctcagcgggatatgaatagccagattctccgggataaaaccacgcagataggccatgaccagcaaacagaagtggcgcataaccgcacggcgataattaaaaacgatgatgatgaagccgtacagggcggccagacgcttgaagtcggtcagaatcaaacggtgactattaaaggtcagcaagccatttccattggtaaaagccatcaattaaacgtcgccgataaccagcaaattaccgtgggtaaacatatcacggtgcactctgaaagcgggcaaatcatcattgggaacgcaggcgggcagatagttattgacccgatgggcaatatccgtatcgaaggggtcagcatcaccatgactgaccatattaccggcaagaaatccgccggtgcgctgtttgactactccgcccgctataccctgctcagtgaacagagcggtaagccgctggcgcatacccgctataccattaccactgctggcggtcagaccctttccggtaaaaccgatgcgcagggcagaacggtgactgtacagagtgaggcggaagaaaatctgcaactgagttcaccggaagcctcaccgaaaccgaagaaaaccttatgcgaagtcggtgataacacgccggtagagtatgtgatggaatttatggaggaataa

SEQ ID NO: 7376 - DNA, 2010 bp, Photorhabdus luminescens
atgagtaaggtgttcaaattacattctgacttccaaccggggggtgatcaaccagaggccatccgtcaattacaagaaggcttagaagatgggcttgcccaccagactttgctaggggtcacggggtcgggtaagacatttactgtcgctaatgtgatagctaatttaaaccgaccaacgatggtacttgctccgaacaagacactggcggctcaactttacagcgaaatgaaggactttttcccagaaaattccgtagagtactttgtttcctattacgattattaccagccggaagcttatgtgccgagttccgatacttttatcgaaaaagatgcttccgtgaacgaacatattgagcaaatgcgcctgtccgcgacaaaagctttgctggagcggcgagatgtgattgtcgttgcgtctgtatcggctatttatggtttgggtgatcctgatagttacctgaaaatgatgctccacctgaccaacggtatgatgattgatcaacgctctattctgcggcgtttagctgaattgcaatatactcgtaatgatcaggcattccagcgagggacatttagggttcgtggtgaagtgattgatatctttccggctgaatctgatgagcatgccctgcgggttgaactatttgatgatgaagtagaacggttatcactgtttgatccgctaacagggcaggttcaatatcatgttccacgatacaccgtttatccgaaaacccactatgttactccgcgtgagcgtattattcaggcaatggaagcgattaaaattgagcttgagcagcggcgtaaggtattgctggcaaatggtaagctgctggaagaacagcgtattacgcagcgtactcaatttgatttggaaatgatgaatgaattgggttattgctccggcattgaaaattattcccgttacctctctggccgcactgaaggggaaccgccgccgacactgtttgattatctccctgctgatggtttgctggtagtggatgaatcgcacgttaccatcccgcaaattggtgggatgtatcgaggggatcgttctcgcaaagagacgctggtggaatatggtttccgtatgccttctgcactggataatcgcccacttcggtttgaagaatttgaagcactggctccacagaccatttatatttcggctacgccgggcaaatatgaattggaaaaatccagtggcgatgtggtggaacaggtggtgcgtcctactggtttgcttgatccggaagtggaggtgcgtcctgtagcgacacaggttgatgacttactgtctgaaatccgtattcgggcggtgaaaaatgaacgggtgctggttaccacgttgactaagcgaatggcagaggacttaacggagtatttggaagaacacggtgagcgggttcgctatttgcattcggatatcgatactgtcgaacgtgtggaaattattcgggatcttcgtttaggtgagtttgatgtattagtgggaattaacttgctgagggaagggctggatatgccagaagtttctctggtggctattcttgatgcggataaagaaggtttcttgcggtctgaacgttcattaattcagacgattgggcgtgctgcccgtaacctgcatggtaaagcgatcctttatggcgataagatcactgattcaatggcaaaagctattggtgaaacggaacgccggcgtgctaaacagcagatatttaatgaaaaacacggtattgttccaaaaggtctgaataagaaaattaatgatattctgcaaattgggcagccagcgggtggtaaaagaaagggcagaggtaaagcggttgccacagcggaaacattcagcaacctgtctgccaaagagctggaaagcaaaatccgcgagctggaagcgaagatgtaccagcatgcgcaggatcttgaattcgaacaggcggctagtgttcgggatcaggttcaggcattgcgtgagcaatttattgccaatttttaa

SEQ ID NO: 7377 - DNA, 615 bp, Photorhabdus luminescens
atgaaaacgtctaatgcacagcgaaaaacaaatatcattaaaaatatagaatatttgatacgtacccgtggagaaaccaagagctctttttccaatcgaacaggattgacccgtaccaccatttataaaatcctggaaggacaagtcaataacgttcaacaatctactgttcttcggatttccgattttttcggtgtctcctgtgaagaaatagaatattatgaccttgaacaattagagcgcctcaatgaaacactttcaaccgaaggcaataaaaatccttcggctatccctatcgttccccaatctgaatttttagccgtttctgagaaaaaaataggtcagcttgttaccgagtatccgctgacctatttctttggtgatgaatcaaacatgttggctcttaaagtcgaatcggcaatagaagatacattcatacccggtgaggtgatcatcataaaacgtccccccgcattagtcaccaatacgccattattgtattacgctaaggaaattgggttctttatccggcaagagaaaaatgatgacagcctcgataggaaaccctacagaaatgctcattttttgggctatattgtaggagaaagactataa

SEQ ID NO: 7378 - DNA, 894 bp, Photorhabdus luminescens
atgacagcaaatcaaaagtttaagttactgggattttcaaggtatggtaaattatcggcaaatgtcatggtgctagcgacaggtaagaccattactatggggttaaaagagctcgttgacagtgatatttcagaagatctgagcagacatgagctcagtacgatataccggaaactatacagccacagtaatatcgtaaccgcttatgaacttggggaccgtcatgaacgttcatggcaagcctatttactcattagcatcgcactcagtgttatctatattttctctaccatatgtggtgtgaaacccattcatatcccgatccttaatattgtcacgcctcctggggtttttatttaccctataactttcttactggtcgatattctaaacgaattctatggattacgtctggcaagaagaacgattattatctcttttgctgcgaacttattatttgttctagggctttggggaaccgcactgatgccgggtgttcctggatgggaatttggtgcgacttataatggaatagtgaatagtatcgtatctgtattactggcatcatctcttgcttattttatctctgagaatataaactcgtatctcctctgcaaaataaaatctctcacaaactcaaagtatcttttcctgcgagtaataaccagtactgttatcgcttcagcattcgacagtataatattctgttcaatcgctttctatggtgttctcggcatagacatcataaaagaaatgattatcgcccagttcctcattaaagtggcttattctatcctgggtgtaggccctatttatctggtaaggaagatattcagaaattatataaatcgaccagaagatacaccagtgaataaaaaactcgctgaagtataa

SEQ ID NO: 7379 - DNA, 681 bp, Photorhabdus luminescens
gtgactaagcgctggtttttgacgggtacagataccgaagtggggaaaacagttgtaagttgcgctttgttacaagcggcaactaaagcaggatataaaacagcaggttataaacccgttgcttctggtagtgaaataacaccggcaggtgttcgtaatgctgatgcagtggcattgctggcaaatagttctgtatctttgcaatatgaagaagtgaatccgttagtatttgttgaagcaacatcaccccatattgccagtgatgattcgaatcaacctattgattttactgttatgtctatggggttacatcagttagaaaagaaagcagactgggttttagttgagggcgcgggtggttggtatacccctttatcagaatcggtgacttttgctgactgggtggttaaagagcaactgccggttattttggcagtgggagtgaagttgggctgtattaatcatgcgatacttaccgtggaggctattataggttcaggattacattttgcaggctggatagctaatgaggttgaacccgcaggcaaacgtcagcaagaatatttggcgacattagagcggatgttaccggctcctttattaggtacgattcctcatttaacgcaagaatattttaatcatttaggggaatatatagatttaaaattactgaataattaa

SEQ ID NO: 7380 - DNA, 768 bp, Photorhabdus luminescens
atgggttccgtagctgaatttgccaataaacaggcgattgcgggagcgtttggacgagcggccgccaattatgatgtggtagcgaaattacagcagcaaaccggtgaattcctcatgcaacaagttggtgagcattccggcaaattagtattggatgcaggttgcggtaccggtttttttagtcaccgctggcgacaacaggggaagcaggttattgggctggatttggcatcaggcatgttagctcatgcccgtaagcaattggcggctgactattatttacaagcggatattgaacatttagggcttgctgacaacagtgttgatatctgtttcagtaatctggttgttcagtggtgtgatgatttatccagtgctttaagagaactttatcgggtaacccgtcctggtggattaattctattttccaccttagctaaaggttcattgtatgaattgaagcaagcttggagtgtggttgataactaccagcatattaatcagttcctgccgcaacagacaattaaagatgcctgtcaagggttccggcattgtcttattagtcaggtttatcgccagcaatattctcatatattgccgctattgggttctctgaaagggattggtgcgactcaccttcatgatgggcgacagcaaggactgatgacgcgtggacgactgattgctctggaacaggcttatccacgagaaaacgaacagttacctcttagctatcaggtggtttttggagtgattcatcgtgactaa

SEQ ID NO: 7381 - DNA, 1152 bp, Photorhabdus luminescens
atggactggtcatcttatctttcccgacagttgtctgagcgtcggagcacttcgctatggcgtcagcggcaggtcaatcagaaatcagatgggcgtttcctgtatgccgctgatggcaaatatcttaatttttccagtaatgattaccttgggttaagtgcaaatcccgcaattatttccgcatggcagcggggagctgaacaatatggtgttggtagtggaggttcaggtcatattacgggttatacaaaggctcatcagctattggaacaacaattggctgactggttgggctatccaaaagcattactgtttatttcggggtattctgctaatcagggggtcattgccgcgttaatgacggaacaggatcggattattgctgatcgtctgagtcatgcttcattaatggaagcggcgatgcattcccccgctcagctacggcgttttctgcataatcaacctgaatcacttgcaaatttactggcaacgccttgtgttggaaagacgctggtggtaaccgaaggtgtattcagcatggatggtgactgcgcaccgctagccgatattcatcagcaaaccagaatttctggcaactggttaatggtggatgatgctcacggtattggtgtttgtggtgagcagggaaggggaagctgctggcaacagaaagtaaaaccagaaatcctgattgtcacttttggcaaagcatttgggttgagtggtgcggcggtgctttgtgatgagcagacagcagaatacctaattcagtatgcccgtcatctgatctacagcacctctatgcctccggcacaggctcaggcgctttctgaagctgttcggcagatacaatctggtgatgaattgcgccaacgattacagcagaatatcaattacttccgccggcaagctcagaaactgccgttcaatctgacagattcaaccaccgcaattcagccattgattgtgagtgataatgagttgagtgtgtccttgtctcagtctctgcaacaaaaagggatttgggttaaagcgatccgtccaccaacagtaccgccgggcagcgccagattacgtattactttgacggccagccatatgccacaggatattgatatgttgatggaggcgttgcatgggttccgtagctga

SEQ ID NO: 7382 - DNA, 1038 bp, Photorhabdus luminescens
gtgattgagcgtaagcaatggacaattaagcaggcgcaagagctgtttgataaaccttttttcgaattattatttcaagcacagcaggttcatcgtatttactttgacccacagcaagtacaggtcagtacactactttccatcaaaaccggggcttgcccggaagattgcaaatattgcccgcaaagctcccgttacaaaacaggtcttgaaaaagagcggttgatggaagtggaacaggtgattgattctgctcgtaaggctaaaaatgcgggttcaacacgtttttgtatgggtgccgcgtggaaaaatccccatgagagggatatgccttatctggagaaaatggttaaggaagtcaaagcattgggaatggaaacctgcatgacactgggcatgctcaatggcttacaagcacagcggttggcggatgcagggttagattactacaaccacaacctggatacctccccggaattttatggcaacatcattacaactcggacctatcaggacagattggataccctggataaagtacgggaggccggaataaaagtgtgttctggtggtattgttggtctgggtgaggcgatacgtgatcgggccgcattattggtacaactggcaaatctgccaaaaccgccggagagtgtacccatcaacatgttggttaaagtcaaaggtacgccattggctgagaacgaagatgtagatcctttcgattttatccgcacgattgctgttgccaggatcatgatgccgtcttctcatgttcggttatccgcaggtcgtgaacagatgaacgagcagacacaggcaatgtgttttatggctggcgctaattctattttctatggctgtaagttgctcactacacctaacccggcggaagataaagatttacaactatttcgcaagttgggcattaatcttcagcagactcagacagcatttggtgataatcagcaacagcagcatttggcggaagccattatcaatgcggataacgaacaattttataatgcggcattataa

SEQ ID NO: 7383 - DNA, 1272 bp, Photorhabdus luminescens
atgaccccttccgatattgaatttgatctacgccatatttggcacccctacacctccatgaccaaccctcttccagtttaccctgtcgttggcgcttctggggtggaactggagttggctgatggccgtaagctggtggatggtatgtcttcctggtgggccgccattcatggatataaccatccggtactgaaccaagccgctaaaattcagcttgatcagatgtcccatgtcatgtttggtggaattacccatccgcccgccatcgcactttgcagacaattaatagcaatctccccgctatcactggaatgtgtctttctagcggattcaggttctgtcgcagtggaagtggcgttaaaaatggcgttgcaatactggcaagcaaaaggtgaaaaacgtcagcgtattttgacattacgccacggttaccacggtgacacattcggcgctatgtctgtctgtgatcccgacaattcaatgcataatctctacaaaggctatctgcccactcatctgtttgctgaatcgcctcagtgcggatttgattcgcaatgggatccacgggatatcatgccatttcgtactttgctggagcagcattccggtgatattgccgcagtgatccttgaacctatcgtacagggtgccggcggaatgcgaatttatcatcctgaatatctgcgtcaggtcagaatgctttgcgatcagcatcagatcctattaattgcagatgaaattgccaccggctttggccgcacaggaaaattgtttgcttgtgaacatgctgaaattgagccagatattttatgtgtagggaaagcgctgacaggcggctatatgacactatcagcaacactgacaacccgtaaggtagctgaaacaattagcaatggtgaagcaggctgttttatgcatggcccaacgtttatgggcaatccattagcttgtgccgtagcaaaagccagtttgaacttattattacaaagcccttggcaacaacgtattaaatcaattgaaaaccaattaaagagtgagttgatgccactaaaacatcatgcaaaagtggctgatgttcgggtattaggtgcaattggcgtcgtggaaatgaatcaacccgtgaatatggcggtgctacaacactattttgtttctcaaagtgtctggataagaccatttggcaagctgatttatttgatgccgccttatattattcagccagagcagctttcacgcctgacaaaggccgtttctggcgcaattaatttgtaa

SEQ ID NO: 7384 - DNA, 666 bp, Photorhabdus luminescens
atggttgatgataaaaaagaatttcaagaagatataccgcttcccccagagaatacagcagccaaaatccaaaagtggaaagcgggtacacctattgaacgtattcataaagccgagtttaaaggcgctgaatttaatcctggtgttggtaatgcccgttttagcccgttcaaaaataatggaatctttgttccaacactctatggaggtgaaaacgtaggagtcgctattatggagacgattttgcatgatattccactaaattgcgccggtatacctgttgaactgagtaaactagatgatttagcgtatagccaaattacgccaaaaaaagacatcaagtatgtggatatcaacccacgaatattgaagaaatgggggattattcaaggtcaactagtagaatcagaagcatcggattatcatattactcagctctgggcagcaaaaatttatcatgacaatcctgatgctcaagcaattcgatggccctctaagcagcacggcggtaaagcaataataatttttggagatcgggtggaagaaaaagatttgcatgtgtctcttgaatcagagtccgccgctacttctaaagaggttaacgaaaaacttagagagcttgcagatgaaatggaattggttttggtacctacagatatgacatga

SEQ ID NO: 7385 - DNA, 258 bp, Photorhabdus luminescens
gtgccgaaccaaatagccattgaccaaggggtctttttgtctccaaacagcgcaatagttttctttatcactggtaacggttggccgccttcgtctagagcatacaatgggaataggtctttgccattaattggcaatgcgaatatttttttcgactttttcaaacgatttgccgcagcgctggaattcattgatttagatccggccaatttgctaagttcacttgcagtcagccactctgaatcagtaatgatctga

SEQ ID NO: 7386 - DNA, 168 bp, Photorhabdus luminescens
atgcacaacccgttcggcgcggtccgttttgcgtataacaaggcgctgcacatcaaaaagcatgcttatagaagtcacgatgtgagtttaaatccgcgcaaagacctcaaaccgctactagcggtcgcgaaaaaatcacgcaaatacgcctctgctcaaggtatgtga

SEQ ID NO: 7387 - DNA, 987 bp, Photorhabdus luminescens
atgaaacaagtggtttatacggcgagtccaaacagttgtcagattcatgtttggagcctgaataatgaaggtgagttatcactgattcagacagttgatgtaccgggggaagtacaaccaatggtggttagcccggatcgtaaacatctttatgttggcatccggccacaattcagtattgtcacttaccagattggctctagaggggaactggcacaacaggggatttcatcaataccgggtagcccgactcatatctctactgataaacagggccgttttctattctctgcctcctatagttataacaatttgagtgtcagcctaattgatgatcaaggtattgtgggtgaacctgttcaggttattgccggtttgcaagcaccgcattcggctaatattgactgggataataaacaactattggttccttgtctgaaagaagatcgcgtccgtatttttgagatggcaaaagagggttatctgacagaaaaacgtgctgaggaaatcactaccgcaatgggtgcgggccctcgtcatatggcatttcatccaaatcagcaggtgatttattgtattaatgaactggattctacagtggatgtttatcgcaagtgggaaaaatatcggactgttcagacggttgattcattgccggcagatttagcgggagttcgttggtctgcggatattcatattacaccggatggtcgtcacctttataccagtgaacggacttcaagtttgatcagccattttgttatttcgcaagatggttctaatttgacgctggcaggacactataaaactgaaattcagccgcgtggttttgctatcgatcacagtggaaaatatctgattgcatccggtcaaaagtctgaccatatttcagtctcttctattgataaatataccggtaaattgactgaattgacgcgctatccagtaggtaaaggcccaatgtgggtaacggtgctggccctgtga

SEQ ID NO: 7388 - DNA, 819 bp, Photorhabdus luminescens
atgtcatatcgcatcattgcactggatctggatggtacactactcgatcctcaaaaaaatatcctacccgaatcactcattgtactaaacgaagcacgtaaagctggtattaaggtgctaattgctactggccgtcatcatgttgctatccaccctttttatcagactttgcagctcgacacgcctgccatctgctgtaatggtacttatctgtatgattaccatgaaaagagcgttttaacctcagatccactgtcaactcaagaagctataaaagttctcagccacttaaaaaacacagatattcaccgtctgatgtatgtagatgatgccatgttatatgaagaaccgtatgacacagttgtccgtaccataaaatggtctgaaaccctacctgaatctcaacgcccaactgtgcgacatgttaatagctttcaacatgctattgacgaagtacaatctatctggaaatttacaacctgttctcctgatttagtaaaactgcgggaagtgactgcacaaatcgcaaatgacacaggtctttcgtgtgaatggtcatggttcgatcaggtggatattgccaagaaaggtaacagcaaaggtatgcgtttgaaacagtgggttgaatcacagggaatgaagatgaaagatgttattgcttttggtgataactttaatgatctgagcatgctgaaagccgccggactcggtgtcgctatgggtaacagtgtggatgcgattaaagaacaagccgatttggtgacgctggataatactcagccaggtattgccgaagttattcgcaagtatgttctttaa

SEQ ID NO: 7389 - DNA, 1065 bp, Photorhabdus luminescens
atgttagagctggattttgagcaacaacttggtgatctttatttacaggtcaatacacagctacccactgaggggatcacggctgtttttggcctttcaggtgccgggaaaacttcactgataaatgttatcgctggtttgatacgcccacggaaagggcggattgtccttaatgatcatgtgttggttgatattgaaaaaggtatctgcttgtcaccagagcagcgtcgtataggctatgtttttcaggatgcccggctttttccgcattatcgagtaaagggtaatctgcaatacgggatgtcgccggagatgaagccagaatttgatagcattgttagtttgcttggaattgagcacttactatctcgttttcctcttaccttgtccggcggtgaaaagcagcgggttgctatcggtcgtgctttattgacggcaccggatctgttgttaatggatgaaccgttggcatcgctggatctccctcgtaaaagagaactactgccttatcttgaaaagctttctggagaggtcaacatcccgattttatatgtcagccataatctggatgagattcttcgtctggcagaaaatgtactcgtcgtggataacggaaaagtcagggcaacgggaaaattggaagaggtttggtccagtagtgcattacgtctttggttacaaaaagagacgcttagcagtattctgaatgtttcaatggttgaacatcataatcgttatgaaatgaccgcggtggcactcgctgaccaggctttatggttgccgaaaatggatgttcaaccgggaactgatttgcgtatcagaatagatgcgtcagatgtttcattagtactggaacctcctcgcggcagtagtatccgtaatattttagcggtaaaagtggttgaattctttgatgataatggacacgttgatgtcaaattggtgttgagtggccactatttatgggcaaggatcactccgtgggcaagggatgaacttaatttgcggtctgggcagtggctttatgcccagataaaaagtgtttcttttcatcggcaactgtag

SEQ ID NO: 7390 - DNA, 699 bp, Photorhabdus luminescens
ttggcgatgttgagtgaatacgaatggcaagccatcatcctgagtctgaaagtgtccggtatggcagtgttacttagtctgccatttgggatcttgatggcatggattcttgctcgtttccagtttcccggtaaatcattacttgacagcattatccatctgccgctggtgttaccacccgtggtagtgggttatttgctgctgatcagtatgggacgtcgtggatttatcggtgaatggttatatgactggtttggcatcagctttgcatttagttggcgtggtgctgcactggcttctgctattgttgcttttccgttgatggtcagggcgatacgtctggcgctggaaggtgttgatcggcggctggaacaggctgctcgtaccttgggcgcgaatccgtttaaggtattttttactatcacattgccgctctctttgcctggggttattgtgggtactgtgttggcatttgcccgttcattgggtgaatttggcgcaactatcacttttgtatccaatattccaggcgaaacgcggacgatccctctggcaatgtataccttgattgaaacacctggagcagaaacggctgcggctcgtttgtgcatcattgccattattctagcgttgatgtcactgatggtttctgaatggttaacccgttggggcaggagacgtttgggagcaacatgttag

SEQ ID NO: 7391 - DNA, 771 bp, Photorhabdus luminescens
atgaaaaagagttttggcaaactgctagtcggcgttgtcgtttcttttgctttgacgtggcaagcgtgggctaccgaaaaagtcacgttattcgctgctgcctcgttgactaatgcacttgatgatattgcggcgctgtataagcgagagaaaaaaggtgaagtggtggcttcttatgctgcatcttccattttggctcgccagattgagcaaggtgcgccggcagatatttttatttccgctgatcaacagtggatggattatgttgccgggaagaaactgattattgatgaaactcggttgactatgttgggaaatcaactcgttctgattgcaccgaaagcgagtagactcaataaagttgatattaataaagaaaccaaatggaaatccttattagaggatgggcgtcttgctgttggtgacccagatcatgttcctgtgggcatttacgctaaagagtctctgcaatatttgggggcatgggagagggttaatcctctgctggcgcgtaccagtaatgtgcgcagtggtttggcgctggtggagcgtgctgaagttccattgggcattgtttatggctcggatgccgttgccagtgataaagtcaaagtggtgggggttttcccggaagagagccacaaacctattgagtacccaatggcgattatcaaagatcatagtaatctcaccgttctcgatttttatgaatatttgaaaacccctaaagccgttgaaatttttaaacgttatggttttcacccacgttag

SEQ ID NO: 7392 - DNA, 135 bp, Photorhabdus luminescens
atgtttgagttgattaaaagtatggctttcgccctggtcatggtaccggtagtgacggtcggaattttaggtttaatttatggtcttggggaactgtttaatatcgtttcccgtattggtcgttctgaaaagtaa

SEQ ID NO: 7393 - DNA, 792 bp, Photorhabdus luminescens
atgcaagccgaaattctactgacactgaaattacaacaacggttattcgccgatccacggcgaatattattactaaaacagattaaagcaacgggttctatcagtcagggagccaaacaggccggtatcagttataaaagcgcctgggacgcaattaacgaaatgaatcaactggcagacgaaatactggtagagcgtgctacaggaggtaaaggaggcggcgggacaaatcttacccattatggcgaacgtctattgcaactttacgatctactgacacaaattcagcaaaaagcctttgatatgctaaaagatgaccaacttcccctcgacagtctgttagcggccatttgccgtttttctctgcaaaccagcgcccgcaaccaattctttggcacaattactgaccgtaaccataatcaggtccagcaacatatccgcatcttgctgacagatggtcaaacatcactgaatgcggcattaacagaacaaagcgctaaccgtcttggcttggtaaaaggtaaggaggtattggcgctcattaaagcaccttgggtgaagctcactaaagagccattctctatcggtcatttcgacaatgccctgacagggcagatcagtaatattgaaaccagcgaagagaacaccgaaattatcattgttcttgatggcggtgaaatcctctgttctactctgcccaatcaagaagcaaataacctgaaactacattctggagataaaatcactgcactttttaatgctgaccaggtgattattgcaactctgtgttaa

SEQ ID NO: 7394 - DNA, 1476 bp, Photorhabdus luminescens
atgtctgaattgcaaataacgcaaggctgtttccgtttaagtgatacccgtaccttgcagttatcatcactaaaaatagcctccggcgaaaattgggcttttattggtgcaaatggtagcggaaaatcatcattggcccgtgcgctttcaaatgaattagtcctgctttccggcgaacgaaattgctcatttcgcaagtgcgcccgcgtctctctagaacaattacaaaaactgacggaagaagagtggcaacgtaataatagtgatatgctcagtgatgatgaagatgataccggccgcactgcggcagaaattatccagctttatcataaagataatgaactttgcctggaactggcaaaacagttcggtattatggatttactttcccgtcgttttaaatatctttctactggtgaaacccacaagacattactttgccaggcactgatgacttcacctgatttgctgattcttgatgaaccttttaatggccttgatctattttcccgtggtcaattcactgaattactggaaaaattgtcatcaaaaggaatcgttttggtacttatccttaaccggttcagtgaaatcccagattttgttgatcagattggcgtactagcagattgccagctaacctctattggcaccaaagaaaaagtgatggcagattccttggtggctcaactggcacacagtgaaaaactgaacggtattcatttacctgaaacagatgaatttcctgtcgataatcagctaccgcccgatcaaccgctgattattctacgtaatggtatcgttcagtataatgatcagccaattttgcatgggctagattggcaagtgaattcaggtgaacattggcaaattattggcccaaatggtgccggaaaatcaacgcttctgagtttgattaccggagatcatcctcaaggctacagtaataagctgatcctgtttggccgtcaacgcggtagcggcgaaaccatttgggatatcaaacgccatattggctatattagcaacagcattcatctggaatatcgtgtcagtatcagcgttcgtaatgtgattctgtccggtttcttcgattcaattggtctttatcagacagtatcagatcgccagcagcaacttgctgatgaatggctggctttactgggcttatctgctcagattgccaacggcccgtttcaccgcctttcatggggacaacaacgacttgttctgatagctcgcgcactggttaaacatccggctttattaatccttgatgaacctctccaagggcttgatccactcaaccgccagttagtattacgttttattgatgtcatgatcgctgacggtgatactcagctactgtttgtttctcatcatcaagaagatgcgccgcaatgcattactcaccgactaatatttatccctgatggtgatctatactgctacaaaacagagaaagtttctgattga

SEQ ID NO: 7395 - DNA, 828 bp, Photorhabdus luminescens
atgatttggggtttacttactacatcactagcgttattagctatacaccgcactactgcactgattgttctactggccgcagttattaccggatttgtcacacaaactgtgatttatccggcagtcgccactattgcgattatttttttgttaggtgcgctacgtattcattttcaacaaaataacatcattaaaatcacaactgaactgctattactcgcctttgcggtggcattattcctacatctgctccccggttttaataacctgaaatatctcgataaagttcaggcaggccctcacagtgccccattctcaatgtatttcaactttgacaaagccctcattcctttcctgctgttatgttgcatgcctagcctatttacaacaaagccactgaccaaaattcggccttatgcatggataatcttagctattgctattcctgtattgttaagcatagcaacggctctcggagggctcgcagttgaattgcacatgccacaatggttaccgatgtttatattggccaatattttcttcatttctctggcagaagaagcgctattccgaggttatatccaacagagattgagtcagtggattaacccctattttgccctgatcatcactgctttgatttttggtggcgcacacttcgctggcggcccattactgatgatatttgctgcacttgccggattaatatatgggctggcatggatgtggagtggccgtctgtgggtttctgttgggttccatttcgtgctcaatttggttcatttgttgttctttacttatccaatcaagttggtgactgcgttataa

SEQ ID NO: 7396 - DNA, 753 bp, Photorhabdus luminescens
atggctgtcactaaactggttctggtaagacatggcgaaagcgagtggaacagagagaaccgtttcactggctggactgacgtcgcgttatctgaaaaaggtcgcgccgaagctcaacaagcagggcaactgttgaaagaagaaggttttgtttttgattttgcctacacctccgtgctaaaacgcgctatccatacgctgtggaacattctggatcaggttgatcaacagtggttacctgttgaaaaaagctggaaactaaatgaacgtcattatggcgctctgcaaggtttggacaaagcagaaaccgcagctaaatacggtgatgatcaggttaaactgtggcgtcgtggttttgctatcaccccaccagatttaactaaagatgatgaacgtttcccaggccatgatccgcgttatgcaaatttgaagccagaagagttacccgtgactgaaagcctggcaacaacgattgaacgcgtgatcccttactgggaagaagtgatcaaaccgcgcgttgctcaaggtgagaaagtgattatcgcagcgcacggtaattctttgcgtgctttggttaaatatctggataatatgagcgaagaaaccattcttgagctgaatatcccaacagcagtacctttggtttatgaattcgacgaaaacatgaaaccaatcaaacattactatctgggtaacgctgatgaaatcgcagcaaaagccgcggcggtagcaaaccaaggtaaggcaaaataa

SEQ ID NO: 7397 - DNA, 1053 bp, Photorhabdus luminescens
atgaattaccagaatgacgatataagaattaaagagataaaagaattattacctcctgtggcactacttgaaaaatttccagcaactgaaaaggctgcattgacagtatgtaaggcgcgtaaaacgattcatcaaattctgacgggtgaagatgagcgtctgttggtggtgattgggccatgttctattcatgatcctaaagcagcaatggaatatgccgggcggttgaatgaattgcgtgaagagctgaaagaggatctggaagttgtcatgcgagtttattttgaaaaaccgcgcacaactattggctggaaagggttaattaatgaccctcatatgaatcacagttttgatattaatgatggtttgcgtttagctcgtcagttgttacgggatattaatgatatggggctaccggctgcgggtgaatatctggatatgatttctccacagtatttagccgatttgatgagttggggagcaattggcgctcgtacaacggaatctcaggtccatcgtgagttggcttctggtctttcctgtccggttggttttaaaaatggtactgatggtgcgataaaagttgccattgatgcgattaatgcagcgggttcccctcacagtttcctttctgtcactaagtggggacattctgcgattgtaaataccagcggaaacaacgattgtcatattatcctgcgtggcggtaaagagccgaattacagttctgaacatgttgctgtcgtgaagcaaaacttggaaaaagcaggtttaccggcaagaattatgattgatttcagtcatgccaatagttctaagcaatttaaaaagcagatggatgtgtgttcagatgtgagccggcagcttattgctggggagaaagcgattattggtgtcatggtagaaagtcatttggaagagggaaatcagaacccggatagcggtctgccattggtatatggcaaaagtattactgatgcttgcattggttgggctgacactgaaattttgttacgtcaattgtcgtcggcaataaaagcgcgtcgtggctga

SEQ ID NO: 7398 - DNA, 726 bp, Photorhabdus luminescens
atgaattttttcagcattaacaacatattagtcaatatccctctgggaaaaggaggatatgatttatcgtggattgaagcggtagggacgatcgctggcttgttatgtatttggtttgccagtcaggagaagataattaactatttgtttgggctaattaatgtcacattatttgctgtgattttcttccaaattcaactttatgccagtttattgctgcaattattcttctttgcggcaaatatttatggttggtatgcctggagcagggttaatgatcagcagcagattgaacttaaaatacgttggttaagtttgaataaggcggtaataattagtctgatttctgtgctattgatcgccattatgacttttaatattgatcgagtctttggctatctgactcagattgccgttacgattatgcaaaaatttggctttaatgttcagatgccgatattggagcctgatgccttcccattctgggattcgacaatgacggtgctatctattgtggcaatggttttgatgactcgtaaatatgtcgaaaactggctggtatggatggtcatcaatgtgataagcgttgttatctatttccatcaaggcgtgctggcaatgtcgttgcagtatgtgattctcttgggcattgcatttaatggttcccgtttgtggattcaggcagctaaggagaaccattctttgccattatctcatgtgaaatag

SEQ ID NO: 7399 - DNA, 1041 bp, Photorhabdus luminescens
atgaaccagtatattgattttaattcaaccatttatccattcccacctaaacctgcctttctcagtaaggatgaaaaaaaacattaccgtgaaaaaattaaacgccttctaaaacagcaggatgccgttatggtcgcacattattacaccgaccctgagatccaagctttagctgaagagacaggagggtgtgttgccgattcattggaaatggcacgttttggtaataatcatccggcctctactttattagttgccggtgtgcggtttatgggagaaaccgccaaaattctcaacccggaaaagcgtgttttaatgccaacgctggaagctgagtgttcgctagatcttggttgccctgaaaaagagttcacccagttttgtgatgaccatcctgatcgtaccgttgtggtttatgcaaatacatcagcagccgttaaagcacgagcagattgggttgtgacttcaagtattgctgttgaactgatcgattatctggatagtcagggaaagaagataatttgggcacccgaccgccacttggggaattatgtccgtaaacaaacaggagccgatattctgtgttggcagggggcttgtattgttcatgatgaatttaaaactcaggctttaataagggtaaaaggtctgcatcccgatgctgcggtattggttcatcctgaatcaccgcaagcggttattgatctggctgatgctgttggttcgaccagccaattaatcaaatcagcgcaatctttgccacatcagaaactgattgtggcaacggataaaggcatcttttataaaatgcagcaagcatgtcctgagaagcagttatttgcagcacctacggctggagaaggggcgagttgccgtagttgtgctcattgtccgtggatggcaatgaatggtttgcaagccatcgttcaggggttggagcagggagggggtcaacatgagatattggttgaaaaagagttacgggaaaaggcgcttgttcctttaaataggatgcttgattttgcagctcagctaaaatag

SEQ ID NO: 7400 - DNA, 765 bp, Photorhabdus luminescens
atgataaaaattactgatttatgctttagttataaaagtagagaaattaaaaaaaatatttttaaaaatatattttcattaaatgaaatcgaaatagttttatttgaaaatataaatattgaaatatttgacgatagcaagattataggattactggggaggaatggcgccggaaaaacaactttaataaagctgatttccggtattttaactccaaattctggaaatattactgtttttggtattgattcaaatggaagacctcttaatcttttatctaatcttggtatcgtttttggcaataagtcaatgctttgggatgagttatctctctatgaaaatattgagtttttttctaagatatataaacgtaattatgataagaatagtgttgaaaatatgatagaaatgttgaacctgaatagcatagcaaaaaaacctgcaaaaacgtgctctttaggtcaatctgtaaaatctaacttattaatacactttcttaataggccaaaattactgatattggatgaaccaacaatcggattagatatagagtcacaaattctattacgaaatattttaaaagattatgctcaaaataatgaaagtaaaatactaattacctcacataatatgatagatattgcggatgtttgcaaagatattatcttcttgaaggatggtgaaatatcaaaaatacatctaaataaaaataattcgaaagaaaagaatgcgctatatctagagaggcttttctgtgataattaa

SEQ ID NO: 7401 - DNA, 561 bp, Photorhabdus luminescens
ttgacaagtattaccggatttccagaaaatttatcgttccatattgaagatggtagtatagatagactaattataataccaaaatccatactattatattattcagaatatgctttcggacagatattagctagattatttataatgtcaccattaatttcattcataattatataccaaaaagacattcctaatattatatatctatttatttcgttatgtatagggttatttatcaatttgtacttaacaatgatattgtcatgtatggcattcaaatttagaggctcgtactcttttatcattattaaggatactttgtcatgggtcctttcaggtgcgttgataccattagatgtgtttggtgactctttaaaatcaatatttaattatattccgtttcaatatattacctatattccagttaaatttgcaacaaattcaatatctatttattttatatttaatggattcttagtcatgatgtgtttaatgatgatttttaattttatttggaattatatgttaaaatacaatcaaggatataatggtaatgcttag

SEQ ID NO: 7402 - DNA, 525 bp, Photorhabdus luminescens
ttgctagttaaaaaagtcaagtcattaaagttagaacctcatttaacgttacctataaatactcaatttttatatgtcactacaaatattgtatttgagcattttttattgtcattcctatctttagtattattttttactgtacatatttaccttggtactaatattttgttggtttttttacatttgataatggcattagaaggagtcttaatacttacttcaattacatggataataagaacaacaatattttggacagcttcattagttagtattaagaactcaaatccttgttttaaagtattggtgagacctgaacaatcttttcatggtgtagttcgttttattttaatgttcatacttccgtgtctatttataactggtgttccagcttcagtagcaagtggaataatgagtatgaaatggttttttattcaaactctggtcacattgattttaatttttatagcgaaattggtttttgatattggtgtcaaaaggtattcgaaatatataacgtga

SEQ ID NO: 7403 - DNA, 819 bp, Photorhabdus luminescens
atgagtcctaaaaatgattttaaggctttttctattagtgataatgcgaatgtggtcagtcaagaaaaatatgaagaaaaccagggtttgcagactggctttcccccagataatgttcctacgcacgtgttaaataaggtattacgtcaagtatcaacggtatcatctgtggtggctgattttattgcggcacaatctggcaatgatgttctggatgatggaaatatagctaaactcacagatcaattgaataaagcgttagaacaaaaaattacaacagatattcccagtgcttcgttaacacaaaaaggtgttgtccagttgacaaatgtgatgggtaatagcgacacattggcagtgacacaaaagcttgttcaggaagtaataaatgcattacgtgcagatattactatacctgtgggttcacctataccgtggccgttgcctaatccccctaccggttattttatttgtaatggttcagcttttaattcattacagtacccgcaattagctgaagcttatcctagtggtagattacctgatttaagaggtgagtttatccggggatgggatgatgggcgtggggttgatctggggagggcgctattgacttggcaagaaagcacttcattggcggaataccttggtcatttcccaagagggggagggcaacagatagtaaactacgacggtattgcaagtagtgcggcaggatatttaaaatacaacgtaacatcaccaacaaccactggggttaatttcttacgatttcgaccacgcaatgtcgcatttaactacattgtcagggcggcataa

SEQ ID NO: 7404 - DNA, 915 bp, Photorhabdus luminescens
atgagtcacaagaatgattttaaggctttttctattagtagtaatgcaaatgtcattagtcaagcaaaatatgaacaaaacttgggtttgcaggtgggattttctccggataatgttcccactcatttgttaaataaggtattacgtcagtcatcaactatatcatctgtcgtcgctgattttatcgcgacacaatctggcaatgatattctggatgatggaaatgtagctaaactcaccgctcaattaaataaagcgatagcacaaaaaattacaacagatatgcccaatgcttcattaacacaaaaaggtgttgttcagcttacaaatgtgattggcaatagtgatacattggcagtgacgcaaaagcttgttcagcaagaaataaactcattacgtgagcatacttatacccgcgaagagatagataaccggattaaaacagtcggtgaaattcctgttggttctcctattccctggccgttactctatccacctttcggttattttatttgtaatggctcaccttttaataaatcacagtatccgaagttggcggaggcttatcctagcggtagattacctgatttaagaggagaatttatccgcggatgggatgataatcgtggtgttgatagtggtcgtgggcttttgtcttggcagggagatgcaattagaaatattacagggacaactcaaatgatacatgctcagatgggcggtgctccccagacgcctgttgtgagtggggttatggcatcgtcgcgatatgctacggcagatacacgttcagcaaatagcggcggtagtactgatcttacatattttgacattgatgcatcaagacaagtcccaaccgctaacgaaaatagaccccgtaacgtggcatttaactacatcgtaaaggcggcataa

SEQ ID NO: 7405 - DNA, 384 bp, Photorhabdus luminescens
atgaaaagactaatattgatattaactgcgatgctttttactgctaacgctgtggcgggaacaagatctgatgattgtgcagatattaacggttggaatgttcagcaagtaatacagaaagctgaacaaaaaggtattattaagtctgataatgttgatatttcaaagagtgctagcattctgttaaatgaatttcctctgaaacacaatggtaggataattacgttaaatgatggagtggaaggggaaaaactctctactgaggtgataaaggtttctttgtttgataaatcaagaaactcgacagtaaatattattgctgtcaccctagtatcaaacatcgaatgttcgttaacagatcctagtgttatagtcattccataa

SEQ ID NO: 7406 - DNA, 357 bp, Photorhabdus luminescens
atgacgtggatttatcaacaatacagtggtgaaatttatcacgatacgaagctaattggccacggttggagtggtcagggtatacataagaataatcctgcatcagaaggtataaaaaacttaggtcctatacccagaggttattataaaataaccggtgaaaatagctcaaaaggccccatgactattatccttgacccatgtagttataatgatatgcatggccgtagtgcttttagaattcacggtgctagcagaaaagatcctgaacattcatcagaaggttgtataattcttaatagagatatacgacgtgagatattgctctcgcacgatatggatttggttgtcgaatga

SEQ ID NO: 7407 - DNA, 903 bp, Photorhabdus luminescens
atgagtcataagaatgattttaaagctttttctattagtgataatgcaaatgtggttagtcaagaaaaatatgaagaaaaccaaagtttgcagactggatttccatcgggtaatgttaccactcacttgttaaataaggtattacgtcagtcatcaaccatatcatctgtcgtcgctgattttatcgcgacacaatctggcaatgatattctggatgatggaaatgtagctaaactcaccgctcaattaaataaagcgatagcacaaaaaattacaacagatatgcccaatgcttcattaacacaaaaaggtgttgttcagcttacaaatgtgattggcaatagtgatacattggcagtgacgcaaaagcttgttcagcaagaaataaactcattacgtgagcatacttatacccgcgaagagatagataaccggattaaaacagtcggtgaaattcctgttggttctcctattccctggccgttgccctatccacctgttggttatctcacttgcaacggctcagcttttaataaattacagtacccaaagttagcagaagcttatcctgacggtaggctacctgatttaaggggcgaatttattcgtggttgggatgatggacgcggtgtggacatgggacgcacaatgctgtcgtggcagggggatgcgatgcagcgaatgacaggttttttagaagctggtaacggcattggtttgatgacgcgtccacatgattccacatccggagtttttctagagggtgacttgagaacaatatctcatgtgacacaaaatggaacatcgtacgcagttagtttcgattcatcacgtgtcgcacgtactgcaaatgaaactcgccctcgtaacattgcatttaactacgttgtaagggcagcataa

SEQ ID NO: 7408 - DNA, 147 bp, Photorhabdus luminescens
atgatggtatctcagcacttgcatttatcgacacgttttcagaactggcaacttaagggtatcgataataacaatgcgcgtgttttctacaaagatagggaatcctatgatattcctgagcattaccgcttagatgtttttgtctaa

SEQ ID NO: 7409 - DNA, 852 bp, Photorhabdus luminescens
atggaagacccggtaatccttctggaaaaaatcctgacttttgcccataacgatccccgtattgatacagttatccaaacaggttcccgtgccagaaatgcacgtgtagataaattctcagatctagatatagaactgattggttcaggaacagatgaattaataggcaacgatttatggtttaagcagttgggtgacgttatggttgcattgcatctggctaatgaaaaagaggatgaaccagattggccaacttgtctggtcgtttttaacggcggtcgtaaggtggatttcacactggcaagtgttaaacgcctgaaagatatgaaacaaagaggcttggatgaactttatcaacgcggctataaggtcctccttgataagacgggccttacaaacggacttcctgaaattactcaccaattgactaaatcgtatattccatcatcaacagagtttaatgaaaacctgcgcgagttctggttcgaggcaacacaagtacctgtttatatcactcgtggtgatttatggcatgcaagaatgagggataatgagatgaaagacttattgctggcaatgatggagtggtacgtctcgataaaaagtgatggaaagacggatgtctggtacaacggccatcatttgcatgaatggctgcctgagaagttcagcaaacatattcaagggatttttagcagttatggcaaagaagaagcgatacgagcattgctggaaaccacagagctttattcggagatttctgctgaagtggcagaaatgaaggggtttgagttcgatagtgagctacccagtaaagtcaggaagcatattatgcaagtttgttatggttaa

SEQ ID NO: 7410 - DNA, 159 bp, Photorhabdus luminescens
atgaaaatgcaaaaggactcttctcatacagttacgatcaaggaagtaattattcagcagaacgatgaagagaatatggaacaaagcgacccggtaccactcgtcgaaatgtcagtcagtctcgcttcgctcggctcgaacctgcgaccaattgattaa

SEQ ID NO: 7411 - DNA, 777 bp, Photorhabdus luminescens
atgaacagtaacttcagacatcattttttgggtctgtcgttattggttggcgtagcggttccctgggccgctattgcccaagcgccaatcagtaatgtcggctcgggttctaccgatgaacgccttacccaattagagcgtatttccaatgctcacagtcagctattaactcagctccagcagcaacttgctgattctcaacgtgatattgacatgcttcgagggcagattcaggagaatcagtatcagctcaatcagattatagagcggcagaaggatatttatcagcaactggaaggtgctactagttctgaggggagtaaacctgctgcaaatacagcttcttcaacggcaagtaatacaaaaaacagtggcaatcaggcatcatcatctgtcagtacaggcagcgagaagggtgattatgacgctgctgttcatttggcagtgaataccaaagaatatgataaagcgattatagcctttcagagtttcgtgaagagttacccaaaatcgagttacatgcctaatgctaattattggttaggacagcttaattacaacaagggtaaaaaagacgaagctgcgtattactttgctacggtagtaaaagagtaccctaagtcgcagaagagtggtgaatcgctttataaagttggtttaatcatgcaagacaagggccagaaagataaagcgagatcggtttatcaacaggtcatgaaacaatatcctggttcgaacgcagctaaactggcagagaaaaagctttctacgctgtaa

SEQ ID NO: 7412 - DNA, 501 bp, Photorhabdus luminescens
atgcaactgaacaaagtgctaaaagggctgatgttagctttaccagttatggccgtagcagcgtgtagttctaacaagaatgctgataacgatcagactggtgtgggcactgttaatgaaactaatgcgggtctgtcagcagaggaattagctcgtcagcaaatgcaagagctacaaaacaacaacatcgtatatttcggttttgacaaatacgacatcaactcagattttactcagctgctagacgctcacgcggcattcctgcgcagcaacccatcttataaagttgttgtagaaggtcatgctgacgaacgtggtactcctgagtacaacatcgcattaggtgaacgccgtgctaatgcagtgaaaatgtacctgcaaggcaaaggtgtttccggtgagcaaatctctatcgtctcttacggtaaagagaaacccgctgtactgggtcacgacgaagccgcctatgctaaaaaccgtcgcgcagtactggcatactaa

SEQ ID NO: 7413 - DNA, 1293 bp, Photorhabdus luminescens
atgaggcaggcttttaaagtagtactaagcattttaatgttgtgggtcacggttgctcacgcagaagttcgaattgagatcacccaaggtgttgattctgcacgtcctattggcgttgtgccctttaaatggactggtgcgggtaatgcaccggaagagataggggcgatcgttggggccgatcttcgcaacagcggtaaatttaaccctattgatatcagccgcatgccacagcaaccaacgacgacatctgaggtgacacctgctgcatggtcggcgttggggattgacgctgttgttgttggtcagatccaaccaagtgcggatggtggttttttaatctcttatcaattggttgatactgcgagtgctccgggtacggtgcttgctcaggatcaatttaaagtgaccaaacagtggttacgttatgctgcacatacagccagtgatcaagtatttgaaaaactgacgggcatcaaaggcgcattccgtactcgtctggcttacattgtaaagactaatggcggtaaatatccgtatgaactgcgtgtatctgattacgatggttacaaccagttcactgttcaccgttcgccggaaccgttgatgtcaccggcttggtctcctgatggtgccaaactggcttatgtgacatttgaaagtggtcgttctgccttggttattcaaaccttggcgagtggtgaagtacgccaggttgcttccttcccacgtcataacggtgcacctgcattttcccctgatggcagtaaattggcatttgcgttgtctaaatcgggtagtttgaatctttacgtgatggatttgggttcagctcagatccgtcagattacagatggccgcagtaacaatactgagccgagttggatgccggataaccagactttggtttatacctctgatcagggtggtcgtccacagttatacaaaaccgatataaatggcggtgctccgcaacgcctcacttgggaaggcacacaaaaccaggatgctgatgtaagtgctgatggtaattttgtgatgatggtcagctcagagagtggtaagcagcacatagctaaacaagatctggcaacgggagccgttcaaattttgacggatacgttcctggatgaaacgccgagtatcgcacctaacggcactatggtgatttatagctccacccaagggttggggactgtattgcagctagtttcgactgacgggcgtttcaaagcgcgtcttccggcaaccgatggacaggtaaaatttcctgcctggtcgccgtatctgtga

SEQ ID NO: 7414 - DNA, 1071 bp, Photorhabdus luminescens
gtgggaaagacaaacgggcaaaacaataaattaaatcgcgctgttatcgtttcggttgtgttgcatattattttgatcgggttacttatttggggttccctgacacgaaaaactgaaatgggtggcggtggtcaggatggttctgttattgatgctgttatggtcgatccgaatgcggtagtacagcagtacaatcaacagcaacaacagcaggctgatgctaagcgtgcagagcagttacgaaacaagaaagccgaacagcaggccgctgaattaagggaaaaacaggctgaagagcaggaacgtttaaaagcggtagaagaagaacgaattaaagcgcaacaggctgcggaagaacagaaaaagcaagctgtagaagcggcaaacaaagcccgtgaagagcaaaaacaggcagaagaagcggcggcaaaagctaaagctgaaaaagaaaaactgattagagagcaggctgaggcacagaagaaagccgaagcggaagctaagaaagaagctgaagccgtggctgctaaacaaaaagccgcggaagaagcgaaagccaaagcagacgctgaggctaaagcaaaagccaaggctgaagcggatgctaaagccaaaactgaggcagatgcaaaggctaaagccaaggccgaagctgacgctaagaaaaaagctgctgcgcaagccgctaaacaggaaagtgaagttgatgacttactgggtggcttaacttccaatgcaccgaaacagcaaggaggagcttctgctgccggtaaaggtggcggcaagaaaagtggcgcttcaaatgccgacattaataactatctggggcagatccagatagcgatacagaataagttttacgatccaagcatgtatcgtgggcgtacctgtacattacggattaaacttgctcctgatggcttattaattgatgtcaagtcagagggaggagaccaggcgttgtgccaagcggcggtagcggcggctaaacaagcgaaaattccgaaaccaccaagcaaggaggtttatgaagtgtttaaaaacgcgccgcttgatttcaaccctcaataa

SEQ ID NO: 7415 - DNA, 426 bp, Photorhabdus luminescens
atggcacgcactcgtagtcgcaagcgtgagctgaaatccgaaatcaatatcgttcccttactggacgtattgctggttctgttgctgatttttatggcaacagcaccgattatcactcaaagcgtagaagttgatctgccggatgcggtagattctaaaacggtttccaactccgataatccaccggtaatcgtggaggtttctggtgttggtcagtacaccatgatagttaaccatgaacggttggaattattgcctgagccgcagattattgttgaagcgcgggcacaaatagaaaagaatccaaaaaccgttttcttgattggtggttcgaaggaagtgccttacgatgagattattaaggcactcaatatgctgcatcaggcaggtgtgaaatccgttggtttaatgactcagcctatctga

SEQ ID NO: 7416 - DNA, 696 bp, Photorhabdus luminescens
gtgactgacatgaacattctagatttattcctgaaagcgggccttttggtgcaactgatcatgcttattttgatctgcttttccgttgcttcatgggcgatcattattcaaaggaccaaaattctcaatgcagcaacccgagaatcggaggcgtttgaagataaattctggtcgggtattgaattatcacgcttatataaggaaagtcagtcgcgtcgagattctttaggtggaacagaacaaattttttattctgggttcaaagaatttgcccgtctgcatcatgcaaataatcatgcgccagaagcggtaataacaggggcttcacgtgcaatgcgtatctcaatgaatcgtgaattggaatcgctggaaagccatattccattcttggggacagttggctcaattagcccgtatatcggtctatttggtacggtttgggggatcatgcatgcatttatcgcgttaggtgcggtaaaacaggccacgctccaaatggtagcgccgggtattgcagaagcgttgattgcaacggcgattggtctgtttgcggcgattccagccgttatggcatacaaccgtctgaatcagcgtgttaataagctggagcaaaattacgataactttatggaagagtttttggctattttgcatcgtcaagctttcgcggctgaaaataaagcagagaacaaatag

SEQ ID NO: 7417 - DNA, 405 bp, Photorhabdus luminescens
gtgagtaatacgttgttccggtggcccattcgtatttattatgaagatacagatgtaggcgggatagtttataacggccgttatgtcgtcttttatgaaagagcacgtactgagatgttacgtcagcatggaattcatcaacagcgtttacttgatgaacaaattgcatttgttgtacggcgtatggtggttgattaccgagccccggcccggcttgatgatatgttggaggtgcagagtgaaattacggatattcgtcgagcatctttgacatttattcaacgcattgttgatggtaatggagcaatgattaacagcgcagaagttttagtcgcctgcgtgaatacatctcaaatgaagccgattgcgcttccaaagtctattgtcgcggagtttaagcagtga

SEQ ID NO: 7418 - DNA, 1140 bp, Photorhabdus luminescens
atgtttgattatgaagtactacgatttatatggtggctactgattggtgtattgctaatcggtttcgcggtaactgatggttttgatatgggagtcggtatcctgttacgtatcatcggcaaaaacgatactgagcgtcgcatcatgattaactcagtggcaccgcattgggatggtaatcaggtttggctgattaccgccggtggagcgctgttcgccgcatggccgatggtctatgctgcggcgttctctggcttctatgttgctatgatcttggtgttatctgcgttgttcttccgtccggttggttttgattaccgctccaaattggaaaaccgcaagtggcgtaacatgtgggattggggaatatttgtcggtagctttgttccaccattagttatcggtgtggcattcggtaatctattacagggggtgccgtttaacgtcgattcccaactccgtctgttctataccggttccttcttcggattgctcaatccatatggtttgttggcgggaattatcagcttgatgatgattgtgactcagggggcaacttatttgcaaatgcgtactacgggtgagctgcgcctgcgttctcgtgcggcaacttatctctgtgcgctggtgacaatggtggctttcctgttggcaggtgtatggctgatttatggtattgatggttatattgtgactggcggcttggatacggtggctcagtctaatccattacataaagaagtcgctcatcaggcgggtgcttggttgaccaactttaacaactatccgtggttgtgggtactaccggcattgggtgtggcttcgcctttgctgacgatgctgatgacgcgtatgaataaagctggatgggcattcctgttctcttcactgacaattgctggcatcattctggcctgcggtgtaacgatgttcccatttgtgatgccttcaatcactgatcctaatgtcagtttgacgatgtgggatgcgacttcaagcctgatgacgctgcgtgttatgtttgtagttgcattgatttttgtcccaatcattctgggatataccatttggtgttactacaaaatgttcgggcgtttggataaaagttttatcgaagataacaaacattcactgtactaa

SEQ ID NO: 7419 - DNA, 1569 bp, Photorhabdus luminescens
atgtttgatattgtcgaactgtcacgattacagtttgccttaactgcaatgtatcactttctattcgttccgctaacgctcggcatggcgtttttgctggcgatcatggaaacggtatatgtgctctccggtaaacaaatttataaagatatgacaaaattctggggcaagttgtttggtattaactttgctctgggggttgcaacagggttgactatggagttccagtttgggactaactggtcatacttttctcactacgtcggtgacatttttggcgcacctttggcgattgaagggctgatggcgttcttcctggagtctacattcgtaggcttgttcttcttcggttgggatcgcctcagtaagacacaacatctggcggtaacttggttggttgcattaggatctaacttctccgcactttggattctggttgctaacggttggatgcaaaacccaattgcttctgatttcaactttgaaaccatgcgtatggagatggtaagttttgctgaactggtactgaacccagttgctcaggtgaaatttgtgcataccgttgccgcgggttatgtgacaggagcgatctttgttctcggtgtcagctcttactacctgcttaaaggccgtgatattccatttgctaagcgttcatttgcgattgcttcaagttttggtatcgcggctgtgctgtctgttattgtgctgggtgatgaatctggttacgaaatgggcgacgtacaaaaaactaagctggccgccatcgaagctgaatgggaaacccagccaccgccggccgcttttacactgataggtatcccagatcaggataaaatggaaaacaaatatgccattcagatcccttatcttatggggctgattgctacccgttctgttgatactccggtcattggtctgcgtgatttgatggacctgcatgagcagcggattcgtaatggtataaaggcttatcacctgttggaagaattgcgtgcaggtaacaccgacccaacggttcgtacagcattcaatgaaaataaacaagatctgggttatggcatgttgctgaaacgctataccagcaaagtgactgatgccagtgaagaacagatcaaagcagccgcaaaagattctattcctcgggttgcaccgctctattttgcattccgtatcatggttgcagcaggtttcctgatgttactgttgatcggtctggcgttttggagcgttatccgtggccgcattggtaaacaaaaatggttgctacgcgcagcactgtacagtattccattgccgtggattgccatcgaatcaggctggtttgtggcggaatatggtcgtcaaccgtgggcaattggtgaagttctgccaactgcggtggcgagttccaatttagcagccagcgatatcttgttctctatggcgctgatttgtggcctttataccttattcctgattgcggaaatgtttctgatgttcaaatttgctcgccttggcccaagtagcctaaaaacggggcgttaccattttgaacagaaaacaacttcagcacctgaagctcagtaa

SEQ ID NO: 7420 - DNA, 144 bp, Photorhabdus luminescens
ttggttcaggatttgctctattcaagcaaacgattaccgattgcgtttttgggttctttacatgagttggtgcatggttcttcattgtgtgaggctgaaaatattgaaaaggattttcaaggtttgtcagtgtatttgacttaa

SEQ ID NO: 7421 - DNA, 375 bp, Photorhabdus luminescens
atgaataatcctactattaatgacttatctgaaacttgtagtgcaattgtgtcgcagcaggcaccgcttcacgttgtagaggcggctttacaagcagctgagacagaaaataaagaaattggtcagcactatgctaaatatctttgcgaccgagcagttattactactatagccgaaccaaaacttgaggtgtttgcttcttacatgaaacaacacggctatacggtattaacttatgacgaactacagcaattgaaacagcgttacccatatcactggtctttagagctcaatcaggatgggtcgggtgaaattaaagatcctaaagccgattttcataaatcatttaaattcgttaaagaactgctagcatag

SEQ ID NO: 7422 - DNA, 639 bp, Photorhabdus luminescens
atgtatatacaaaaagtatttgaagaaaatcgaatctctgttttgcatgacttgatagagcaaaaccctctggggactttgaccgtctatggcagttatggattgagtgctgatcatctgccttttactttagataggcatggtttagagctaggcgtgctgaaaacacacattgcacgcggaaatcctttgcacaaaagcgtggttgaaactaatgaagtgatggttattttccaaggaccagacgcttatatttcacctagttggttacctagacgacatatcaatggtcgagttcaacctagttgggcttacacggcagttcatgccatgtgttccatcaagtttattgatgatggcagttggataaaggcgcattttgagcaatccgttaattgttttgaagcaggattaccggatccttggcaagtcgcagaagcaccgaaagattttatagacggcttaaaacagcatgtcgttgggatcgagctgactattcacaatctgctgggaaaaaggcagttgatgcagcaacgtaacattgatgaccgcttagcaattatagaaggcttgcgtactcagtccgatcctagagcacatcaggtcgcaaaacaaatagcacaagccattgaaaattaa

SEQ ID NO: 7423 - DNA, 465 bp, Photorhabdus luminescens
atgacagagaaggccagagccgtagggatcaaccatgtgtctattgaagttggtaacattaatgaagcagtcgcattttatagtgcgcttatgcgcattaaacccgggctgttatcagagactgagggatcgattgaactgggtgatcagtttgttgcctttacttgcagccaaggagaacaagctcacaaacctggtcattttgggttcgttgttgatgataaagaaaaggttcgtgaggcattaaagcaattcgatattgaacctttgcctggccgattttttggttttctggatccttggggcaatcatatcgaagtggtcagctacgagaatattaaatttactaagtctcctggtgttctcaatggtatgggattagcagacttgaagaaaaacgatcgtgcacaacgggagcttgaagaacaaggttatagtgagcctttgtcttctttgaactcataa

SEQ ID NO: 7424 - DNA, 1107 bp, Photorhabdus luminescens
atgttcaatatacaagcagtaatcaaagagcatgtagttgaaaataaaagggaaagcttatggagctatctggaagaacgccccaattacttgatgctagataaaaatgagaatcaccatccaatggatgaagatctttttgaagcgtttcgagcctcattaaaaccagagcatttgtgtaattatccggtgctaaataacttatataaaaaaatagccaaactggttggcgttgaagagcgcaacatctacctcggctcgggttcagacctagcgataaaagcattatttgatgcatgcttaagagagggagatcatgtggttttacataacccttgctactttatgtttgaaaactacgcaaagtatgctggggtatcaatctcgtcaacaccggtcaccgaagattggaaacctgatgtagcggctattatcgatgcagtcaaagaaaataccaaattagtgattgtagaagatccgagtggttttgtcggcacgcgtttatcttattcccaaatgcatggcttggctgaagcgctttatagcaagggtgtgttgctgctgattgatgaagcctatctatatgtagaaggaaaacaaagcgcaaacctggatatcttgcagaaatttccgaacgttattttggcacaaaccctttctaaagctcatggattggcaggagcaagagtcggctttttgatcggagggacagagttaatcggccatatttcaaatgtcagaccgctatatgagattagtgcgttatcggcatgggctgcggaatggcagctagatcatcctgaagtgcttgaacgttttcaggagaagatgaggcagacaaaagcctatatgagagaagctttgaccgaaagaagacagactttcaaagatactcacggtaatttcatgttggtacagtttgccggatacgattcaaaagagatagagcaattgtttcaagagcagggtattttaatcagacgtccgtttgaacagagtaatttaaaaggttggctgagagtaaccatttcacagcttgaacattgcgaaaaatttatttcggcacttgatatcgttgtagacaaattgaacttcaaaaaaatttga

SEQ ID NO: 7425 - DNA, 1191 bp, Photorhabdus luminescens
atgaagtcgttagcaattgcagagttgttcatcaatataggtaaagctatattgctactgagctttgccaaatttatgtatgatgaaacgggtcaaatatggcaaattagcttaatcttcatagctgaaatcttgatctcaaccattttaccaatattggttggcaagtcggttgataaccaaggtattaaaacggtgcttattggttcagccgtttgtcatgttgtcttttgtttggcaggtgtattggcattgactcaattgggcatgtccgtgtcgattttattgctaatatcggtgtttttgagttttcttgggccaatttcaaaaatggccttattcagtgttacaccacttctttctcaacatgatcgcttagaaaaagataacggtacactgacttccgcatttcagggcggtcagttgattggtatggccttatctgcctggttgctagatgagtttgactttatagcaattttgatgtttgtcgtctgtctatatagtgccgcgagctttttttactggcgagcaacagccaatttgtcgttagctgagtctccttcagatatagataaacgtgaagatccagaaaacctgtggcagttgtttaaagctagtaaaccctacatgcgctattttgttctaagtaattttgatttcgttactgtagccatattcaacattatgctggtttccgtcgtcagtcaggcatttgacggcagcacatactggcttgccggattagatgcctcattcgctattggagcgtttgttggtggcgctgttattgcgaagcaaataaggaacaaaagtacttctctaagcgatgttatcgctattcaggtcgcttttctaatctatctaggtttatgtttcacagaacaggcggtctatttgatgccgctcgcgattgtgagtatcggcttgtttcaaagttactcaggtatttactggcgcacactgctacataaacagctgccatctcacatgataggtaggctaagtagtattaagtatatcgtatcctcagtgcatatcgggattgtcgccatggtggtctcttacgcacatgaattaggtttccaatacgcaattgcaaccgcagctgtaattactattggccagattttatttgttgcaatcatcataaaacaatcactagccattgaaagcaaatcctcatcttag

SEQ ID NO: 7426 - DNA, 2307 bp, Photorhabdus luminescens
gtggatgctgtacacaaagaagtcctcgaacaaatagaaaatcttgatgtttgctttgatcacgttgtttcaattaatgagtttgaattgattgaggctgccttgatacgagaaaagctcaacattgcgggccctaaagtggccgatgtcgaaaaagttcgaaacaaaattgtgatgaaacactgtgttggcgctgtaaatattcgtattcctcagtacatgtctttgtccgattttatgaactcagaacgactagcgattcctccctcttcacaagttattttaaagcctctggatggtgcttcgtcagttgatgtggtcaagtttgacagtcagaaagttttggaacaggcgcttatagatcgcacaactggaattgtggctcttgataaagaaacacctgaacggattgaaaactttgaagttgaagaatttgtatccggtcctgtattgcatatcgacggcatgatccgtaacggacaaatagagatgattgtcgtcagccaatatatcaatacgttgctggattttgccaacggctatccagcagggtctgtgcagttagaaaccacggaagagatgaaaacctgggcgcttcaaatcttaaatgcggttgatatatctttgggggcgttccatcttgaagcgattcaaacagatacagggccggtgtttcttgaaatcgctcatcgtatcgggggagctagaatagctgaaactttgacgttacagacagggattcatccatcgatactggaacttggattgttgctagacccagacttcaaatttgaacttaactatgataccgggtacaaatatgcgtggtttattgtgcctggacatcagctgccaggaaactatggcttggtgtcggggcatgagtttctttatggcaaggaagaggttgtaatgctgaatcagcttacgatgcaacaacctttagtcaaagcggttacttataaagaaagtgaaattccgttagccggattattaaaagccaaatccgctaaagaactcacagatctgattgataggttgtttggacagttacaactaatatctgtcgatactcctttgccttatagcgagtgtatgccccagaaaaagaaacacgttcttgtgattggtaatattcgccaacctcataagacactggaagcacagggatatgctatttcttggatgtacaaaaaagtacctaattttacgcatacgactgaagatcacaatcgttgcgagcgaatattaatgtacagcaacgagtctgcaattcagttaatcagtttagcgcgttcaattgatcaactacaaaaaatcgattcagttgtgtcttttcacgatggagcccagcttgatgcattgactattgcaaatgctctagagctaccttttagtttgtcaatgggggctatagtcaacacgagagataaacaattaagtcgcaggattttacgcgaaaaaaacctgacagaagtgcaatcggcgatagcggagaatgagcaagatttacatgattttttcaagatttatccacaagtaaataaagttatcgttaaaccagttgctggtacaggcagtgaaaatgttcgatcgctagaaagtaaagagcttgaaaccgctaacttagacaacgtttaccctgtgctggtggaacagtttgtcgaaggtcgcgaattcagtgttgaagcattcatgcaagaaggtaaatgccatatttttgcaatcactgaaaaattcaaagatgcgcaaagctttatcgagacagggcatttggtgcctgcccgtttatctagcgatgagcacgagaaaattgctgcattcattgccaaggtgctacctgctctaggggtcgtgtcgggtattacgcacagcgaaattatgttgggtgaaaagatagagctaatagaaacacacactcgagtaggcggagacagaatttttgacctggtacagatgacgacaggaatagatatgtatcgtctacaagctctgcaaagtttgggtttgcctatcggtgaagacgaattaacaccaaaactaaacggtaaacatgcgtgtatcaaatttaaactcaacgatcatcctgggaaaaaggttattcgagtgaacggcgaggaagaaatcaaaaattggagtggtgttgaagatgtatctatcactcatcaggcaggtgaagtgctgccccaaatagtaaacagcttcgaccgctcagcctcggtgttggtgttgtgcgacagttctgaacaggcgctaagtattgcagaggaagccattcagaaacttgaatttgttgtaggtgagtag

SEQ ID NO: 7427 - DNA, 1254 bp, Photorhabdus luminescens
atgaattcaaagtactgcttgttactaggaacagagaaaaacagatttcgtgcattggttgccacggctagagcaaccaacatgaaaatagcgatcatggccccaagtggttatgttaatggaaaccgttacgctgatctagtgattgacggtaacccagaaaacattgaacaagctctggctgcagtacagacctttgccgagcgagaaggaatgcaaccgggcgcagttgttccattgacagaaatgacgatagccccgggggctcgtatcgctcagtactataatttaaattatttgtctgaaaaagcgctgacattaacccgcaacaaatttgaaatgcgtaaggctgcacatgcaggtgggttgaacgttccgaagtttgcacgttttaatcaccttgagcagctagcgacccttgctgaagattttccttttccagcagttgtaaagccgaccaacgccgggggcagtgaaggtgtaacctacgtagctagcaaagatgatttggctagtgcttttgctaacttgcgtcgagtgaccgaaaattatggtagtgagtttggtatagcagataacgattatcagatagaacagtttgtcgatgctagaattgagctttcggttgaagtactaaataccaaaactggaagacgtgtattggcagtgaccgataaagaactgaccccgttacctcattttgttgaaatcggccattccttaccaagtatagaatctgataacgaagcgcttaaacaagcagcgcttaaagcctgtgaagtcttggatgttgaacatggtatagctcatgttgaatttatgattgatcacagtggcaagatttacctactggagttgaatgcgcgtactccaggcggtggcattcctgaaatattcgaaaaaatagctggagtgaatatgctcgaacttcattctcgctcttatctatacgatgaagttgaagtacctgcatatcacatgtctggactagctgcgattggatttatgaaagctaagcaaggaacgattgagcgaattaagttgccagctcagcacgagttaccaaaaggggtatttggactgcaactttggacatccgaaggagctcgggtcaatccactatacagcaacgcagagcttgagggttatgttgaattcttctggccagactatgagctaaatggaaaaccgaaagagtacttgatgcttacacaacaattgactgaacaaattttcgaaatggatgaaagctaa

SEQ ID NO: 7428 - DNA, 750 bp, Photorhabdus luminescens
atgacatcttcaatctatgcgaagttcatgcaggggaaagttgaggtacttgaccttacagcgccgttgtcaacggaaacacctgtgattcgtttgccgcctgaacgagggcaaccttggccttttaagttggaaaaaataagccgttatgacgaaaaaggcaaagaagtttattggaataatatccagatgtccgagcatacagggactcattttgatgcccctgttcattggcggtcaggcaaagattctatcgatgtctcaagtgtacctcctagacacttggttgcgcctgccgctgtaattgatgtatctgatcaagtaacagccccagattttttactcgaacgtgaacatgtcgatcaatggtgcgaagtccatggacctttacctgtaggtggttggttgctattccgctcaggttgggacagtcgagactcagatgctgatacctttcttaatcatggtcataccccaggggtaagtgaagcttgtgcaaaatggttggctgagcaaacaccaattataggtatcggggtggagactgttggaaccgacgcgggtcaagccggaaaatttgaacaaccttaccccgtacactggtactttcacggggcgggaaaatatggcctgactcagttgaagaacctagcaaagttaccgccaacaggtgcagttatcatgatagcgccgcttcccatcgttggtggttcaggaagcccttgcagggtgttggcacttgttgaataa

SEQ ID NO: 7429 - DNA, 774 bp, Photorhabdus luminescens
atgtatatgtatcggatacgagagcatatcaagcgcctgcgcgattccatgaagtgtgttgacatgcctgtcactttcacagatcaagagattgttgaagcttgcatcgacctagtacgaaaaaacaactttaagcaacatgtgcatctggttatcgctccttattttgcgatggggaaaaacttcgacccacttatttataccgaagacactggtatgcatattacagcattacctatgccaaggtctgcgcgttatgacacagggatgacggcttcgttttcaacttggagacgaatcagtgacgattcaatgccaccgaggattaaaacaggagcaaattaccataatagccgcttagctcagcatgaagcgatgcgaaatggttttgatactgcgttttttctaaatcacagaggcactgtggctgaaggccctggatcttgcatcatgatggtcaaaaataaccgactgatcacgccgccaggttcagcaggcgtacttgaagggattacggtagacagcattataagactagcgaaggataagctttcggttgaatgtgaacgaagagaaattgatcgtaccgagttgtatttggctgatgaagttttcacctgtggcactctcgctgaaatcgttcctgtgattagtgttgaccgaaagtctattggggacgggcgtcctggtttgatgacccgtaagcttcaggttgcttatgaagacgaggtgatgtcgaattcgacatctgaatattcaacccctgtctattaa

SEQ ID NO: 7430 - DNA, 1623 bp, Photorhabdus luminescens
atgaatagttcaaataaaaccaagattgctattattggtgcaggtccagttggcctgattttatcagctcgactggcttcattcggtattacgagcatcgtgatggataaagccccttatctgcttcgaaaaggttctaaggcctgcctgatccacggcgatgcgctagaagtacttgataaagtcgggtgtggagaacagattgcaaaagaagggattcattggcggatagcgcacacctatattcgaaatgttgagaggatcacccaagaataccccgaacgccccggttatggtgaatttgtcaatatttcccaataccgtatagagcaagagctcgttaagctgttggaagctaatcccctatgtgaactcaggtggtcaagtgaagtcgttggttattcacaacaacaggacaaggttaagctagaggtaagacactgtaccgaaacggagaccctagaatttgattatgtaattgcctgcgatggagttagaagcacgttacgcgatctgacagaggttaactttaccggatacactcaccaagatcgttttttagttactgatattaaagcaaatattgctttaaccaaagaacgtcactttcattttgatcctcagtttaatccaggccgtcagttggtgatgcatcctcagcccgacaatatatggcgtatcgactggcaattgcctccagatgcggatattgaagctgaaaagaaaaatggccaactagacaagcgtatcaagtctgtcatcggtgatattccgtatcagattgactggatcagtacctatcgttttaaccagcgagttgtggagaagttcagactcaatcgactgttttttgctggtgatgcggctcactcatttccaccttatggctctcgcggcatgaacagcgggattcaagacgcagacaacctagcatggaaattggcgctagtaattagaggaagcgcaggggatgaattgttggatacttatcatgaggaaaggttccttgcagcgaaagagaatttgagactgacggaagccacgatacagttcatggtcccgccaacacctttgaagcaaatctggcgtgacaccgtgctgcgaatttcagaagtctggaaaccgcttcgtaagcaagtgaatcacgggaaaatgacagaaccttttacctacgaatcttctagtttgattgattataaccatcggacaccttatgtcggtgcgttctctccggatgtagtggtttatatcgacggagaaaaaagccgcttacgtaagttgttcgggaaagggtttgtttgtcttttttgcgcagacccaaataaggtgaagcagtatttaaataagcaaagccacacctataatggtttggattttagtttggttgctgctgtaccaaaaggatatttctcgccaaaagtggacgagagacttatcagtgttacttacgacgatattctgttttttgaaaccctgacagaaaaacaagattcattgtttgttatccgtcctgatggccatttagcaggacattacctgcttgataacgcaccgtctcttagtttaatcctggaaaaagtcagtggtactgattccttaacgtttcagcgtgaagcatcataa

SEQ ID NO: 7431 - DNA, 1287 bp, Photorhabdus luminescens
gtgctggatatattagaacttgagcatccaagatttactagtttgctttgtgattacagtgattcagaaacaatcactattaatcttagcattcacaccatattgcggtttgccaaggaaaataaagcaaccttcccatatcaggatgttgttcgcatgtatcataagacaggtaaacatttcgttcctgaatattttctcgagctgttgaatattactagaaaagagtgcgcaaaattaaacagtgaggaaattgagcaagtcacacgttttttgaatgtcttgttggataaatacgacggtacttatgactaccgctcttatctggcgcttgaattgttaaacatgcctgatgaccagacagagattaaagcatacgcagaagcgcaatcccacattgaccgtatgatgttactgcttacggcggatatactcaaatttgaacttggcgggttagtaacagagggaaattttagacatcagttaccagaacgtactttagttgaaaaacgttgtgctatggctctaaaagcggtgactccatacgtacaacgggctaagttgtcctatatttcatcggaatatgttatcgaatcagcaaaacattttattgccgcagtagagcaaaggaaaacacacaacgatgagcaaatgctgatgacaactaatttacccgtctatctcattcacgacgaatatatgttcattcgggtcttacaaacgttcgaatacactttctcttggattgcagttggtttgagggcgacaattgaagcttgcactgattcgcctagccaggcaagtattctggtcgaaagttgcgagaaaaaaattaaagaagccatcggttttttccatttactgtcttctatgcgtgcggaatcctttaaggtgtttcgtgcatatactgaaggcgcaagtgcgatccaatcaagaaactacaagcgtattgaatcactatgcagacaaccggatgaggatcggttgaactctattgcttacggctctgtccctgaagttcaagaaaaactgttggtgcggccaaataacttagaccttgcattgagtcaagcgcaacagagtggtcgtttcaatagcaacgactttggtgaggtcaaacaagccatgaaaagttttgctacgacgctgaaacgttggaagcaaacccattatggtcttgcgatgaagatgttgggtgagggctcgggtactggttacacggaaggcactccttatttggcttttgtcaaagacatccctgtttttgaaacccagcttgatgagtag

SEQ ID NO: 7432 - DNA, 1143 bp, Photorhabdus luminescens
atgtattcacctcaagcatttcgggacaattattttagcgggttgcatggccttgtccatcttgccagttgtagtatttctcctcgttctcagttccttgatgcagcgatggaaacgatgctagttgatatggcaaaaaatgagctggcgtgggtgtatttcgagcggcaaaccgaacaggccaggcgcttgtttgctgagtttataggcgcagatgcatcacaaatagcgattttgccaaacgcaacgatagctgcttatcaggttatttcaacgctagtagccaattccggagaacaaattctttgtacggaagatgaatttccgtctctgtcccatgtttggttgcaacaagcgagtcgtggactcgtcacgcgttgcatagaaagtcaggtttcagacgaaagttttgtcaccattacctgcgcaatgttgggcagcaatacatgtttagtttcagtaccgttagccagtttccgcacaggtagacgatacccggtcgaattaataacagaactcgctaatcaatcacaagttccaatattagtcgatgcataccaagggctaggtgctgaaaaaattaatgtcagtgaattgaattgtgattacctgatctgtggcagcatgaagtacatgttaggtttgccaggtattgcattcctttatgtaaaagatggcattcgtaacaccgttgcactggggctgactggatggcaaggacgtaaagagccatttgcttttaacccatcgttggtggatttccccgattgcgccaaacgatttgaaaccggaactcctgctgtgcccgcgctttatgcggcaagcagcgccttaactgcacttttgactttagattttgagcaaggtcggctgcatattcagacattagttgaacttgctatcgacattttggaaaaaggcgacgtgacaatcgtaaaggtccccggaacattattttcggcgcatattgctttgcttgttccaaatgttcctgcattggacacgcacttaaaacagcacaagataattacaagcccgcgaggtgagatgctcagacttgcgtttcatcactttaatacggcagacgaagttgttcaaacatgtagattgatttgcgcgtacttcaaaacccaaatatggtga

SEQ ID NO: 7433 - DNA, 702 bp, Photorhabdus luminescens
gtgataggaaatagggattattcaacaagtgtactgtctggtgaaggggatagcgattatgagaagtatatgcgcattcccacgctgctcaatttgcaagtaacgccagaaaagatgctccaccgtgatgaattattgtttcaggtggttcatcaatctactgagctttggctgaaactgagcaataatgagttggctgaagcgataaaaaagctatccaagaaagactttgttgctgcaaccgagttgattaagcggtccagctatcctattgagttaattactaagcaactcgaaatgttcaaatacatgactccgtatgactttcagaaagtaagacctgcattaggcaacggctcaggcttcgaatctccaggctggaggcggttgcaatcagttgggcgggaactccatcaaacttttattcgtattgttaagtctatgagtatcgacctgatgggcgtttataccgaggaagacaagtcgccgctttatttcctaatggaagaaatggtgagctgggatgaaatggtcagtttatggcgcagcagacattataaaatcgcagtacgtactatcggacttaacacgataggtaccaagggaactccgattgaaaaactgacggtgctgatgaataagcaattctttccagaactgtgggaattgcgtaccgaaatgactaataccaacagttactag

SEQ ID NO: 7434 - DNA, 876 bp, Photorhabdus luminescens
atgtctattttaatcgataaaaacaccaaagttatctgtcagggtttcactggcagccaaggtactttccattcagaacaagcgattgcttatggtacccaaatggttggtggggtaacgccgggtaaaggtggtactgaacatctaggattacctgttttcaatactgttcgtgaagcggtagaagcaaccggggcaacggcttctgttatctatgttcctgcgccattctgtaaagattccattctggaagcgatcgacgcaggtatcaaactgatcatcacgattactgaaggtatcccaacgctggatatgctggcggttaaagtaaaactggatgaagcgggtgtgcgtatgatcggccctaactgcccgggagtcattacgccagatgaatgtaagatcggtattatgccgggacacattcatcgagcaggtaaagttggtatcgtttcccgctcaggaacattgacttatgaagcggtaaagcagaccactgatgccggtttaggacaatctacttgtgttggtatcggtggtgaccctatccccggttctaacttcattgatatcctgaaattgttccaacaagatccgcaaacagaagccattgtaatgattggtgaaattggtggtactgcggaagaagaagcggcagcttatattaaacagcacgttactaagccggttgttgcctacatcgcgggtgtgactgcaccaaaaggtaagcgtatgggccatgctggtgcgattattgcgggtggtaaaggaaccgcagatgaaaaatttgctgctctggaagcggctggcgtgaagacggttcgcagtctggcagacatcggtgatgcggtgaaagatttacttgctggcaagtga

SEQ ID NO: 7435 - DNA, 1167 bp, Photorhabdus luminescens
atgaatttacacgagtatcaggcaaaacagctttttgcacggtatggtttacccgctccggctggttatgcctgcacgacaccgcgtgaagcagaagaagctgcatctaaaatcggctctggcccttgggtggtgaagtgccaggttcatgctggcggtcgcggtaaagcgggcggcgtgaaagtagttaacagtaaagaagaaattcgcgctttcgcagagcagtggctaggcaaacgtttggtcacttaccaaacagatgcgcaagggcagcctgttcgtcagattttagtggaagcggcaactgatattgcgaaggagctgtatcttggtgctgtggttgatcgtggtacacgtcgtgtagtgttcatggcctctactgaaggtggtgttgaaattgaaaaagttgcggaagagaccccggaactgattcataaagcgattatcgacccgctgattggtcctatgtcttatcaggggcgtgaactggcatttaaattgggtttaaccggtaaacaagttagccagttcactaaaattttcttagggttggcaaatctattcctggagcgcgatctggctctggttgaaattaacccattggttattacgactcaaggtgatttgatttgtctggatggcaaattgggcgctgatggtaacgcactgttccgtcaggctgaattgcgtgaaatgcatgacccatctcaggaagatcctcgtgaagctcaggcggcacagtgggagctgaactatgttgcgctggatggcaatattggttgcatggtaaacggtgcgggcttggcaatggggacgatggatatcgttaaattgcatggcggggcgccagctaacttccttgatgtcggtggtggtgcaaccaaagagcgtgttacagaagcgtttaagatcatcctgtcagatgaaaacgtgaaagcggtattggttaatatctttggtggtattgttcgttgtgacctgattgctgacggtattattggtgcggtggaagaagtcggggttcacgtaccggttgttgttcgtttggaagggaacaatgctgagctgggagcgaaaaaactggctgatagtggcttgaatatcattgctgcaaccagcctgacggacgcagctaagcaagcagtagccgcagtggaggcaaaataa

SEQ ID NO: 7436 - DNA, 1221 bp, Photorhabdus luminescens
atgagtagcgtagatattctggttccggatctgcctgagtctgttgctgatgccactgtggcagtctggcacaaaaaacagggtgaccgtgttgaacgtgatgaagtgctggttgaaatcgaaacagataaagttgtgctggaagtgccggccagtgaggcgggtgttttagaagccattttagaagagaaagatgccaccgttctgtcccgtcagcttcttggtcgtatccgcttgggcgatagcaccggcaagccggcagaaataaaagaaaaaacagaagcaactttggcgaaacgccagacggcgggtttagacgaagagagcaatgatgcactcagcccggcggtccgccgtttgattgcagagcatgatcttgatgccaaagcgattaaaggcagtggggttggtggacgcatcgtccgtgaagacgtggaaaaatacatggctgataacgaaaaagtggctagcaagccagcagaatcctctgctgcttctgcccagggttctctgttgccacaccgcagtgaaaagcgtgtgccaatgactcgcctgcgtaagcgtgtggctgaacgtctgctggaagcgaaaaacaacaccgcgatgttgacaacatttaatgaagttaacatgaagccaatccaagaaatgcgtaaacagtacggcgaggcgtttgaaaaacgccacggtgtgcgtctgggctttatgtctttctatgtgaaagccgtggttgaagcactgaaacgctatccagaagtgaatgcttctattgatggcactgatgtggtttaccacaactatttcgatatcagtattgcggtatcgacaccacgtggtctggtaacgccagtactgcgtgatgcggatgcgttgagcatggctgatctcgaaaaacgcattaaagagctggctatcaaaggccgcgacggcaaattgaccgttgaagagctaacgggtggtaactttaccattaccaatggcggtgtattcggctccttaatgtctacaccaatcattaacccaccacagagtgcgattcttggcatgcatgctataaaagatcggccaatggcggttaatggtcaggtggagatccttccaatgatgtacctggcattgtcttatgaccaccgtctgattgacgggcgtgagtctgtaggcttcttggtgaccatcaaagaaatgctggaagatcctgcacgtttgctgctggacgtatag

SEQ ID NO: 7437 - DNA, 2808 bp, Photorhabdus luminescens
atgcagaacggcgcaatgaaggactggctggattcaagcttcctggctggttcaaaccagtcttacgtagagcagatctatgaagactatataaccgatccaaactccgttgatgcaagttggagagagattttccaacaattgccgaatgcgggactcagcggtgaacaactccactcgcagacgcgtgattacttccgccgtcttgcgaaagatactacgcgttatcattcctctgtcagcgatccagcgatggatgcaaaacaagttaaagttttgcagctcatcaacgcatttcgcttccgcggtcatcaaaatgcgaaccttgacccgttgggattatggaaacaggatagtgttcctgatttagatccggctttccataatctgacggaagcggattttgcagaaacatttaacgtaggttcttttgcgatcggcaaagagacgatgaaattggctgatttgtatgaagcactgaaacgcacttattgcggttctattggtgctgaatacatgcatatcaccaatacggaagaaaaacgttggattcagcagcgtctggagtctgtcactgtcagctctcagtttagcgtagaggaaaaacatcgttttctggcggaactgacggcagccgaaggtttggagcgttatctgggagcgaagtttccgggagcgaaacgtttctctcttgaagggggtgatgcgctgatccccatgttgaaggatcttatccgccatgcaggtaaacatgacacacgagaagttgtgctgggaatggctcaccgtggtcgcctcaacgtcttggttaatatcttaggtaaaaaaccggctgatctgtttgatgagttttcgggtaagcataaagagcatctcggtaccggtgacgtgaaatatcatcaaggtttctcgtctgattttgccactgagggggctaaggttcatttggcattagcatttaacccatctcaccttgagattgttagccctgtcgttattggttcagtacgtgcccgccgtgaccgtctggatgaaggtcgcagtaatatggtattgccaatcactatccacggtgatgctgctgttaccggccaaggcgtggtgcaggaaactctgaacatgtctcaagctcgtggttatgaagtgggtggtacaattcgtatcatcatcaataaccagatcggtttcacaacgtctaacccaaaagatgcccgttcaacacaatactgtaccgatattatcaaaatggtacaggcaccgattttccacgttaatgcagacgatccagaagcggtggcatttgttacccgcctagcactggatttccgtaataccttcaaatgtgatgtgatgatcgatttggtttgctaccgccgtcatggtcacaacgaagctgatgagccaagtgcaactcagccaatgatgtatcagaaaattaagaaacacccaacgccacgtaaaatctatggtgacaagctggtggctgagaacttgatatcagtcgatgatgtgaccgagatagttaacctgtatcgtgatgcccttgaccgtggtgattgtgtcgttgatgagtggcgttcaatggggctgcactcatttacttgggagccttatcttaatcacgaatgggatgaagaatacctacataaagttgatgttaaacgtttgcaggatctcggtagacgcatcagttctgtcccggaagaagtgacaatgcactcgcgtgtagcgaaaatttataacgaccgtgcagagatggcaaacggcgataaattgttcgactggggtgccgcggaaacattgacctatgcaactttagtggatgaaggggttccggtacgtttgtctggtgaagatgccggtcgtggtactttcttccatcgtcatgcggttatccataatcaggctaacggttctgtttatgttcctctggcgaacgttcataacggtcagggagcatttaatgtttgggattctgttctgtcggaagaggcggtactggcgtttgagtatggctatgcaacaacagaacctcgcgctctgacaatctgggaagcacagtttggtgattttgccaatggtgcacaggttgttattgaccaattcatcagctctggtgaacagaaatggggccgtatgtgcggtctggtaatgttgctaccgcatggttatgaagggcagggacctgaacactcttcagcccgtttggagcgttatctgcaactgtgtgcagaacagaacatgcaggtttgtgtgccgtcaacgccggctcaggtctaccacatgcttcgccgtcaggctttgcgcggtatgcgccgtccgttgatcgttatgtcaccaaaatcactgttgcgtcatccattagccgtttctagcctggatgagttggctaacggtaaattccagacggttattggtgaaactgatgctctggatccgaaaggtattaaacgagtggtactttgctcaggtaaagtctattacgacctgttggagcaacgccgtaaaaatgaacaaactgatgttgctatcgtgcgtattgaacaactatatccattccctcatcaagatgttcagtcaacactggaacagtatgctcatgtacatgattttgtctggtgccaggaagagccattaaatcagggggcctggtattgcagtcagcacaacttccgtgaagtgatcccgttcggggcttctttacgttatgcaggtcgtcctgcgtctgcttccccggcagttggatatatgtcagttcaccagcaacaacaacaagagctggttaatgacgcactgaacgttgaataa

SEQ ID NO: 7438 - DNA, 717 bp, Photorhabdus luminescens
atgaaacttgaattttcgatttatcgttacaacccggatgttgacagcgctcctcatatgcaggattacacgctggaagcagaagaagggcgtgacatgatgttgctggatgcgttaatccagcttaaagaacaggacccaacactctctttccgtcgttcttgccgtgaaggtgtttgtggttctgacggcctcaacatgaatggtaaaaatggtctggcttgtattacgcctgtttcggctttgcggcgtggtagcaagaaaattgttatccgtccgttgccaggtttgccggttattcgtgatttggtggtcgatatggggcaattctatgcgcaatatgagaagattcgcccatatttgctgaatgacggtaaaaacccaccggcacgtgaacatttgcagtcacctgcgcaaagggaaaaactcgatggtctgtacgagtgtattctgtgtgcttgttgttcaacttcctgtccgtcattctggtggaatcctgataaatttattgggcctgcgggcttactggcagcatatcgcttcctgattgacagccgtgatactgaaacggcttcacgattagataagctgaatgatgctttcagtgttttccgctgccatagcatcatgaattgtgtcagtgtgtgccctaaggggttgaatccaacaaaagctataggccatattaagtctatgttgctaaagcatagtgcgtaa

SEQ ID NO: 7439 - DNA, 1767 bp, Photorhabdus luminescens
atgaaactgccagtaagagagtttgatgcagtcgttattggtgcaggtggcgctggcatgcgcgctgcgctacaaatttcacaaatgggattatcctgtgctttgatttccaaagtattcccaacccgttctcatactgtatctgcgcagggggggatcaccgttgcgttgggtaactcccatgacgataactgggaatggcacatgtatgacacggtgaaaggctccgactatatcggtgatcaggatgcgattgagtacatgtgtaagaccgggcccgaggccattctggaactggaacacatggggttgccattttcgcgtttggatgacggtcgtatttatcaacgtccattcggtggccagtcaaaaaactttggtggtgaacaggctgcacgtaccgctgcggcggcagaccgtaccggtcatgccctgttgcatacgctgtatcagcagaacttaaaaaatcacaccactattttttctgaatggtattcgttggatctggttaaaaatcaggatggcactattgttggttgtactgcgatctctattgaaaccggtgaagtggtttatttcaaagcgaaggcaacgattctggcaacgggtggtgccggtcgtatttatcaatcaaccactaacgcccacattaacaccggtgatggtgtaggtatggcgctgcgtgcgggtgtacctgtacaggatatggaaatgtggcaattccacccaaccggtattgccggagcaggtgttctggtaacagaaggctgccgtggtgaaggtggttatttgctgaataaagatggcgagcgctttatggagcgttacgcgccaaatgctaaagatctggctggtcgtgatgtcgtggcacgttccattatgatcgaaatccgcgaaggccgtggttgtgaaggtccttggggtcctcatgccaagctgaaattggatcatttgggcaaagaggtgctggaatctcgtctgccgggcattcttgagttatcccgtactttcgcccacgttgacccagtaaaagaacctatcccggttattccaacttgccactatatgatgggaggaatcccaactaaagtgaccggtcaggctctgatggttaacgaaaacggtgaagatgtggttattccgggtctgtttgctgtcggtgaaattgcctgtgtatcggttcatggcgcaaaccgtttgggggggaactcgctgttggacttagtggtgtttggccgttctgccggtttgcacctgaaagaatcgttgatggaacaagggactagccgcgaagccagcgaatcggatattgaaatatctttgcaacgtctgaaccgttggaatagtacccgtacgggtgaagatccggttaaaattcgtaaagatttgcaagcgtgtatgcagaacaacttctcggtattccgtgaaggtgatgcaatggcgaaagggctggaggaacttaaagttatccgtgaacgcttgaagagtgcgcgtctggatgatacttcctcagagttcaatactcagagaattgagtgtctggagcttgataacctgatggagacggcattttctacggctgctgctgctaatttccgtactgaaagccgtggtgctcacagccgtttcgactatccggaccgtgatgatgcgaactggttatgtcataccctctatctaccgcaaactgagaccatgactcgtcgtgatgtcaacatgcagccaaagctgcgtgaagcattcccgccgaaagcgcgtacttactaa

SEQ ID NO: 7440 - DNA, 348 bp, Photorhabdus luminescens
atggtaagtaacgcatctgcattgggtcgcacgggtatccatgattggctattattgcgcgcgtccgcaatgattattgttttatatgttctttatatgctgggctttatcgttacaacgccggatatcacttatgaagtctggcggggtttcttcgcctcatccatcactaaagtcttcactgtgctgacactgttttccattctggctcacgcctggattggtatgtggcaagtactcactgactatgtaaagccgctggcactgcgtttaatgctgcaattagcgattatcgttgcactgatggcttacttgatttacggaacaattgtggtgtggggggtatag

SEQ ID NO: 7441 - DNA, 333 bp, Photorhabdus luminescens
ctttccagtctctgcaatagtctcgatcttgcaccgtgtctccggcgtcatactttcgtagcagtaggaattctcctctggttgttagaaatgtctctatcctcgcaagaagggtttcagcaagccgccgatattatgacgggatttttcgctaagtttattgtgtggggcattctgactgcactggcttaccatatctgtggtggtgtccgccacatgctgatggatttcggctacttggaagaaaacttagcggttggtagtctctctgccaaagtggcaatcgggattgctgttattctgtcgattctggctggagtactggtatggtaa

SEQ ID NO: 7442 - DNA, 177 bp, Photorhabdus luminescens
ctgctacgaaagtatgacgccggagacacggtgcaagatcgagactattgcagagactggaaagtgtatcgtctgcaaatcaaggttgacaggtctttgttttttcacaattttgcccacacagctcttttattattttccttcctccggacttgggcggaaatcagacagcgataa

SEQ ID NO: 7443 - DNA, 1284 bp, Photorhabdus luminescens
atggcagataacaaagcaactctagccccagacggttcagttgctattgaattggacgtgctcacaccgacccttgggtccaaagtcatcgacgttcgtactctcggctcccaaggtttctatacctacgatcctggttttacttccacagcatcttgcgaatccaagatcacttacattgatggtaacgaaggtgtattgctgcaccgtggtttccctatcgaccagctagcgacaaaatccacttatctggaagtctgctatatcctgctgtatggtgaaacaccaacacaagaacagtttgataaattcaaaaaaaccattacccgccacaccatgattcacgaacagatccatcgcctgttcaacggtttccgccgtgattcgcatcctatggccgtactgtgtggtgttactggcgctctggctgctttctatcatgatgctctggacgtgaacaatccacgtcaccgtgacattaccgcctaccgcctgctgtcaaaaatgccgacagtggccgccatgtgctacaaatactctatcggtcagccattcgtttatccacgcaatgatctctcctatgcaggcaacttcctaaacatgatgttcgctacgccgtgtgaagagtataaagtgaacccagtactggaacgcgctatggatcgcatctttatcctacatgcggaccatgaacaaaatgcatctacctcaacagtacgtaccgcaggttcttctggcgctaacccatttgcctgtattgccgcaggtatcgcttctctttggggccccgctcatggcggcgcaaacgaagcttgtctgcgtatgttggaagaaattcagtcagttgaacatattccggaattcattaaacgcgccaaagataaaaatgatgctttccgtctgatgggatttggtcatcgcgtttacaaaaactatgatcctcgtgcaaccgtcatgcgtgaaacctgccatgaagtgctagatgaactcggcctgaatgacagcctgctggaagttgctatggaacttgaacgtatcgctctgcacgatccttattttattgagaaaaaactgtatccgaacgtggatttctactccggcattatcctgaaagcaatgggtattccatccactatgttcactgttattttcgccattgcccgtactatcggctggatcgctcactggaatgaaatgcatgatggtggcgtgaaaatcgctcgcccacgtcaactctataccggctacacaaaacgtgatttcgatagccagcttgaaaaataa

SEQ ID NO: 7444 - DNA, 744 bp, Photorhabdus luminescens
atgcgtaatattgagctggaaaatgtcattaaccaagagctgaatgttggtgattttcaggattatgcccccaatggtttacaagttgaggggcgtgctcatattcagcgaattgttactggtgtgaccgcttgtcaggctttattggatgaagcggttcgccttcaggctgatgctgttatcgtccatcatggctatttctggaaaaatgagccggcagtgattcgtggtatgaaacgtaatcgcctgaaaacgctgctctgtaatgatatcaatttatatggttatcatctgccccttgatgcccatccatcattgggaaataacgtgcaattggcccgtctgattaatgcgaaagtggtcgggttggttgagccattcgtgccgcatggggaatttgaacagccaataacaccggtggagttagctgcacgtatcgaacaggcgctgggtcgcaaagcgttgtatgtcggtgacaatgcacccgcagagattcgcaagcttgcttggtgtaccggcggtggtcagagttttattcaacaggcggcggaatttggtgttgatgcttttattaccggtgaagtgtcagagcagacggttcatatcgcccgcgaaatggggctgcatttttatgcggcgggtcatcatgccaccgaacgttatggtattaaggcgttgggggagtggttggctggtcattatggtctggatgtcacttttatcgatattccaaacccggtttaa

SEQ ID NO: 7445 - DNA, 210 bp, Photorhabdus luminescens
atgtcttcatatcgtgagtatccttggtatcaagttcttttacgccgtattggcgctgtcactttcggtatcctggcgtttccggttatgttgtttcgtcgtgatcgcgcccgtttttacagttatttgtatcgtgtatgggtaaaaaccagcgataagcccgtatggttaaaacagtcagagcaggttttggcaatcaaaagtagctga

SEQ ID NO: 7446 - DNA, 381 bp, Photorhabdus luminescens
atgaaagcattaactgttatattattgatattaataacaaatgtttcaggctgcgtctccaaaaaacacgctttttctattgactataaagcaaatggtgaaacttttcatttaactccattatgtatagaagaaatttttccggaaaaaggggataattactattccattttcatcaaagtaaaaaataactctcattgtagcaaaccatttaatctttttataaagcaaaacgtaggaaaaaaactatctgttttctttaacaataaaccaatattgaaaaataccaatataattacgccaatgcatgtcgaaaatggcttctatcaggcaatagattcgaatataacatttgaagaaatagtcaactctttaaattga

SEQ ID NO: 7447 - DNA, 1062 bp, Photorhabdus luminescens
ttgattttatccgaaatggagatcattatcctcgctatgaaaatattcattaccgatgaacaaaaagccgaacttgaacatctccatcacacctgccgtgataagagggagtgtgatcgcatcaaagcggtcctgctggcctctgaaggctggagttcagtgatgatcgctcaggccctgcgtcttcatgaaatgaccgttaaccgtcatatcagcgattaccttaatcaaggtaaacttaaatctgataatggggggtctgatagtttgctttctcaagaacaaactgattttttaatcaatcacttatctcaacatcttttccatcacacccatgaaatcgtggcctatgttgctcagctctggaatattacctttagcattcccggcatgaataaatggctacaccgtcagggtttttcttataaaaaaccttgtggcgtccctcataaattcgacgcagaaaaacagcgacaatttattgaatattatgagaatcttaaagtcacagcgaaagacgaacccatcctttttcttgatgctgttcacccgactcaaggcaccaaactcggttatggctggatgcgaaaaggcgagaaaaaaacagtaaaaacaacaggaagccggactcgcctgaatatattgggcgcgctcaacctgaatgccattggtcgtacggtgttccaggaatatcaaaccatcaatgactacaacatttgctgttttttcaatgaaataagaaagtcttatcctgactatcatcaaaaaattcatcttattgtggatggggcgggttacaacaaagctcatcttgttaaggagtgggcttatgttagcaatattgagttacattaccttcctccctatagcccaaatttaaacccaatagagcgattatggaaggtcatgaatgaacaggttcgaaataaccgttattttgcggataaacatgaatttcgagacaacgtcttcaaatttttcaccacaacgctaccggatatagcggactcgctgatgtctagaattaacgaccattttcaggtgctaaaaactgcatcttga

SEQ ID NO: 7448 - DNA, 1707 bp, Photorhabdus luminescens
atggcagcatccgcttttttattgatcaccagtttcttactgattttgatgctactggcaaagccactcggaaatattatcgccaacctgatcgacggtgatattccacgctggctaacaaaaatagagtctggcctttggcgttgctgtggcttacagaaacctggcggcacagtcaaagaaatgaactggtggcaatatgcattagctatcactatttttaatctaaccggactattactgctattcacgcttttagtcacacaacacgccctcccccttaatcctgaacatttccccgggctcaaatgggacctagcgctgaatacagccatcagctttatcaccaataccgattggcaggcatacagtggagaaaacacactaagttactttagccaaatgacaggtctaaccgtgcagaactttctttctgccgcgaccggtattgcggtggcatttgcgttgatacgcacattttcccgtcacggtgtcaacaccgcaggaaacgcttgggttgatatcacacgtatcacactttatctgctattaccgctgtctatggttatcgctctagtttttgtcagtcagggcgtgattcagaatttcgagccgtatcaattagctcataccattgaaggccaaccgcaattgatcccgatgggcccggtcgcttcacaggaagccatcaagttattgggaaccaatggtggtggattctttggggctaattcatcacacccctttgaaaatccaactgctatcagcaatttcattcaaatattgtctatcttcttgatcccttgtgcactctgttttgcctttgggcaagtggttggtgataaccgtcaagggcacactctattgtgggcaatgagcatcatcttcgtcattgccaccgtaggcgtcatgtatgccgaactgaaagggaatctccatttcagtctgttaggtgccaacagtaatatcaatatggaaggtaaagagaatcgctttggcatcctcgcaacctccatttatgccgtcgtaaccaccgccgcttcctgtggcgcagtcaatgccatgcatgattctttcactgcgcttggcggcatgatcccaatgtggttgatacaaattggcgaagtcgtgtttggcggtgtgggttctggtttatatggtatgttactgttcgttctgctaaccgtttttatcgccggtttaatgataggccgtgcgcctgaatatctcggtaagaaaatcgaagtattcgagatgaaaatggtggcactggcgattctggttaccccgacactggctcttttaggaacggcacttaccatatccactgccagtggacgcgccggtattctgaaccccggcgctcacggtttcagtgaagtgctctatgccctctcctccactgccaacaataatggcagtgctttcgccggcctcaataccaacaacatgttctacaacttgttgctagccatcatcctatttttgggtcgctttggcatgatcctgccagtacttgctattgccggctcgttggccgtaaaaaaacgccagcctgccagcaacggtacactgcccacctatggcccactgtttatcagtctattaattttaaccatcatgctaatcggtgcgttgacttttattccggctcttatccttggcccggtcattgaacatttacaaatctggctaatggctcggtaa

SEQ ID NO: 7449 - DNA, 2067 bp, Photorhabdus luminescens
atgaccaacaaacaacaaacattattcgaacccgttttgattcgtaatgccctgatggattcagtcaaaaaatgtcatcctgctgcacaatggcgcaacccagtgatgtttgtcgtctatctaggcagtggattaactaccattttatggattgccatgttagcgggtcaatttaagggaaatgctttgttcaccggtaacattgccttatggctatggtttaccgtgctattcgctaactttgccgaagcgctggcagaaggcagaagcaaagctcaggcggccagccttaaaggggtaagaaaaaccagttgggcaactaaactacactcagccaatcgtaatggttccagagagaaagccccttctgacagcctacgcaaaggggatatcgtcattattgaagccggtgaaaccatcccttgcgatggtgaagttatcgaaggtggcgcttctgttgacgaaagtgccatcaccggagaatctgcccccgttattcgcgaatctggcggtgatttttcctctgtgaccggcggcacccatgtactatctgactggctggtggtcgaatgttcagttaatcccggtgaaacgtttcttgaccgcatgatttcaatggtggaaggggctaaacgtcgtaaaaccccaaacgagatcgcactgactatcctgttgacagcgctgacaattatctttctattggtgtgtgtcactctgctgccattttcaatattcagcgtggagattaaccattctggccaacctatcactgtcacggtattgatagcgttattagtctgtcttattcctaccactattggcggtttactttctgccattggtgtcgcaggcatgagccgcatgctaagtgcgaatgttattgccaccagcggacgcgccgttgaagccgcgggtgatgtggatgtgctgctactggataaaaccggcaccatcactttgggaaatcgccaagcctctcagtttctgcccgtgcctggcataacagaacagcggctggcagatgccgcccaactctcttctttagccgatgaaacaccagaaggccgcagcattgtcattctggcaaaacagcgattcaatctgcgtgaacgtgatctgcgctcactgaacgcaacttttgtgcctttctctgccatgactcgaatgagtggtgttaatgtggaaaaccgcatgatccgcaaaggcgctgtcgatgcaatccgccgccatattgaagccaatcacggaaaattccctgaagccgtggaaattttggtacagaccgtggcgcggaaaggcggtactccgctggttgtcgcagaaaatcaacaggtactgggcgttgtcgcgctaaaagatatcgtcaaaggcggcattaaagagcgattcagtgaaatgcgccgtatgggaatcaaaaccgttatgattaccggcgataatcgtctaaccgcggctgcgattgccgcagaagctggagttgatgactttctggcggaagctacccccgaagccaaactagccctgatccgccaatatcaatccgaaggccgtctggttgccatgacaggtgatggcactaatgatgcccctgctcttgctcaagccgatgttgccgttgctatgaattcaggcactcaagcagccaaagaagccggcaatatggtggatctggattccaacccaaccaaactgattgaagttgtccatattggtaaacagatgttgatgacacgcggctctctgaccacattcagtatcgccaatgatatcgcaaaatattttgccattatccccgcggcatttgccgtcacttacccacaattaaatatcttgaatatcatgcacctgcactcgcctacttcggcggttttatcgaccgttatctttaatgcactgattattgttttcttgatcccgctagcgctaaaaggcgtgagctaccgcccaatgaatgcatcagcgcttttacgccgcaacctgtggatttatggtctgggtggtctgatagcgcctttcatcggcatcaaactgatagatctgttgctgactttgctgatacttaaataa

SEQ ID NO: 7450 - DNA, 582 bp, Photorhabdus luminescens
atgatttggttacgttcttctgttgtgttgttgatatttctgacactgattaccggcgtagcttatccattgctggcaacaggtttgtcagaactgatgtttccttatcaagcccaaggctctatggttaaacaagatggtcaaaccgttggctctgagctgattggtcaaccctttactaaagcgatctattttcagggtcgtccttctgctaccgtagattatccctataacaccctgtcctctggcggcagtaatttagcgactaccaacccgatattggatgatgaaatcaaacgcagagttgaacaactgcgtcaatttaatcgtcaacctgatatacctgtgccggttgatctggtcaccgcatccgcaagcggtcttgatcctcacatttcacccgccgccgctgactttcaagcacagagagtcgctgatgcacgccatttaccgattaaagtgataaaacaattaatcagggataatattgagcaccccccatcggaattcctcggtgagcccgtaattaatgtgttaaaacttaatcttgcccttgataatttaccagagaaaaaacagtaa

SEQ ID NO: 7451 - DNA, 2694 bp, Photorhabdus luminescens
atggatcaacacgaaccacagcgccctgaccctgatgaattactgacactggttaatgagaaacagcgcggtaaattaaagatatttttcggtgcctgcgctggcgtcggaaaaacctatgccatgttgcaggaagcgcaaagattgcgtgctcaaggactggatgtggttatcggcgtggtagaaacccatgagcggcaaggaactgccgctttacttgatggtctgccacaactgccactgaagcagatctactaccgacggcgcaaaatcagcgtctttgatcttgatgctgccattgcccgccacccggccatcattttgatggatgagttggcattcagtaatcctcacaccaaccgtcatcccaaacgctggcaagacgttgaagaactgcttgaagctggcatagatgtactgactaccatcaacgttcagcatctggaaagcctcaatgatgttgtgggggatattaccggtatccgggtcagggaaaccattcctgatcatatctttgatcaagcgaatgaaattgtcttagttgatctgcccccggatgatctgcgccagcggctcaatgaaggtaaagtctatattcctagccaggcagaacgtgctattgaacatttttttcgcaaaggtaatttgattgcattgcgggaactggctttgcgccggacggctgatcgggttgatgatcaaatgcgtgctttccgcgacacacaagggcatgaaccggtctggcatacccgtgataatcttctactatgcattggtaacagctcaggtaatgaaaagctcatccgcactgccgctcgccttgcggcccgattaggctgtatctggcatgcaatctacgttgaaaccccaaaactgtaccaactacccgaaggtaaacggcgctccatcttaaaagcgctcagattagcgcatgaattgggggctgaaaccgcgacgctttctgatccaaacaaagaaaaagcggtattacgttatgccagagaacataacctcggcaagattctgataggccgccgctgtacatccaaacagaaactgtttggctggcaatggcgttcaggttttgctgaccgactagggaaactagggccagatttggatctggtgattgtcgcattagaagaacgcagccactgggataaagaacaagacaaccgctctgtgagtgaaaaatggcgagtacagattcagggctgcctgatcgcgattgcgctctgtacacttatcaccttgttctcccgaacgtttttactgacccttgataaagccaatcttgtcacgctttacctgcttggcgtcgtcgtcattgcgctattttacggacgccgaccatcaatctttgctgcttttattaatgtcattagtttcgatatcttctttgtacagcctcattggtctcttgctgttaccgatatgcagtacctgctgacttttagtgtcatgctgatagtgggcgtcgtcgtcggaaacttaacagcaggaatgagatatcaggcgcgaattgcccgttaccgcgaacaacgaacccgcaatctctatgaaatgacccgtgaactgagccgagcgctgaatgaagaagatattgcccgcaccagctaccactttcttactaatggttttcaagctaaaactggcctctttttacccaacgacgatggcaatttatatcaactgacgaccaataatggcggtcacatgctgattgatgatgccattgcaaaatggagttttgataaaaacctgccggccggagcgggaacagatacgctacctagcgtaccttaccaactacagcctatcgccacaccttctcaaacactggcggtattggctattgagccctcctatttgcgccagttactgatccctgaacaacagcgattgctgcaaacatttaccggcctgatcgccaatgcgctggaaagattacaactctcacgccgggcagaatccgccaaattggatacagaaagggaacagttacgtaactcgcttctggcggccctgtctcacgatttacgcacaccgctgaccgtcctattcggacaagcggaaatcctgatgttggatctctctgccgaaggttctccacataccaaacaggtgaatcagatccgccaacaaattctcagcacttcccgtctggttaataacttactggacatggcgcgtatccaatcgggaggcattcagctcaatctggaatggcaatcgctggaagagatcgtcggcagtaccttacgttcgctggaatatgcactcaaccgtcatcccgtcgcggtttccctgccatcggatttactgttgcattgtgatgccagtttactggagcgggtatttatcaacctgttggaaaacgcaattaaatataccgatgaacaaataccattaggtattaaagcgacaacagaaaaaaatcaaattcatattgaagtttgggatgcaggcaaaggcattccgccggaacaagaacagttaattttcgataaattctcccgcgctcgtaaagaatctgctattcccggcgtgggccttggattggcaatttgccgggcaattattgaaattcaccaaggaaagatttgggcgagcaataacgaaaaaggtggagcaagttttcactttgttctaccgttagagaaaccgccagaaattattactgaggagatgtga

SEQ ID NO: 7452 - DNA, 693 bp, Photorhabdus luminescens
gtgattattaccaacaataacaccatcttgattattgaagatgaaaaagagatccgacgctttgtccggctagcgttggaaggtgaaggctatcgcgtatttgacagtgatacactgaaatggggcctgattgaagcgggaacccgtaagcctgacttaattattcttgatttgggattgccggatggtgacggtattaacctaatccgcgatctgcgccaatggagcgcaattcccgttattgttctctctgcccgtgataaagaagcggataaagttgcggccttggatgtcggcgcagatgattatctgagtaaaccctttggcatcagtgagctattggcaagagtccgggttgccttacgtcgttttgccagaaccaacagagaagaatcgatcgttcatttttctgatgtggttgtcgatctggttaaccgccgaatcactaaaaacgatgaagaactgcatctcaccccgattgaattccggttactcggtgaattattagcgaatagcggtaaagtactcacccaacgccaattactcaaccaagtttggggccctaattatgttgaacacaaccattatttacggatttatatggggcatttacgacaaaaattagaaaccgacccaaccagaccaaaacatttattgactgaaaccggcattggttatcggtttatgccttaa

SEQ ID NO: 7453 - DNA, 1533 bp, Photorhabdus luminescens
atgtctaacgataaaacaggaaaatcactagaacaggaaaacagcgaaagagatgtcgaaatacgtgaccgaaattattttcgaaaattgtccctattcgatgatactgttatagctggtgctgaaatgatcggcacaagttatgatgtttttggtaagtattgtaatgtgggaagttgtatgaattcgcttttcgatgagcgaaaaatcaatgccagtgaagataatttcaagaaggtcactattctcggcaaaaccctaaaagtcccctattatatcgattgttatagtgtcggggatttaaaatataccaatgcatcaggcgaatctattgagtcatatcaaagcaatatttccagtaaaagccgcattaaaggtaactatttattctttagtgcctcactgaaagtcgattttgatacggatagtctgacggattttgaaaatgcgttttcccgcattcagtatacttatgatctctatatacttaaaagttcagcagaagcactaaaagagtttcttaaagagagtgttaaaacagcccttgataaggcggatactgaggaggatatgaatgacctatttaatacttggggttctcactttctgagtggcgtggtcatgggcggctgtgcgcaatattcatcatctacgaacaaatatacgtcgaatctaacaaactcttttgatgtggttgccgcagcctcatttgcgggatttatcggtctctctgctcgtacaggaaattcatttatggaggatataaagaaatttcgttcagcatccaatataaaaacccacgccattggcggtgacttatctcgatttgatccttttggtggcgctacaagtgcagatcaaccttccgcagaagaaatagccgcagcgaaaaaagcctttgaagactggaaagccagtgtgcccaatgcccctgaattagttaactttgcagattccaaccccttgacggggatttgggaactgtgttcagacagaacacaaaaggccaagcttaaaaagcattttgaaactgtctgggctccggcggagtctgctaaacgacgtgtgcatgcggattatattgatgagattattattggaatcaataatactaacacccctcctgaagggtatattggattaaaatccactaaagacgaaaatctgaatagtaagggtaatatttgtctttttatgcataaagcaaaatatgatcccaatatcgataataaggattgtatcactgaattaaagttcatcactgtaagagataaaagtccggagggagattgggttaaaatccctcaagatatttatatctcacccaatcaatatttatatttgtgttacttaccagcgaaatattccgccgagaaggcgataaaggacattcaattgttatgcagcagttgtggttccagcatgatacttccttatggatataacgatgtcttagatgaaagaggtgagagagctaacgctactgaggatgataatgttcattatcttatctatagcgctgggtggaaatga

SEQ ID NO: 7454 - DNA, 828 bp, Photorhabdus luminescens
ttgcctttaacactggaacgccctatgtacaatctcattgccacagatctcgatggaacgcttctccttcaagaagatataattggtaagtttacccgtaaagtgcttactgatttatcaagtatgggaaagcaaattgtatttgcaaccggcaggcaccatgctgatgtaaattccattattggtgattttgatatacctgtgcatttgattacttcgaatggtgccagattaaccagtgcttgtaagaacttggatatcagacaacatttgccaagtcacatcgtaaaaagagtgattgaagaaactcaggtagataatgatttagtgatcaatatgtattgtggttctcaatggttaaccaatgaagtgaatcataattttagcgattttagccagaatgataattttaatccaacattcaagtgtgttgatgaaatgccttgtgatgcagttgaaaaagtttttttcattcataagagtagaaatcatgatgcattggttaaattagaacgccatttaattgatctcttttctgataatgtcagtattgctttttcattcccttggagtctggaggtaatggggagtggtgtttcgaaggggcaagctttaattcagctcgctggttttcttggtatcccaatgaataaaacgattgcatttggtgacggtatgaatgatgtggaaatgctttcaaccgtagctaaaggggtcatcatgggaacggcgcataatagggtaaaacaagctcttcctgatgccgatattattggttcttgttgtgaagagtctgtggctcattatttatctgaaaatatgtgctag

SEQ ID NO: 7455 - DNA, 681 bp, Photorhabdus luminescens
ttgcgaatgaataatcccaaaacagtggtaatttgtggtaaaggagaattggcaattttcatttgtcaatatttcttaaatcataaagagtataaaatatcgcacgtggtggcagataaattcgaacctgtaagcactgatcagacgttaattgatttctgttatcaaaataatattgctgttattgaagataataaggttgaaaatctacccggctatgaaaatggtgatttcacttgcgatttatgttttgtcgtatttcataagcggatattgcctttaaaattcattaattcatgtaagaaaatattaaatatccatttgtcttatttacctaaatatcgaggtgtaagaccggttaattgggctttgaaaaatggagatcaatctcatggcgtgacgatccatgaaatcaacgaaggtattgatgctgggccgattgtgaatcagatctcgttttctatttatcctgaatttgaagaggtcattgacacttatacacgggctattcgctatgccagacaattattccttgacacgatgctgatattggaaaaaataacaccaagacctcagattgattcagaggcgacaatttattatgaaaaggataatcatagtctggaagaaaggatgacatttaccaagcaggcatcgctcgaattgcttaataaagcttag

SEQ ID NO: 7456 - DNA, 1857 bp, Photorhabdus luminescens
atgcatatgaaaacagtaatacttctctgtgccggaagaggcagtagattatcaacgagaacatcaaataaaccaaaacctttggtagaaacaaatcagatatcatttatcgataatgcgctgaggaatatcgaatctgtcggtattaaaaaagttattattgtggtgggttataagagcgatgttttaatggctcatattaaacaaaacgcatataacttgcatattgaatttgttaatagcgataagtgggaatcgacgaataatatctattctttatatctcgccagaaattggattaagcaagataccctgattcttgaaggcgatatcttctttactaagaaatgcttggaaattgtcatgtcaaaagcgggagatcttaatgtacttgtttctcctcttagccaaaatatggaaggaacttacgcaaaagttgataatgataatatcgttgcgctaaattccaccaaagataacaactatcaggttgaagaaggtcaatataagacggtaaatatttataatatttgcaccgctaattttgctgaatatgttactaaagagctagaaagttacgttgatagtggatcgacggggttatattatgaggatatatttaaacactctttactgaataatatggctgaatttaaagcaagtattgttgataattctcaatggtatgaagtagataatacttatgatctggctatttgtgatttcatttcaagtaataataaattagatcttgtgcaaaacaggcatggtggatactggcgttatcctattattgactttggcttaatttacaatttcaactttccacctaaaaaattgaaagatgaaataaagaatcattttgatgaaatattattaaattatcctggcgggaatcgtttagtcgagcaggctttatctgaatttatcggaatagaaagaacgcaattatgtatttcaaatggcgctgctgagataattaaacggcttcctgatgtttatacaggcaaagtattagttactgtaccatcatttaatgaatatgctaattgctttggtaaagacagaacaatatttagctatagtaaagagagcagagattttgaaataaatattgatgaactattaacgttggcgaaagcagaaaagccaaatgtggtggtgattgagtcaccaaataatccgacaggtaaattgacgcctattgatagtctgttatatttggctggcgaattgtcggcattaaatatcgacttaattgttgatgaatctttcttagatttctctaaaatgcgtgatgacacaatgttaacgcatttagataactataagaatttatctgttattcgcagcatgagtaaaacctttggcattggtggtattcgtatcgggtatattgccaccgcaaatcaggaattacttggtaaaataagagctgtgttacccatttggaatatgaatggttttgctgaagagtttttattaagattaccgcaatatagagagagttataaattaagctgtgaaaaagtgattagtgatacattaaaattacaacaagaattaaactcaatcgagggtattaccgcatttgagacagattctaattttgtttactgtaaattgcatgtttctgatgcaaagacgatatcacggttactgttagatattcatggtctgtatgtgaaagagtgttctggcaaaggaaatataggctctgatctctatttacgtatttcttgcagaacaccaagtgataatgaaattttaataggttcattgcgtatggtgatgcaggggttaattaatattagtgatattagcgtggtcaaggaagttaacgaggtttgcgaatga

SEQ ID NO: 7457 - DNA, 1203 bp, Photorhabdus luminescens
ttgtcaatgaataagcagttttatgatgtggtaatgtgtggtgcaggtcctgcaaatatttcattaatcccggatttattaaaagatgaagctataaaaaattgtctgattttagaaaaaacagagatggtgggttctggttcattaaagaaatataaaattaccgcgaactctttaggtagtgtatttttagagaaatttgacggttgtgatgatgagcttagtcaatatataagatcaacatcggaatgggaacattttagtgccaataaagataagcccgttgaattgagatttgtcggccaatatttggagagaattgcccgctttattcaggaaaacaaatatggtgatcggtttaatattttgactgaagcggaagtgaaaaaaattaagcagaatgaagagggtaactatgatataacttatcataaaaataatgaagattatattgtatccgcgcgaaaagtactgtttaatataggtggaaatccaaacgaatccagattattgcataatagcaataatattacctctggtgattttattaaaggtttttatgatgaggttataaataaaggtgatgtaaaaagtatatcaatattgggttcatcacacagttcagtttcttgtttgattagacttattgagcaattagaatttgcaggaaaaataaatgtttttgtgaataaagatttcaagttgttttttgattcgccttcaagcgcagaatcttacgactacgattttacacaggaagatatttgccctttaagtaaccgagttaatagatattcaggtttaagatatgattcttttgcttttgcacaagaacttaaagaaagaaaatataaaaatatttctatcttgaatatttcagaaatttctgatgatgaagttattaaactcattaattgtgatgatttattgattcactgtacgggatatcactcaaaacttgtcgaaattattgataaaaataatattcctcttgaatttaaaagtgatagatatggtttgctaactaatgaaaaattaagtcctatatcgacgtcaggtgaagtacttaataattttcacacatttggtctgggatcgggtgtcaagacggggggtgaaaatggtggagaggcgagttttcatggaagaattgacggggtttgggtatatcagcatgttatatatgacatcgtatttaattga

SEQ ID NO: 7458 - DNA, 258 bp, Photorhabdus luminescens
gtggttattgatggtcatcatagactggaattagccaagacactaaaattaagttgtattccttgtctggcatttgattatgagaaggagctgttggtttattcccgcaatgagaataaaacaattaatcatcgtgatgttattaaggcgggtttagataaacaacctcttggttataaacagactcgtcatgagtttgccgggaatgttattgaaacacaaatttcgttaaaaatgttagggtttgtcaatgaataa

SEQ ID NO: 7459 - DNA, 1233 bp, Photorhabdus luminescens
atgaaaaatttttctcttagtaattatacatccataccggcatgtatatggggtctatttcttgggacttttgtaacaagatcaacatcaatgatggtatggccttttatatccatcatactatatacaaagtttcattttactgcatcgatgattggattagttctctctttatccattgcgatttcatcaatattaagtttttatgcgggttacttctctgataaagtcggccgggctaagataatcatcattggatgtcttatctcttcattggcatatttaatattatggttatctgaacatcaatctggttttattattggtactttattagcgaatatttcctgggcgctggtgaataacccaataaaagccgttatcggtgatattatcgaggaaaagcaggtaagagagaatgccatgtacttaaggtatttatttcttaatgcgggtgcggtagtcgggccttatttaggcgtaaaattaagcctggatattaattctatttcttttctgattgtttcactatcttatgtaatttttatgatccctgtttatttatttggtaagaaaataaaaataaaattaacaaataatgatgattttaaaggaacgatgaaggttttattaaatgaccgggtgtttttaatgttggtcataaataatattctcatgatgtttatttttggccattttgattcaactttgccacagttaattacttcattagggtttaatgggtatgctgagtttattgcttcgcttattatgttacatgcggtaaccattgtcgttatgcagttaccgttttccatattaacgcaaaaaatggcgttagaaacgaaaataaacgtagggtctgtattactcattttatctgaatttatgttctttatttcattcaaatattatgatgtttatttattgtggtatgtggctgcttttatcatgagtatcagtcaaactattttgtttccatgtgtgaatgtttttattgatcgtttggcaccaaatgatttacgtggcgcatattttggtgcagcgtcactctatagtatcggtttttctatatctccattggttggtggtactgttatccaattatttaatggtggagtgttatttcaattattagcgatattaagtgtattgatgttggtaattttctgtcggatgtttaaactaagggataaacatgaaattaatattagaagaagtctcaaatcttag

SEQ ID NO: 7460 - DNA, 429 bp, Photorhabdus luminescens
atgagtacctggcttatctatgccttattatcagcgtttactgccgctttagtcgctatcttcgggaaaatcgggttgcaaaatcttgatgccaatacagcaacagcaatacgcgcagtcattatggcgttgtttcttgtcggcgttgttgtcgtacagggaaagttaaatctggtgagtgaaatagtggcaaaccgcaaggcattgctttttatcgttttaagcggtgtggcgggggcattgtcatggctgttttactttctagcaattaaaaacggtcatgtttctcaggttgccccaattgataaactcagtgtcgtgtttgccgtcatcttcgccgttatcttatttggtgaaaaaatatcactgatggccgcaggtggtgttgcactgattactgccggtgcattaatggttgctctgggctga

SEQ ID NO: 7461 - DNA, 1641 bp, Photorhabdus luminescens
gtggtaaatcatccgcgcgcggggcagattgcccgccaaagtgatctgataaatgtagcgcagcttacatcacagtattacaccttgcatcctcagccggaaaactcagagcataaggttaaatttggtacatccggtcatcgtggcagttctcagcgtcacagttttaatgaggcgcatattctggcaattactcaggctgttgcggaagttcgcaagcaacggggaatcaatggcccttgttatgtgggtaaagatacccatgctttatcagaagcggcatttatttccgtattggaagtcttaacggctaacagcgtgaatgtgattgtgcaggaaaataatggatttacgccaacacctgcgatttctcatgccatcctctgttataaccgcttggggaaagcattagctgatggaattgttattaccccttcccataatcctcctgaagatggggggattaaatataatccacctgatggtggtcccgcagataccgatttgacagcaattatagaacgtcgtgccaacgagttgctcacggcaggtctgaaaggcattaaacgtttgccatttgttcaagtattgaacagtgaatatttgcatcagcaggatttagttgaaccgtatgttagcgcgttgggtgatgtggttgatatggctgctatccagcgggccgggttgaaaatcggtattgatcctttggggggttctggcattgcgttctggcagcgtatcggtgagcgttataatttggatctgacgctggttaatgatcaagttgatcagacattccgttttatgcacttggatcatgatggcgtcattcgtatggattgctcatccccttgggcaatggcgggtttgttagccatgcgcgataagtttgatctggcttttgcaaacgatcctgattatgaccgccacggtattgtcacccctgccggtttgatgaatcctaaccactatctggcaaccgcgataaattacctattccgccatcgtccgcaatggtcagaaagtgttgcgataggtaagacattggtatctagtgccatgattgatcgggttgtcgccgatcttggccgtaaattggtggaagtacccgtaggttttaaatggtttgttgatgggttacataaaggtgaattgggctttggcggagaggagagtgcgggggcttctttcctgcgttttgatggtacgccgtggtctacagataaagatgggattatcttgtgtttgctggcggcagaaatgaccgcagtaacaggggaaaatccgcagcagcattataataagttggcagctcgcttcggtacgccaagctatagccgcattcaggcaccggcaacttatcagcagaaagcattattagccaagttgtcaccagaaatggtgaaagcggataagcttgccggtgatccaatcaccgcccggttgacaaaagcttcgggtaacggcgcgtcaataggcggtctaaaagtgataacagaaaacggctggtttgctgctcgcccatcggggacagaagaagcctacaaaatttattgtgaaagcctgcttggccctgagcatcggcagaaaattgagcaggaagcactggatattgttaaccaggtttttgccgccggttga

SEQ ID NO: 7462 - DNA, 525 bp, Photorhabdus luminescens
atgaaaacgatagaagttgatgaagacctttaccgctatattgccagccacacacaacatattggtgaaagtgcatctgatattttacggcgaatgttgaaatttaacgccgagcagccagtacaaaatgtgcagcctctcagtgctgtggagaaagcgccggtagcccgccagcgtgattctgtccgtgtgatacgtgaattgttactttcagatgactattctgataagaaaaaatctgttgagcgttttatgttgatcttatctacgttatacagcctgaacagtgaaagtttttcccagacgactgataccatgcatggtcgtacccgtgtttattttgctggtgatggacagacattgctcgccagtggtaaacaaactaaacctcgccacattccgggcacacctttttgggtcattactaacaccaatactgatcgtaagcgtaatatggttgagcaaattatgcaggacatgaaattctcagccaattttatcgacaaggtgtgtggcacaatttaa

SEQ ID NO: 7463 - DNA, 966 bp, Photorhabdus luminescens
atgaatctctacggacttgttgctgatattggcggcactaatgccagattagcactttgcaatttggaaaatggggttattgagcggatcgaaacatatagtgcaaaacaacacgccggattagaatctattatcagtcactatttagcagagcaaaaaacagtagtgacttatgcatgtattgctattgcttgcccgataaacggtgattgggtagaaatgaccaatcaccaatgggcattttctattagtgagctgaaacggacacttgggctagaaaaattagatgtgatcaatgacttcacggctgtatctatggctattccaatgctgacagaagaatacaagcttcaattaggaggaggagaagcggttaaagacaaaccgatagcggtttacggggcagggactggcctcggtgtcgctcatttgatcaaggtagacaagcaatgggtaagcttaccgggtgaaggtggtcatgtagattttgccgcgaatagtgaagaacaagatgcaatattggctgttttacggcgtaaatttgggcatgtttcagtagaaagaatcttgtccggtagtggattggtaaacctttatcaggccattgccattttggatcatcgtcagccggaagatttagaaccagaaaccgtgacgcaacgagcattggataaaagttgccaatattgccatcgtgctctgacactattttgtgaaattatggggcgatttggcggaaatttagcgttaaatatggggacttttggtggtgtgtatatcgctggtggtatagtgccgcggtttcttgatttctttaggcaatcgaactttcttcatggatttgaagataaagggcgctttaaaccgttagtacaacagattcctgtttatttgattactcatccacaaccaggattattaggttcaggtacctatttacggcaacagctttcacttattgattaa

SEQ ID NO: 7464 - DNA, 108 bp, Photorhabdus luminescens
atgaatattaaaggccatcggatggttaatccgatgaccttagctacgtttccgttatctatttcagaaatgcgcggatcaattctaaaagcgcaactaatgctttga

SEQ ID NO: 7465 - DNA, 168 bp, Photorhabdus luminescens
gtgagtcatgcgatagagtttatcgaaactagtatgtttacccgacagataaaagagattgccactgatgatgaacttaaagaactgcaacgagagcttatcgagtcaccagataaaggtgatctaatacgtggtactgggggttacgtaaaatcagaatggctatag

SEQ ID NO: 7466 - DNA, 174 bp, Photorhabdus luminescens
atggctataggctcacaaggaaaaaatggtagtgccagagttatttatcttctagcgactgaagatattatctatctggtgatggcttatccgaaaagtaaaaaagatagcttaacggatgccgagaaagcagaactgaaaaaactaacaaaattactaaaagatgaggtgtaa

SEQ ID NO: 7467 - DNA, 285 bp, Photorhabdus luminescens
atgagtttttttgacgaattaaaagcatccctagaagaagcagttgaaattaaacaaggtaataaagccgcagcgcgtgtaacccgatacgaagttaccgacgttaaagctatccgtgctcaacttaacatttcacagacagagatggcggaggctttaggcactagccttgatacaattaaaagctgggagcagaagcgtcgaaatccgacaggactagcggcaaaggtgttagctatcatccaagaaaaccctagtttctataaagccctggcgacgcattga

SEQ ID NO: 7468 - DNA, 513 bp, Photorhabdus luminescens
atgattgggcgattagctcagttggtagagcatctcccttacaaggagggggtcatcagttcgaatctggtatcgcccaccaatcataaattcagtggtatagaagcagtaatagtcatcatgaagtgggcgattagctcagttggtagagcatctcccttacaaggagggggtcatcagttcgaatctggtatcgcccaccacttcattaagattgtttcaggcggtatcacatatctttggtgcgggtcgttagctcagtcggtagagcagttgacttttaatcaattggtcgcaggttcgaatcctgcacgacccaccactccaaaagatattcagagtagttctcctatagatgggtcgttagctcagtcggtagagcagttgacttttaatcaattggtcgcaggttcgaatcctgcacgacccaccactccaaaagatatccagaatagttccccctatagatgggtcgttagctcagccggtagagtaagaacagttggcttttaa

SEQ ID NO: 7469 - DNA, 1419 bp, Photorhabdus luminescens
atgagtaaaattaaaacccgtttcgcaccaagcccaactggctatctccatgttggtggtgctcgtaccgcactttattcctggctgtatagccgccataacaaaggcgaatttgtattgcgtatcgaagatactgaccttgaacgctcaactcaggaagctatcaatgccattatggacggtatgaactggttaaatctgaattgggatgaaggcccttattatcagacgaaacgttttgatcgttataatcaggcaattgatcaaatgctagaacaaggcaatgcctatcgctgctattgttctaaagaacatctggaagcgttgcgggaaactcaaatggcaaatggcgagaaaccgcgttatgacggccgttgccgtgataatccatgtcaacatgacccagctcaaccccatgttgtccgtttccgcaatccacaggaaggttctgttatttttaatgatcagatccgaggcccaattgagttcagcaatcaggaacttgatgatctgattatccgtcgtaccgatggctcgccaacgtataatttctgtgttgttatcgatgactgggatatggagatcacccatgtcatccgcggtgaagaccatatcaataatacacctcgccaaatcaatattctgaaagcactcggcgctcccgtgccagaatatgcacacgtttcgatgatcctcggtgatgacggtaaaaaattatccaaacgtcacggtgcagtgagcgttatgcaataccgtgatgatggctacctgccagaagcactgctgaattatttggtgcgtttgggttggtcgcacggtgatcaagaaattttcagcattgaagaaatgactgagctgttcagcctggatgctatcaataaatccgccagcgcattcaatacagaaaaactgcaatggctgaatcatcactatattaataccctgcctccagagaaagttgccgttcatctagcatggcatattgagcaacaaggtattgattcccgtaatggcccacagttggttgatctaattaaattactgggcgaacgctgtaagacgctgaaagagatggcggaatcctgccgctacttctatgaagattttgctgaatttgatgccgatgcggcgaagaaacatttgcgcccagttgcccgtcaacctcttgaagttgtccatgcaaagctggcttcaattactgattggacaccagaaaatgtgcatcatgccattcaatccaccgctgatgagctagaagtcggtatgggtaaagtgggtatgccattgcgtgttgcggctaccggtgcgggtcaatccccaggtgtggatgtcactattcacgctatcgggcaaccccgtactctctcccgtattaatcaagcgctagagttcattgctcaacgtgaaactcaatcttaa

SEQ ID NO: 7470 - DNA, 123 bp, Photorhabdus luminescens
atgcgccccgttccattaattttgattggggctatagctcagctgggagagcgcttgcatggcatgcaagaggtcagcggttcgatcccgcttagctccaccaaatcctttatattgaaataa

SEQ ID NO: 7471 - DNA, 216 bp, Photorhabdus luminescens
atggaaaaagagaacctgatagaaattgctaatactgcaatgccgttcggtaaatacaaagggcgtatgctcattgacttaccggaagagtatttattgtggttcgctcgtaagggtgaatttccacaaggtaaattgggtgcgctgatggaaatgactttagcaataaaactagagggactagattcgttggtgaagccattgaaaaaaggctag

SEQ ID NO: 7472 - DNA, 1185 bp, Photorhabdus luminescens
atgtctcaaatcctgcatttctttttagctttgattgtcattggcggccttgctattttggcgagtagtgaccgtaaaagtattcgtcctcgctatgttattcaattgcttgttattgaacttatcttggcttggtttttcctgaattctggtattggtcaggaatttgtcatgggatttgctggtttgtttgagcatttactgaaatatgcgggtgaagggactgaattcatttttggcggcatgatggatgcaaaactggcattcttctttctgaatgtattgtgtccgattatctttatttctgcgctgattggtattttgcagcatatcaagctattgccaatcatcatccgggttattggtactctgctgtccaaagtcaacggtatgggtaaactggaatcatttaacgcagtcagttctttgatacttgggcagtctgaaaactttattgcttataaagatgtactgggaaaaatgtcagagcgtcgtatgtatacgatggcggcgactgcaatgtcaacggtttctatgtcaatcgttggtgcttacatgacaattttagcgcctaaatatgttgtagcggcattggtgcttaatatgttcagtacctttatcatcctatcattgattaatccgtatgctgttgacagtgaagaagatattcagatgagcaatcttcacgaaggtcaaagctttttcgaaatgctaggtgaatatattttggcaggtttcaaagtggccctcattgtcgctgctatgttgattggtttcattgccctgattgcggcggttaatgcgttgttcagcatggtgtttgagaagagctttcaggaaatgctcggctacgtattttatccatttgcttgggtgattgggattcccacagatgaagcatcgaaggttggtagcatcatggcaactaaattggttgctaacgaatttgtggcgatgcacagcttacaatcaattgtgacagaactttctcctcgttcacagggcattttgtcggtattcttggtttcttttgctaacttctcttccattgggattgtggcaggggcgattaaaggcttgaatgagaaacagggtaatgtcgtttcccgctttggtttgaaactactgtttggttcaacgcttgtcagtttcttgtctgcggctattgcaggtttgttactgtaa

SEQ ID NO: 7473 - DNA, 2019 bp, Photorhabdus luminescens
atgaaatcaactgctcaacaaatagaaaagctcagaacaacactgcgtcatcatgaatatctgtatcacgtcatggatgcaccagaaatccctgatgcagaatatgatcggttaatgcaggaattgcaggatcttgaagaacaataccctgagttgattacatcggattcaccaacgcagcggattggcgctgctcctctggcggcttttgaacaggtccgccatgaaattcctatgttgtcattggataacgtatttgatgaagagagttatctggcgtttgataagcgggtgcgtgaccgcctgaaagagacccaggatttagtggtgtgctgtgagctgaaactggatggtttggcggtcagcctgttgtatgaaaatggtgaattggtacgggctgcaactcgtggtgatggtacaacaggggaaaatattacatcaaatatacggactatcggcgcaattccactgcgtctattcggcgaaaatattccagctcgtattgaaattcgcggtgaagttttcatgccgcaaaaagggtttgagaaactgaatgaggaagctcgccgcacgggtgcaaaagtatttgctaacccacgtaatgcggcggctggctctttacgtcagctcgatccccgtattacggctaaacgtccattggctttcttctgttatggtgttggtatattggaggggggagagttacccgccagtcattacgaacgattgatacagtttaagaaatggggattgccggtcagcgataaagttaaagtttgtaccgatagtcaacaggttattgatttttatcatgatattgtaaaccagcgttccgcattggggtttgatatcgatggtgttgttgtcaaaatcaattcgctggaattgcaggaaatattgggctttgttgcccgggcgccacgttgggccacagcattcaaatttcctgctcaggagcaaatgacgattgttcgtgatgttgagtttcaggttggtcgtactggtgcaatcacaccggtagcacgtctggagccagtacaggtctctggtgtcattgtcagtaatgcaacattgcacaatgcggatgagattgaacgtttaggtttgcggattggcgatacggttattatccgccgtgccggtgatgtgattccacaagttgtcggtgttttggaagagagaaggccacaggacagtaatgtagttgttttccctgaacattgcccggtatgtggggcagatattgaaaggattgaaggggaagctgtcgcgcgttgtacggggggattggtgtgtggtgctcagcgtaaagaagcgcttaggcattttgtttcccgtcgggcgatggatgttgacggcatgggagaaaagattatcgatcagctagtggataaagagtatgtcaaaaccccggcagatcttttcaggctgacggcaggtaaattgaccgggcttgatcgcatggggccgaaatctgcccagaatgtagtagatgcgttggaaaaagcaaaaaaaaccacctttgcccgttttctttatgcattgggtatccgtgaagttggggaagcgaccgctgctaatctggctgctcactttggcgaactggataaattacgttctgctgatgaggaagcattgaaagaggttcaggatgttggcgaagtggtggcgaaacatgttgttaacttcttcattgaacctcataaccaaacagttattgacgatctgattgatgatattggtatcaactgggaaccggtcgtcgtaacgagagctgagaagattgatagcccattttcgggtaaaacagttgtactgacaggctccttgcatcagttatcccgggatgaagccaaagctaaacttgttgcacttggggcaaaggtgacgggcagcgtttctaagaaaacagatttagtgattgcgggtgaagccgctggttcaaaattagctaaagcgaatgagttaaatattccggttattgatgaagaagaaatgatccgtttattgggtgaataa

SEQ ID NO: 7474 - DNA, 912 bp, Photorhabdus luminescens
atgatgcaggatttgcgtctgatattaatcattgttggtgcgatagcaataatagctttgctgttacatgggttgtggaccagccgtaaagagcgttcttcgctttttcgtgatcgcccagttaaacgtcataaacatgatcgtcagaatagtttcgtcgatgacagtgatgatgaagcgttcgacaatcagcaaaagccttatgcccataagcaggtgaaatctcatcaggagtataaagctgagccagctatcgagcgtcgtcagcaaaaattgactgaaattgatgctgcaacgcctgaagaaagcgatgatccgttgctgacgggccgtcagcctgaaacgacagcgagaagggcagctatagaagagcaggaaccccaactcggtctgtttgaatttgaagagcagaatgagtctgaaagaaacggatctgcgattgaagaaaaatctcaggaggcggctggcgaaaaagaagctcagaccaaagtgaaagaaattgttttggttcttcacgtagcagcacaccacggccaggaattgaatggtgagtccttgctgcaaagtattctacaatctggcttccagtttggggaaatgcagatttttcatcgtcacgtgaacccatcaggtagcggcccggtcctgtttagtttggcaaatatggtgaaaccgggttcatttaatcctgaaacaatggttgattttacgactccaggggtttccatatttatgatggtcccttcttacggagaatctagtcagaattttaaactgatgttgcaggcggcccagcgtattgcttctgatgttgggggtgtggtgcttgatgatgagcgaaaaatgctgacaccgcaaaaaatcgaattgtataaggcacgtattcgcagcacacttggtgttcaggtataa

SEQ ID NO: 7475 - DNA, 771 bp, Photorhabdus luminescens
atgctgaatttgacaaaatcgccaaaaaatttgagcggctttcagtatttggtgcaaggttgcaaattaattactcgcccaggcattaaaagatttgtcttattgcctttgttggcaaatgttttgtttctcggtggctcattttggtggctctaccaaaaactggagaattggctcccttggatagtgagcaaagtaccagattggatgcaatggctcagttatattttatggccgctggccgtgatctctgttttgctgatttttacttacttcttcagcacaatagcgaattttatcgcagcgccattcaatggcttgctggcagagaaactggaagcggatttaacaggaatccccgcaccggataccggcgttatcgcactcttcaaagatgttccacgtatcctgaaacgggaattagtcaagctgcgctactatattccacgcgctctgatcttgttgctactctattttattcctgttatcggccagactgccgcacctgtgctctggtttattttcagtgcatggatgttatcgattcagtattgtgattacccctttgataaccataaagtcagttttccaacaatgcgtagtgcccttcgccaaaacaaaataattaatctgcaatttggcgcaacagtgaatattttaaccatgatacccattgtcaatttggtcattatgcctattgccgtatgcgcagcgacggcaatgtgggtcgatcgctatcgagatcaacacgctcctcgtattatgccgtga

SEQ ID NO: 7476 - DNA, 954 bp, Photorhabdus luminescens
atgaataaaatttacgaagataattctttgactattggtcgtaccccgttaattcgcctaaaacactttggcaatgggcgtattctggcaaaagtagaatcccgtaacccaagttttagtgtaaaatgtcgcattggttccaacatgatttgggatgctgaaaaacacggtatcctacaacccgggaaagagttggtagaacctaccagcggtaataccgggatagcccttgcttatgttgccgccgctcggggctacaaattaacgctgactatgccagaaaccatgagtattgagcgccgcaagctattgaaagcattgggagcgcaactggtgctgacggaaggcgctaaaggtatgaagggtgccattgagaaagctaacgagattaaagctagcgatcccgatcgttatattatcctgcaacagtttagcaatccggcaaacccggaaatccatgaaaaaaccacaggcccggaaatctgggaagacacagacggtgaagtagatgtatttgttaccggtgtagggactggcggtacattaacaggggttgcccgttacctgaaaaacaccaaaggtaaaaatatcaccacggttgctgtagagccggaagaatcacccgtcatcagccagactctggccggtgaagaagtgaaaccgggtccccataagattcaaggtattggtgcaggtttcattccagataaccttgatttgacactggttgatcgcgttttcaaaatcagcagtgaggaagctatcaaaaccgcacgtgaaatcatggtaaaagagggcattctggcaggtatctcctctggagccgccgttgcagcagcggtgaaactttctcaggaaccagaatataaagataaaaatatcgtcgtcattctggcttcatcaggtgaacgttatctaagcagtgtactgtttgctgacttgtctgatgaataa

SEQ ID NO: 7477 - DNA, 258 bp, Photorhabdus luminescens
atgttccagcaagaagtcactattactgcaccaaatggcctacacacccgtcccgctgcacagtttgttaaagaagccaaaagtttcgcctccgacattactctgacttccggtggtaaaactgccagtgccaaaagcctatttaagctacaaactttgggactcactcaaggcactgtagtgaccatttctgctgaaggtgaagatgagcaaaaagcaatcgagcatctggttaagttgatggcagaactggaataa

SEQ ID NO: 7478 - DNA, 1728 bp, Photorhabdus luminescens
atgatttcaggcatattagtatcaccaggcattgctttcggtaaagcactattactgaaagaagactcaatcattatcaatcagaaaaaaattagccaagagcaaatcgaacaagaaatttcctatttcaagcaaggtcgtgaaaaagcctcatctcagctagaaatcatcaagaacatagcagcaaaaaacctcggagaagaaaaagctgaaatcttcgaagggcatatcatgctattggaagatgaagaacttgagcaagaaattattgcgttaatcaaaaacgatttaaaaacctcagatgccgcggtttattctgttattgaaacccaggcccaagcccttgaagaattagatgatgaatacctgaaagaacgtgccacagacgtgcgtgatatcgggaaacgcttgctgaaaaacattctcggtatacccattgttgatcttggctccatttcagaagaagtcattctggttgccaacgatttgactccatctgaaaccgcacaactcaatctggaaaaagtactcggctttattaccgatttaggtggccgaacttcccacacgtcaatcatggcccgctctcttgaactgccagcgatcgtgggtaccactcaagcgacgacgacaatccagaatggtgattacctaattctggacgcagtaaataaccatatttacatcaacccgtctgatgcagaaattgaacagcttaaaaagaccaaaaacgaatatctgtcagaaaaagctgaacttgcaaagttgaaagatctcccggcaatgactcttgatggtcatcaagttgaagtctgtgccaatatcggtaccgtccgtgatgtgatcggcgctgaacgtaatggtgccgaaggtgtcggtttataccgtacagaatttctgtttatggatcgtgatgcactgccaacagaagaagaacaattccaagcttataaagccgtggccgaagcaataggcagccaagcggttattatacgtacgatggatatcggtggtgataaaaatctgccctatatgaatctaccgaaagaagagaatccattccttggttggcgtgcaattcgtatttgccttgatcgaaaagagatcttacattctcagttacgtgctatcttacgtgcatctgctttcggtaaattacgtattatgtttccaatgattatttctgtagaagaagtacaagagctgaaagtagaacttgaattgctgaaaggccagcttcgcgaagaaggtaaaaaattcgatgaagcaatcgaagtgggagtgatgatagaaacaccagcttcagcagttattgctcatcacctggcaaaagaagttgactttttcagtattgggacaaacgatctaactcagtatactctagctgtagaccgcggtaacgagttgatttctcatctttataacccgatgctaccagcagtattgagcctgattaagcaaaccatcgatgcttcacacgctgaaggtaaatggacggggatgtgtggcgagcttgcaggtgatgaacgtgctaccttgttgctattaggcatggggctggatgagtttagtatgagtgcgatttctattccccgcatcaagaaaatcattcgtaatacgcgttacgaagatgcaaaagcgctagctgagcaagccctttctcagtctaccgctaaggggttgatagcattggttgataccttcatcaaagaaaaaacactttgctaa

SEQ ID NO: 7479 - DNA, 510 bp, Photorhabdus luminescens
atgggtctgtttgataaactgaaatctctagtttcagatgataaaaaaaacagcggcactattgaaattatcgcacctttatctggtgagattgtcaatattgaagatgttccagatgttgtcttcgccgagaaaattgtcggcgacggtatcgctataaaacctgccggcaacaagatagttgcaccagttgatggaaccatcggcaaaatatttgaaaccaaccatgcattttctatcgaatcggacagcggtattgagctatttgtccattttggtattgatacggttgagcttaaaggtgaaggctttaaacgtattgctgaagaaggtcagcgtgtacaaaaaggtgatttagttttggaattcgatcttaaattccttgaagagagagcaaaatcgaccctgacacctgttgttatttccaacatggatgaaattaaagagttatccaagttgagtggttctgtcactgttggtgaaacacccattatgcgtattaaaaagtag

SEQ ID NO: 7480 - DNA, 882 bp, Photorhabdus luminescens
gtggcaagcttggaacattttataggtaacaccccgctggtaaaattacaacgaatcaccgataagctagggggggaaatatgggtgaagcttgaaggtaataatccggcaggctcgataaaggacagaacagcgctatcaatgattcagcaagctgaattgcgcggtgaaatttctcccggtgacgtattaattgaagccactagcggaaatacgggtattgcgttagcaatgattgccgcagtgaaaggttatcaccttaaattactgatgcctgataatatgagccttgagcgtcaggcttctatgcgagcttatggtgcagaactgattttagtgagtagagcaatgggcatggaaggtgcacgtgatttagctcagcaaatggagcgtaatggtgaaggtaaagttcttgatcaattcaataacccagataatcctttagcgcattttacgacgacagggccggaaatttggcagcagacgcaagggcgtattacacattttgtttccagtatgggaacgacgggaaccattaccggtgttagccgctatttaaaaagccagtctaatcgtgtacagattattggcttacaaccggcggagaatagccatattcccggtattcgccgttggtcgccggcttatttgcctggcattttccgcaaggagctagttgatcaagtgctggatatcactcagaaagaagctgaagataccatgcgtttattagctcagaaagaagggattttctgtggagttagttccggcggtgctgttgctggagcattaagtattgcagcacaaaatccaggttctgttattgttaccattatttgcgatcgtggtgatagatatctttctaccggagtatttaattaa

SEQ ID NO: 7481 - DNA, 1089 bp, Photorhabdus luminescens
atgagtattgaaattaacaatattagtaaatattttggtcggactcaggttctgagcgatatcactctgaatgttttttctggagaaatggttgctctgcttggtccgtcaggctccggtaaaacaaccttgttgaggattattgctggtctggaacaacaaaccgcggggaagttgagtttccatgggcaagatgttagccgtatgcatgctaaagatcggcaagttggattcgtatttcagcattatgcactgtttcggcatatgaccgtgtttgataatgttgcttttggattgacagtactgccacgacgtaggcgtccgaatatggcggctatccgccgtaaggtgatggagttgctggaaatggtgcaattgacgcattttgctgaacgttatccatcgcaactttctggtggacaaaaacagcgggtggcgttggcaagagcattggctgttgaaccacaaattctattactcgatgagccatttggtgcactggatgctcaggtaagaatggagttacgccgttggctacgccagctccatgaagagcttaaatttaccagcgtctttgtcactcacgatcaggaagaagcgatggaagtggctgaccgggttgttgttatgagacaagggaatattgaacaggtaggtacgccacaagaggtatggcgttatccggcaagccgttttgtgatggagttcttgggtgaggtcaatcattttagtggagaaattaaaggctctcagttgttgattggcggacagcacttgcctctcaatgtgacgccaatccatcaggggaatgttgatgtattcttgcgtccgtgggatatcatgatgaactcgcaaccgacactttccagtccattgccggtacaggtgaccgaggtcagtcctagagggcatttctggcagctttcggttcagcccctaggctggcatcatgaatcggttgctgttgtttggtttgatgaaacttcagtacccacaagaggaaatcgttattttattggtggcactgaggcgcgtttatatgcgggtgataaacaattgcaaacactaagtttagcccaaacggcctga

SEQ ID NO: 7482 - DNA, 846 bp, Photorhabdus luminescens
atggttgaattatctgaatcttatgtagcgcaacgaccacctgtaaattgggcgaaatggacgttgatcataacaggcgtattgttttcaatcttactgttagtgatcccgattgtctggatatttatgactgccttttctaaaggcgttgagatagtcactgagaatcttttagatcctgatatgttgcatgccatctggttaacgatactgatcgcgttaattaccgtcccggtaaacctaatttttggcgtcatgattgcttggctggtaacgcgctttcagtttccagggcggcaatgtttattgacattaatcgacattccgtttgctgtttcgccggtcgtagctggtttgatctacctattgttttatggttcgaatggctgggccggaagtttgctggaaccctatgatatccaattgatgttttcttggccggggatggccttagtaacgatatttgtgacttgtcctttcgttgttcgagagctggtgccgatgatgcttagtcaggggagtcaggaggatgaagctgcaattttattgggggcatctggttggaaaatgttttggcgggtgacattacctaatatccgttgggcgttgttatatggcgtggttttgaccaatgcccgggcaattggtgaatttggtgctgtctcagtggtatccggtgctattcgtggtgaaacttacacattgccgttgcaggttgaattactgcatcaagattacaacaccgtaggggcatttactgcggcggcattgttagcattgatggcaattatcactttgattgttaaaagtgctttgcagtggcggttaagtcgccaacatggttaa

SEQ ID NO: 7483 - DNA, 834 bp, Photorhabdus luminescens
atgttttcgagatccagtaagcgagtattgcctggttttgggttgagtttaggcagtagtttgttctatacctgtttgattttattgttacccctgagtgcattagttgtgcagctttccagtatgacttgggaacagtattggcaggtgattgctaatccccaagttgtagcagcttataaagtgacattgctagcagcagcggttgccagcttgtttaatgcggtgtttggtatgttgatggcatgggttttaacccgctatcgtttcccaggccgtagcttattggatggtttgatggatctcccttttgcgttacctactgcggtagcgggattgacattggcaacgctattctctgtgagtggttggtatggctctttgcttgggcactttgatgtgaaagtagtaaatacttggttgggtattgcggtagcgatggcgtttacaagtctgccatttgtagtgcgaacgattcagccggtacttgaagagctagggccagaatatgaagaagcagctcaaacattaggcgctaatcgttggcaaactttctggcgggttgtattgccagaattatctccggctttaattgccggcaccgcactctcttttacccgcagcctgggggagtttggtgcagtgatctttattgccggtaacattgcatggcagacagaagtggtatcgctgatgatttttatccgcttacaggagtttgattaccccgcagccagtgctatcgcatcagttatattggcaatatccctgatattactatttagcattaatactctgcaaagccgctttggtaggcggattggagggcattaa

SEQ ID NO: 7484 - DNA, 1023 bp, Photorhabdus luminescens
atgaaaaagtattcaataaaaaatacgatactaaacggactggtagtagtaactttattaggcagcagtcatgcctttgctgtagagctattaaacagctcttatgatgttgcgcgtgagttattttctgcattgaatcctgaatttgaaaaacagtggaatgagcagtatccacaagataagttgataatcaaacaatcccacgctggctcctccaaacaagcactggcaattcttcaaggattgcgggctgatgtggtgacttacaatcaggtaacggatgtgcaaattttgcatgatcgtggcaatctgatctcggctgattggcagaaccgcctgccaaatagcagttcaccttactattccacgatggcgtttctcgtgcgtaaaggtaaccccaaaaatattcgtaattgggatgatttagtgcgtcaggatgtcaaattagtcttgccaaaccctaaaacctccggtaatggccgttatgcttatttggccgcttggggggttattcaacaggaaaatggtggagatcagggtaaaactcgcgaatggatgcaacgtttcctgaaaaatgttgctgtgtttgatactggtggtcgcggggcaacaacgtcatttattgagcgtggtttgggcgatgtactgatcagtttcgaatctgaagtgaacaacattcgcaagcagtatggtgaggataaatatgaagtgctcgttccaccggtaggtattctggcggaattccctgtggcttggattgataagcatattgcgaaaaacggtacagagaaagcggctaaagcttatctgaattatctttatagcccacaagcacagcagatcattaccagttttaattatcgtgtcagtaataaaaacgtgatgaatcaacagagagcccgttttccagcaactaagctgtttcgattggaagatcaatttggtagttggccacaagtgatgaaaactcactttaatactggcggtatactggaccaattgctggccgaggggcataagtaa

SEQ ID NO: 7485 - DNA, 609 bp, Photorhabdus luminescens
atgcagaagtatactttaactaacatgttgtcaggattgcgttttttcataataagtggtgcattgttgctggccggttgtacggggtcatcgggtttttcatggtcggatttgtctcctattagctggtttggtagccccttaaaaatctcagatcagggggtgggggaaataaatgctctgacagcaatgaatgaagaggcaatagaaaaggggttggatggaaagtaccacttacgcagtggtatggaaacaaaaaatggccaattggtgacagtatttcaagcaatggatagtgatcaattgaagatagcgttatttggtcaggctgatggaaaagtcaatcgcattgaagtgttggatgaagatattaaaaccgtctggggaacaaaggtcggcatgccattttcggcactttatagcaaagcatttgatgtttgccgaaatgcggtgagtgaatcagagaagagcgcgattgtctgcgtatccccacagagcaaacatgtcagttatctgtttacaggtaattggaatggccctgaaggcttgattccttctgatgatgtactgaaaaactggaaagtggaacgtatcatttggaagcgataa

SEQ ID NO: 7486 - DNA, 420 bp, Photorhabdus luminescens
atgatgaaaaaaatatttataaccactgctttgattactttgttcagtatgccgtcaatggctcaagcctcacaaacgcaatttggtggtttttctggtcccgattcaacacagcctccggtccaagcagtaccacaaggtggttttatcgatcaaaatgcgagagtttccaccacccaacaagttaaaaatatgagagacgacagttgggtcgtgctggaagggcatattgaatcccgtatccacagtgatcacttcatattccgcgataatgccggaattgttgaagttgaagttgatcataaatactggaatggtcaaacgataacgcctcaagatagagtccgccttgaaggtgaagtcgataaagagtggaatggtatgactgttgatgtgaaaaaagtcaccaaattgaactaa

SEQ ID NO: 7487 - DNA, 432 bp, Photorhabdus luminescens
atggaaattcgggtatttcgacaagatgattttgaagaagtgatcaccttatgggaacgctgcgatttacttaatcctggtgttgaccctgaagtggatatcgagcgtaaattgacgcatgatcctgacctgtttttagttgcggaagtggttggtgaagtggttgggacgattatgggtggttatgatggtcatcgtggttcagcttattatttaggagttcatcctgaatttcgcggtaggggaattgcgaatgcattaattgcccggttggagaagaaattgattgctcgtggttgcccaaaaatagttcttattgttcctgaagataatgatgccactatctatatgtgtgaaaaactggaatatgaagatcgtcatcaagagagcgttattttcagtaagcgtttgattgttgatcaggaatattga

SEQ ID NO: 7488 - DNA, 909 bp, Photorhabdus luminescens
atgaatacaccaaacattaatcagattaaatcttttttcctttcattacaggatgaaatttgccaacaactggaacaaatagatggtaaagagaaatttactgagcagtgctggcaacgagaagaaggtggcggaggccgtagtcgaattatgaaagaaggcacgatatttgaacaagcaggcgctaatttttctcatgtatcaggagatatgcttcctttatcagcaacagctcaccgccctgaactggttggtcgtcattatcaggcgatgggcgtctccctcgttattcatcctttgaatccctatataccgaccagccatgctaatgttaggttctttattgcagaaaaagaaggtgaagcgccagtatggtggttcggtgggggttttgatttaacaccttattatggttttaaggaagatgctattcattggcacaccactgccagaaatatatgtcgaccctatggagaagatgtttacccaaaatataaagaatggtgtgataattatttctatattaaacatcgtaacgaagcccgcggaattggtggcttattctatgacgacttaaatacacctgactttgaacattgttttaattttactcaagatataggtaaagggttcctttctgcctatctacctattgtggaaaaaagaaaggagatattatggggtgaacgtgaacggcaatttcaattatatcgccgtggtcgctatgtagaatttaacctcgtttgggacagaggaactttatttggattacaaagtgggggacgaacagaatctatcttaatgtccatgccaccattagctcgctgggaacatgattatcaccctgaacccgaatctgcggaagccgctttatataccgactttctacccgcaaaaaactggatatga

SEQ ID NO: 7489 - DNA, 1098 bp, Photorhabdus luminescens
atgcaaatacaaaacaataactacagaggcttaataccgccgtacattcttcaaaatatttataataatgacaataaaaagaagaaagtattaatgacattaaatcatactaagagtttaatgttggacactgttattaacgaatcatccgatgattccgacgatgatgataaagttaccaaaacaactatacatcgttctattcacgatgcagaaaataaacgcaagttgccaggaaaattagtacgagatgaaggagacccagataacggagataaatcagttgataacgcatatagatatttagaagcaacttacaatttctataaagaagttttcaaccgcaattcattagatgataaaggaatgaaattgattgccaccgtgcattatggcgaagaatatatgaatgcattctggggcaacggacaaatggtatttggcgacggagatggcaaaacctttaatgatttcacaacctctgtcgatgtgatcggccatgaattatcacatggtgttattgaaaaaaccgcagatttggtctatttcttccagtctggcgcgttgaatgaatcaatagcggatgtttttggtacattagtaaaacaacattatctgaaacaaaaagctgaagaagctgattggattataggtagtgaattactgggcaaagacgttaaaggcgtagggattcgttcaatgaaaaacccaggcagtgcatatgatgataaggagctcggtaaagatccacagcctggtcatatggatgattataaagacttgccgatttatagagacaatggtggagttcatattaattcgggtattcctaataaagccttctataatctggcgataaaattaggtggatatgcctgggaaagagcaggaaaaatatggtacaacaccttgttggataaagatcttgcacgtgatactaacttcgtatccttcgctaaattaacaattaaacatgctcgtgagttatttgatgaagatgttgaaaaagcaacgattgatagctggacagaagtgggcgttaaagtgaaggaagataaagacgataaggacaaaaataaagataaaactgaagagtaa

SEQ ID NO: 7490 - DNA, 318 bp, Photorhabdus luminescens
atgaataataaaacgctcaaactcacaactgatagtaaaatcacaatttccctacaaggaggatttgccgctacacctggccttaaccaagataagacagtgaatttagaatcattatcttcacaccaacaacagttatttcttcaagccatagagcaagacttttccgattctatgccatcagcaccatatcctgataaagattattatctgctcagtatcgtcaatggaaatgaagaataccacttcacccttcctgagtcagatgcaccggaaatcattactcagatatggaacaccgacaaaaagggtggttaa

SEQ ID NO: 7491 - DNA, 1482 bp, Photorhabdus luminescens
atgatacctgtcgtcgctctggtagggcgcccaaatgtgggtaagtccacattatttaaccgtttaacccgtacaagagatgcgctggtagcggattttccaggtctgactcgcgaccgtaaatatggtcgagctgaggttgaagggcaggagtttatcatcattgataccggtggtatcgatggcactgaagatggtgtggaaacccatatggcagctcaatctttgttggcgattgaagaggccgatattgttctgtttatggtagatgctcgtgccgggctcatgccagcagaccacgcgatagcaaaacatctacgtggtcgtgaaaaagctacttttttggtcgcgaataaaactgacggtgttgatattgataccgctattgctgaattttattcccttggattgggggatatctattctatcgcggcttctcatggtcgtggtgtcactcaacttatcgaacgagtactgttgcctttttccggcaaaggtgaagaagaagtggttgagttgactgaggaagaggccaacgcagcttattgggcagagcaggaacagaatgaaattgagatggtagaagaggaggaggattttgatccatcaactctgccattgaaactagccattgtcggtaagccaaatgtgggcaagtctacgttgactaaccgtatcttgggtgaagaaagggttgtggtttacgatatgccaggcactacccgtgacagtatttatattccaatggagcgggatggccgtgaatatatccttattgataccgcgggggtacgtaagcggggtaagatcactgaaacagttgaaaaattttcagtcatcaaaacccttcaagcgattgaagatgctaacgttgtattgctggtgatcgatgcgcgagaaggcatttccgatcaagatttgtcattattgggttttattcttaatagcgggcgctcattggttattgcggtcaataaatgggatggtatgtcacaggaagataaagagcgtgtgaaagagatgctggattatcgtcttggttttgttgactttgccagagtacattttatctctgctctacatggtagtggggtgggaaatctgtttgactcgattcttgaggcttatgattgcgccactcgtcgtgtcaatacttcactgctaactcgtatcatgcatatggccgaagaagatcatcaaccgccgatgatccgtggtcgcagggtgaaaatgaaatatgctcatgctggtggttataatccgccaattgttgtgatccacggtaatcaggtaaccgatttgcctgattcttataagcgttatctgatgaactatttccgccgatccctaaaagtgatggggacgcccattcggattcaatttaaagaaggggcgaatccctatgctgacaaacgtaatacgttgacaccaaatcaaatgcgtaaacgtaaacgtctgatggcgcatctgaaaaagcgttaa

SEQ ID NO: 7492 - DNA, 1173 bp, Photorhabdus luminescens
atgcaactgcgtaaaacactcttggttggtttggtggcttccgttctgctagccggttgttcaacggagcaagatacagtaacgatgtcaccattgccacaggtcgaaaatcaatttaatccaagcgaagtttgggataaatctgtcggtgatggtgtaggccgttattattctcacttgacgccaacctggcagggctccgctgtttatgttgctgatcgtcatggcatcgttaaggcgttggacattgatagtggtaaagagatatggtcggtgaatctggcggaaaaagcgggtttcctctcttctcgtatacctgcattgctctctggtggtctgaccgttgctggggatcatctatatgtaggtactgaacgtgccaaagttattgcattgaataccaaagacggccaagttgcctggcaatccgacgttgccggtgaagcattgtcgcgtcctgtggtgagtgatggtctggtgctgattcataccagtaatgggatgttgcaggcattaaacgagtcagatggtaaagtgcagtggtccgttaatttggatacaccatcattatcattgcgtggtgaatcggcacctgccgcggcttacggtgctgccatcgtgggtggggataatggtcgtgtcaacgccgtcttgatttctcaagggcagttgatttggcaacaacgtatttctcaggtaaccagttctacagaaatcggtcgtcttaatgatgttgatacgacaccggttatttctgatggcgtgatatatgcaatagcttataacggtaatctggtggcgcttgatatgcgttcaggtcagatcctctggaagcgcgatttgggttcagtgaacgagatggttgtttatggtgataatatctatattgttgaccaaaacgatcgtgttatgggtctgcgtcaaagtgatggtgtcactttgtggactcagacaaaattgcaacaccgtaatttaaccgcgcctgaaatgtataatggctatctggttgtcggtgacagtgaaggttatctgcactggctgaatatggatgacggtaagtttgttgcccaacataaagttgatagctccggtttaatgagtcgtccggttgttgccagtgataaattgatggtacaggcgaaagacggtacggtttatctgtttacgcgttga

SEQ ID NO: 7493 - DNA, 621 bp, Photorhabdus luminescens
gtggaagtctataccaatgaaaacgaacaagtagacgtgattcgtcgcttttttgccaataatggtaaagccttggttttagggctggtgttgggggccggggcgctgattggctggcgttactggcaatctcatcagacaaatcagttgcaggaaagtgcagaagcttttgaacgagtagatcgaggattaattaccagtacaaaagagagtcatactgctgccgaaaaatttgccagtgaaaccaataacagttatggcgtgatggcgcatatgcatttggctcaacttgctgttgaaaagaatgaattaactaaagcagatcagtttttatctgcggctaccggccaggtaaaaaatgaggatttgcaggctctggtgaatattcgcctagccagggttcaattggcggaagataaagcggatgctgcgctgaaaacattggaacaggtcaaaggttccggttgggttggcgttgcagaggatattcgcggtgatgcactggtgaaaaaaggtgatattgctggtgcccgcgcagcgtataccaaaggtttgagctcaaattcaccacaggcgatcaaatcgatgttaaatcttaaattgaataacttatccagctaa

SEQ ID NO: 7494 - DNA, 1278 bp, Photorhabdus luminescens
gtggcaaaaaatatccaagctattcgaggcatgaatgactacttgccggcagatacggttatctggcagcgtatcgaaactattttgaaacgagtactggcgggttatggttatagtgagatccgcacaccgattgtagagcagaccccgttatttagacgggctattggggaagtcactgatgtggttgaaaaggagatgtatacctttgatgatcgcaatggtgaaagtgtgaccctacgccctgaaaataccgcaggttgtgtgcgtgccggtattgaacatggtctgctgtacaatcaggaacagcgcgtatggtatttagggccaatgttccgttatgagcgtccacaaaaaggccgttatcgccaattttatcagttaggtgctgaagtttttggtcttcaggggcctgatattgatgccgaacttattttattgactgctcgctggtggcgtgagctcggtatttttgagcatgtgacgcttgaactgaattccattggttcgttggcggcacgcgctaattaccgcgaagcgttggtggcttttcttgaacagcaccaagataagctggatgaagattgcaaacgccgtatgtacagcaatccattacgtgttctggattcaaaaaatccagaggttcagcaacttcttaacgatgcaccggaactgtgtgattatcttgatgccgaatcaaaggaacattttgatggcctgtgtgcacttcttgatggggcaggtatcaaatatcggattaatcagcgtttggttcgtggtctggattattataaccgcacagtatttgaatgggtgacaacggcactcggggctcaagggacggtctgtgccggtggtcggtacgatgggttggttgagcaactggggggtcgaccaacgcctgctgtgggttttgccatggggatggagcgtctgattttgctggtgcaagaaattaatccagcatttgttgcggagcggacagttgcagatgtttatctcgcttcttttggtgaaggtagtcagcaagcggcattgattttggctgaacaagtacgtgatacgttgccccaattgcgtttaatgatgaaccacggcggagggaactttaagaagcaactggggcgtgcggataaacaaggcgccaaaattgcattgattctcggtgaggatgaagttcgttctggtcaagtagccattaaagatttacgtacaggtgagcaacaaacgttgccgcaaagcgaaattgcagctcgtttggttgaactgttaagttaa

SEQ ID NO: 7495 - DNA, 1122 bp, Photorhabdus luminescens
atgcataatgaatcgccgataaaaagacgcaaatctacgcgtatttatgtaggcaatgtgcccgtcggggatggtgcgcccattgcggtgcagtcaatgacaaacacacgtactacagatgtggaagcgactgttaaacagattaaatcgcttgagcgtgttggcgttgatattgtccgtgtatcaataccaacgatggacgcagccgaagcatttaaattgattaagcagcaagctaatgttcctttagttgcagatattcattttgattaccgtatcgcacttaaagttgcagagtatggtgtcgattgtctgcggattaaccctggtaatatcggtaatgaagcgcgtatccgtgaggttgtggcggctgcccgcgataaaaatatcccaatccgcattggtgtaaatggcggatcactggaaaaggacattcaggaaaaatatggtgagccaaccccggaagcattgctggaatcggctatgcgccatgtggatattcttaacaggcttaatttcgatcagtttaaaatcagtgtaaaagcgtcggatgtctttctggcggttggcgcttaccgtttattggcccaagagattgagcagccattgcatcttggtattactgaggccggtggcgctcgtgcaggctctgtaaaatctgccattggcttgggtatcctcctgtcggaaggtatcggtgataccctacgtatttctttggcggccgatccggtcgaagaagttaaagtgggttttgacattctgaaagcattacgtattcgttcccgtggtataaattttatcgcttgtccaacctgttcccgtcaggaatttgatgttattggcacagtgaatgccttagaacagcgtttagaagatttactcacaccgatggatgtttctattatcggttgtgtggttaacgggcccggcgaggcggaggtttctactctgggtgtcaccggtgccagaaccaaaagtggtttttatgaagatgggatacggcagaaagtgcgtctcgataatgctgatatgatcgatcagcttgaggctaagatccgtgctaaagcatcaatgctcgatgaaaataagcgcattggcataagtcaactggacaaataa

SEQ ID NO: 7496 - DNA, 1041 bp, Photorhabdus luminescens
atgaatactgaaacgactccagaacaagcttatttaaccgcaggtcagctcctgcgtcaggctcgtgaacaacacgggctaacccagcagactgtagctgatcgcttgtgtttaaaactttctactatccgtgatattgaagaggacaatattccagccactatggtaccgactttcctgcgtggttatgttcgctcttatgctaagttggtacaaattccagaagcagaaattctggcaattctggataagcataccccggcaaaaacagcgaaagtttcaccgatgcagagtttttcgttgggtaaaaaacgtaaaaaacgcgaaagttggttgatgtggattacgtggttgattattttagtcgtaattagtttgacgggagcatggtggtggcaaaaccacatagcccaacagaaggaactgatttcgatggctgatcattccgcggctaaaattgctcagaaaaaagccagctcagaggatttacccactgaaaatcacgatcaggtgacacagttaccaacccgcgagcaggcaacaagtgagccatcaccctctgtagctgtcgctgaaaatatagctgaaaatgccgtggccgcgaataataccagtagtcatcatcaggaagtggctcaatctgtggcatcaacgcaaaatcaagcggtgaaaacacctgaaactcaattagctggtaacgggccacaggctcagactgctccgttgtcagctaatcaagggacagctcaagtgccgagtgtgtctgaaaataattcaacgacagtcgctgacagtaataagttgatgatgaattttaaagcatcttgttggttgcaagttgttgatgcaaatggaaaaaaactatttagtggaactaaacataagggtgaccatctgagtctctctggctcattaccttatgagttaactatcggtgctccggctgttgtggatgtacagttccgggggcaagttgtcgatttaagccgctttattaaagagagtcgtatcgcgcgtcttaaggtaccgacagcacaataa

SEQ ID NO: 7497 - DNA, 402 bp, Photorhabdus luminescens
atgatggttgttgccgtggtggctgttatgttgttggcaggatgtgccaatcaaccaacaaatggcaatcaacagcgaaaagtcgcagcagaaacccggattcaactgggaatggcctatctggctaaaggtaatttacctgccgccagatatcactttgataaggttttactggcaaagccagaccattatcaggctcaattaggtatggcgttgtatgagcaatattctggtcaaccggaagccgctcgtcaacgttacaaaatggcgatgcagtacgcgccaggaaatgatacggtattgtatcattacagcgtttttctctgtgagcaggggcagtatgaagaagtcaagactctgtttactgggagctatgctgacaggcgtgtttgttatcagtga

SEQ ID NO: 7498 - DNA, 1179 bp, Photorhabdus luminescens
atgtcccaaccaaatactgcggcacaatttgctgcttctgtcgtgtctgaaactccagaaaagaaaggcggtaaaattaacctgcttgatctgaatcgcaagcaaatgcgccagtttttcattgacatgggagaaaaacccttccgtgctgatcaagtgatgaaatggatatatcactactgttatgacgattttgagcagatgacagatattaacaaaattctgcgagcaaaattgcagcaagttgcagagatccgcgcacctgaagtagcagaagagcaacgttcggccgatggtacgattaaatgggcgatcactgttggcgatcagcaggttgaaacggtttatatcccggaagatgatcgcgcaaccttgtgtgtctcttctcaggtaggttgtgcactggagtgtaaattctgttccactgctcagcaagggtttaaccgtaatttgcgggtttctgaaattattggtcaagtttggcgtgccgcaaaaattattggttcactgaaatccagtggccgtcgcccgattaccaatgtggtgatgatggggatgggagaaccgctgcttaacctaaataacgtggtgcctgcgatggaaatcatgatggatgattttggtttcggtttgtcaaagcgccgtgtgacgttatccacatccggtgtcgtgccagcactggataaacttggcgatatgattgatgttgctttggccatttccctgcatgcaccaacagatgatgtacgggatgacatcgttcctatcaaccgtaaatataatatcgagcagtttcttgccggtgtgcgccgctatttgactaaatctaatgctaatcaggggcgtgtaaccgtggaatatgtcatgctggatcatattaatgacagcgtggaacaggcacatcaattagctgaatgcttgaaagagacgccgagtaagatcaatctgatcccgtggaacccatttccgggggcaccatatggccgtagttccaacagccggattgatcgctttgctaaggtgctgatggaatatggtttcaccacgattgtccgcaagacgcgcggtgatgatatcgatgctgcatgtggtcagcttgccggtgatgtcattgatcgtaccaaacgtacattgaaaaaacgtcaggccggtgaacctattcagataagatcagtctga

SEQ ID NO: 7499 - DNA, 426 bp, Photorhabdus luminescens
atgacggttgaacgtactttttctattattaagcctaacgcggtgaagaaaaatgccattggggcgatttatgctcgttttgaaagcgccgggtttaaaattattgccgccaaaatgcttcacctgacccgtgaacaggctgagggtttctatgcggagcacaaaggccgtcctttttttgatggtttggtggaatttatgacttctggtccgattgtggttcaggtattggaaggtgagaatgcagtgcagcgtcaccgtgacctgatgggggcaactaatcctgataatgcattagcaggtactctgcgcgccgattacgcggatagcttcactgaaaacgcggttcacggctctgatgcggtggaatctgcaaaccgtgaaattgcttatttcttcacagaagatgaaatttgcccacgttaa

SEQ ID NO: 7500 - DNA, 2322 bp, Photorhabdus luminescens
atgaagaaaccgtatcgccttatgtggctgattgtactgttgttgtttttgtttccggcgggtttatggctggcagataaaatctggcctctgccactgcgtgaagtcaaaatggcgcgtattgtcgtgagtgaggatggtacgccactttggcgttttgccgatgatgaaggtgtttggcgttatccggtgacgttgggtcaagtgtcgccggaatatattcaggctttgctgacttatgaagatcgttggttctaccagcatccggggattaacccgatttctctggtcagggctgcctggcaggatattctggcaggtaaaattttgtccggcggtagtacgctgtcaatgcaggtagcccggttgattgacccccattcacgcactttaggcgggaagttgaagcagatctggcgtactttgcagcttgaatggcactattctaaagatgaaattctggaaatgtatctgaatcgtgcgccgtttggaggcacattacaaggtgtcggtgcggcgagttgggcatatttggctaaaccgccctctgagctttcggcgggagaagcggctttactggctgttttgccacaggcccctagtcgtttaaggccagatcgctatcctgaacgggcacaggctgctcgtgataaggtgttgcaacggttggcgcactataaaatctggtcggaacagacgattgctgatattcggcaagaaacgttgtggttggctccccggcaggtgccacagcttgctcctttgcttgccagaagaatggcgaaaggcattcgtcaggagatcattaaaacaaccttggatgtgggattacagcgtcagcttgaagatatggcggtgaattggcagtaccagttaccagaaaaaacgtcgattggcgtgttagtggttgatcatacagacatggcggtaaaagcctatatcggttcgctggatctacgggatgatagccgttttggtcatgtcgatatgataagttcatggcgttcgccgggatcaactctgaaaccatttttgtatgcaatggcgctggatgatgggttgattcatggggaatcactgttacaggatgtgcctcgccgctttgattattatcgcccgggaaattttgacagtggctttcatgggccggtcagtgccagtgaggcgttggttcgttcactgaatttgcccgccgtgcaactgcttgaagcctatggtgccaagcggtttaccgccaacatgcgtaatgtgggaaccgtattgcgttttcctcccggcagtgaacccaatttatcattgattcttggtggcacggcaacccggatggatcaactggtggcggcttacacggcgtttgcccgtcaggggagggtttcccctttgagattcactccgcagcagaaattgcgtgatcggcagcttttttcccccggcgcggcatggatagtcaggcggattatggctggagaagctctgccgcaacctgatgatgtgttaccggcacaagtgccgttggcttggaaaaccggtaccagctatggctaccgtgatgcttgggctattggcttaagtgcgcgttataccatcggtgtttgggttggcaggccggatggcacgccggttgtcgggcagttcggctatgctacggcgattcccatcatgaatcaggtcaataatctgttattcgtcaatatgcgaaatgggactaaacggattccggttgatccgcgtccagcaagtgtcagtcgggcaatcatctgttggccgggagggcagagtttaccgaaggaagagaataattgccgtcagcggcgtctgagctggatactgaataacactattccgcctacgctgcctgcggtagggcaagaggctatttcaggcactaatgaacaggtgtggttggataagcatggtttgcgcgtggctcctgattgtcccggtgctcaggctaaaaatatcgctttgtggccgattaccctcgaatcatggttaccggcacaagagcgacgggcgcagcgtttgccaccggttaaccctgagtgcccaccgttgaaatcagatgaagcacctttgttgatcgtgggtattcataacggagatgtattgaaacggcttcccggttttggcagccttgatttacgtgttaccactcagggcggtagtggtgggcagcaatggtggtttctgaatggagaacaggtaatgaccaccgaaaataatcagggatttgttcagactttaactcaaccgggtaaatatcagcttagtgttttggatttgggtggacaggttgatgctgtcaattttaccttgaagtaa

SEQ ID NO: 7501 - DNA, 5031 bp, Photorhabdus luminescens
atgaatcaaggtcaattctggcaacagccaggaataaataaatgttatttggcggtgattttagcgtttttgctgatgctttctggttgtgaccaatctgatagcactgataataagcaagcggctcaatcgcagtccacagaaattcaaagcgaaaaagcacctcaacaatcaaatactccaccaaaatcagtaaaaccgaaagacgcagcatcactggctgaattagtaaaacgttatgccggtaaaccagtgaagattctggatgcttctgaagttcagcttgatggcgctagtgcaatggtggtgacattttctgtccctttagatccgaatcaggattttgcacagaatgtccgtttggtggatgtcaaagagggcaaacttgatggggcgtgggaactgtcagataacatgatggaactgcgcttgcgccatttgccgccctcccgtaagttgcaattgaccgtagataaagatgttaaaggtatcaataatcgtcaactcgaaacggcttatgagaaaacgctgacaaccgcgacgatttctccgtctgtcggttttgccagcaaaggctctttgttacccagtaaagttgctgaaggtttgccggtattggctctgaatgttaatcgtgttgatgttaattttttcagaataaaagagacggcattaccggcttttattgcacagtggcaatatcgcaacaatatgagttcttgggaatcggaagagatgctcaaagatgcggaactggtttataccggccgtttcgatctgaatccaacactgaatacccgcgaaaaattactgttaccattaagtaatatcaaagagttacagcaagatggggtttatctggcggtgatgcaacaagcaggtaaatacactgactccaatccagcgacaatgtttaccttaagtgatattggtgtttctgtgcacagctatctggataaaatggatctgtttacccaatctttggcacaaggtggcagcctgaaaggggtggaaatacgtttgttggatgacaaagggcagttattgacaaaggcaacgacggacgatgatgggcacgccagcttagaaaaaaatgcgaaagcgaagctattgctcgctacccgtgatcaccaaaccagtatgattgatttggtatcaccggcgctggatctgtctgaatttgatatttccggcccgcaagggtatagcaaacagttttttgtttttgggcctcgtgatctctatcgtccgggtgaaacgttgattgttaatggcctgctgcgtgatggtgatggccgcgcaatgaaaagtcagccagttaaagtggatgtattgaaaaccgatggtcaggttgttcgtagttttgtctggcaacccgaaaatgggttgtatcagtatcgctatgcgatcccccagtcagcgactaccgggctctggtcgctacgttttgatttgggcgataacaaactccgttattacaagtttaatgtcgaagattttatgccggagcgtatggcactggaaattagtagtgagtcgcaaccggtgatgaaagaccacgatgtggatttcgcgattaacggccgttatctatatggagcacctgctgcatataatcgcctgcaagggcaactattcctgcgtccagctcgggatgcggtagcaaaattgccaggctatgagtttggtgcggttgcagaggacaatcttagtcgtacattggatgaatttgacctggttttaggtaatgagggtaaagccgtaattaatgtcagtgccgacaattggcgttcggtcttttcgccggtaaatgtcattgtacaggctagtttgcttgaatctggtggccgcccggtaactcgtcgggttgaacaggctgtttggccgactgaaaagctggttggtatccgtccgttgtttaatcagaaagagatttatgactatcgcataggtcgttatcaaagccgttacaatgtggatgaaaattcactggcgcaatttgcggtggtgtatgccgatgccaatggaaaaaaatatgcggcaaaagatttaactgcccgtctggtttatgaacgccgtgactattattggcgttggtcggatggtgaaggttggcaatcaggctatgaccagaaagatttagtgatggcggatgaacatatccagattgctcaagatggtacggcaaaggtcagttttccggttgattgggggtcgtaccgtattgaagtggttaatccagaaaatcaattagtgaccagcgttaatttctgggcgggttactcatggcaggacaataccggtggtacaggggctgttcgtcctgatcaggtgaagttatctctggataaacccgcttatcaggtaggtgagaagataaaactgcatatggttgcaccacaggccggtaaaggttatctgttggtagagtccagtgaagggccactttggtggcaaaaaattgatgtgccagagcaaggtttggatgtggaagtgccggtaaataaagagtggcgtcgtcatgacctttatttaaccgctgtggtggtgcgtccagaggataaatctcgtcaggtgacaccgaaacgcgccattggcgtgttgcatctgccgttggctgatgaaaatcgtaaactggatttgacgctatccgcaccggaaaaaatgcgtccgaatcagaacttgactgttaaagtcaaggcgacaccacagcaagggcggaagttacccaagcaggttaatgttctgctttctgctgtcgatatgggggtgctgaatgtcacgaattttaaaacgccggacccctatgaggctttctttggtcgtaagcgttacagtgtcgatcaatatgatgtgtatggtcagttgattgaaggtgaaggccgtctggcgaatctgcgttttggcggtgatggtgatgatagcgcccttgatcgtggcggcagaaagccattaaccgaagttaagattatcgctgaacaagctcagccagtgacgctggatgaaaatggcgaagggcagatcgttttgccaatccccgatttcaatggtgaattgaggttgatggctcaagcgtggagtgaagatgagttcggccacggtgaaaataaagttgtcgttgctgcgccggtggttgcacagatggcactacctcgctttatggccggtggtgatagcgcattgttgtcgttggatttgactaacttgactgaacagacgcaaaacttgaccttgaactttgcggctaatgacctgattaagttagagggggatgttagtaaagagataacattggaaaagggcaaacgcaccacagtagagattccggtcacagcggatttggggtttggtcaaggagaggtttccttgacggttgatggtctgaatttacccggtgaaaatctgaaaccgtataaaaatagttggcagattggtgtgcgtccggcacagccagcggaaacggttctgttcgctaatgttattcatccgggagaggagtggcagttgccgttaaatgctttatcgggtttatcgccagaaggcgccgaggggcagttgttactgagcagccgtccaccgttacagatttcacgctatattcgtgaattgtacgcctatccatatggctgtcttgaacagacaatcagtgggctttatccgtcactctattcgaacaaatcagagctgaatagtttgggtatcagagcggaagatgataataaacgccgggcgagtattgatgagggaattattcatctgttgagtatgcagcgtcatgacggtagctttgctttatgggataaaaccggtgatgaagagtattggttaaccgcctatgccaccgattttctattccgtgcaagtcaacgaggttacagcgtacctaaagaggtactgacttctgccaataaccgtctgttacgttatttacaggataagagtgttattaactatccctacagccagaatcaggacgcaatgcgattctcggttcagtcttatgctggtctggtgcttgccaatcaacagaaagcaccattgggcgctctgagacaagtttatgaacgccgtcagcaagcaggtaatggcttgtcactggtacaactgggtgttgcactgaaactgatgggggataacacccgagcagatgaagcggttcgtttggggatcagtaaaaaccgtcatgacgatttagagttaggtgattacggcagtgccatccgtgacaacgccatgattgttgctctgttgactgaaaataacatgcaaataaaggaacgtgatgagaaattgctggcgctgtctgatgaattgacatcccgcaattatttctcaactcaggagagtaattcactctatctggcggggcgtttctttatcgatgcgtcggtgcaaccgtggaaagcggtgattaatcagcggactttaccaataagtagggataagtcctatagtgagatgctgtatccacaggatattcagcaaggtgtgagtttcagtaaccttggtgacagcacgctctattcacgagtgaatgtggtggcctacccgctgcgctctccgaagccttatgctaatgtgctgaaaattcagcgtagctatttggatatgaagggtaatccgattgccagtgatcttctgaatagcggtgatatggtggttgtgaagctggtggtgagctcagataaacccgtacaggatgctttggttgttgatttattgcccgctggtttggagctggaaaaccagaacttggctaacagcagtgccaagttgagtgagagtgccgctaatcttcaggagttgattggcgatatgcaacaggcgacgattcatcatattgaatatcgtgatgatcgatatgtggcggcagtcgcggttgatccgtctcagccagtgacgttgctctatctggctcgcgccgtgacgccaggcgtctacaccattcctgcaccacaggtggaatctatgtatgtgccttactggcgtgcagtgggttctacacctgaaaaactggaagttgtccgctaa

SEQ ID NO: 7502 - DNA, 801 bp, Photorhabdus luminescens
atgtcgttaaaaataactgtactactggaaaataaaacatctgattcatatttgatagctaagcctggtttgagtcttttacttgaagatggtgaagagaagataatttttgataccggcccggatggtagctatattgagaatgcaaataggatggggatatctattgatgatatatccaaaattgttatctctcatgggcattctgatcatataggtggtgttaactattttccacataatgctaaattaatatgtcatcctgatgcattaaatgagaagtattatggcgttatgttcaggaaaattgcgttaaaatttaaaaaaatgtcgggtaaaattaataaacgagtcaagaagagagttttttttcggttaacgaaatcgcatatgaagataagtgagcgatttattttttcaggggaaatagcaaatgatcatcgaaaatcctttggattaattagaaagagctcttgggccaatgattatatattggatgatagtgcgttaatttggaaaagtgataatggattggtgattatcgttggctgtggtcattctggtatttgtgaaattattaaccacgctaaaatgattaccggtgtggacaaagtatgcgcggtaataggcggattgcatttaaggagagcgttaccgacggagttattgaagatcagagaattttttataaaagaaaatataaaagaggtctatggatgtcattgtactggtagctggggaagactgtggttaccaaatgtcaaacagctaaaaacaggacaggtattattagtcgagtaa

SEQ ID NO: 7503 - DNA, 1665 bp, Photorhabdus luminescens
atgaaaagcagtattgtagtattaatagttttttgtagcgcagtctcaggtagtcaagccgccgacatcgcagatcaacaactcattcatcaacaggcccgccagcaagccctggagacgcaattagccccgccgcctgcggaggttcacctgtcggtaccggaaaccggggaatcatccgcctttgcggtggaaactccgtgttttcccattacccacgtcagactggcaggtaccgaaaatttcccgcactggttaccgttccggcttgtcgcccaacagggcgaaaaccattgtctgggcgataaaggcattagccggctgataacccaattgcaagatcagctcattaatcacggctatgtcaccagccgggttctggttcctcgtcaggatttgcgtacccaaaccttaaaactggtgatgataccgggaaaaatccggcatatccgctatacccctgacagcgggaactatatccagcggataaccccctttcccgcgcgtgaaggaaaattactggatttacgggatattgagcagggattagaaaatctgcaacgtttccccaccgttcaggcagatatgaacattgtcccggcagagcaaccgggggagagcgatattgtgctggactggcgtcagtcccggcactggcgagtcgcgacttatctggatgataccggctccaaaagcaccggacgttatcagggcggactcaccttctttctggataatcccctggcgttaagtgatctgttttatctttccggtggacgcgatattcattcgtctgccgggaaaggcagccaaaatgacacgctctattactctttgcccttcggctactggatggcgagcgtgacggccagtcattacgattatacccagacaatagccgggctgaatcaggcgatccaatatcggggcaaaagccaaaacctggcggttcagcttagccgggtgctgcaccgtaatgccgaccagaaaaccctgcttaacggtgaaatttatcgtcgggcgtctcgcaattttattgataacactgaaatcgacgttcagcgccgggaaaccgcgggctggaagctggggctgtcccatcatcactttatcggcagcgcgacgctggatacccgggtgacttatcaacagggcatgcgctggtttggcgcacaaccggcaccggaagagtaccgcaatgaagggactgccttacccaaaatcacccagttctcagcgacgcttgccgggccgttaacactgttttctcagcccttttcttatcaaacccaatatttgcgtcagataagcgccagcccattgacgccccaggatcgcttctcgattggcggtcgctggacggtgcgcggctttgatggcgagttgaccttatccgctgatcggggttggtacagccgcaacgaactggactggcaaaccccgctgaaagggcaatcgctgtatctggcaatggattatggcgaagtgggcggacggggcagcgatacactgctcggaaaacacctggcggggagcgctctgggctggcgaggcagcctgaaaggggtgagctacgacctgtttgtcggtgtcccgctatccaaacccgccggtttcccaacctcccccgtcacggccggattcaacctgtattggcagtattaa

SEQ ID NO: 7504 - DNA, 8886 bp, Photorhabdus luminescens
atgaacaagcagttatatcgtattatctttaatcaatctcgccagatgtggatggtggtggccgagatagcgcgggccggacggggaagaaccggacgccgcgcacgtcgctccgcttcaccgccgcgttgttgccggctgactgcgctacggtttggggtgttattcgcccttggcggaatttcgcttacggcacaggcggcgattgtggccgacggacaggcaccggggcgtcagcagccgactattattcgcagcgccaacggcacgccgcaggtcaatattcagacgccgggcgccgatggcgtttcccacaatacctaccgtcagtttgacgtggataaacagggagttatcctcaataacagccatcaggctacgcagacgcaactcggcggcatggtggcgggcaatccgtggttagctaaaggggatgcccgcgttatcctcaatgaagtcaacaaccataaccgcagtcacctcaacggctggattgaagtggccgggcataaagccgaggtgattattgccaatccggcgggcatcacctgtaacggttgcgggttcattaactcacatcgcaccacgctcactaccggacaagcgctgatggagcgaggccggctgaaaggatttgatgtcaatcagggggaagtgcggattgacgggcacggcatggacagcacacagcaaagttacaccgatattatcgcccgttccgtggcgattaacgccaaattacacgcgcaagacctgaaagtgaccaccgggcgcaatattgtggatgcggcgcatcagcaggtggagaaaaaatcggttgacgatgaaaagcacccggcgtttgcgttggatgtggcggcgctgggcggcatgtatgcccataaaatcaggctgataggcaccgaaacgggggtgggcgtgcacaatgccggtaatatcggcgcgtctgccggggagttccatatcaccgccgagggccggatagagaaccgcggcaccctcagcagccgggatacgttgcaattaacctcgtctgccgatgtcactaacaccggcaaattgctgtcacaatcggcggtgaatttacaggctaaaggtgcgctcaataatcagggccgggtggaagcccgcggcgataccaccgttactgcgggcacgatacacagcagccatgacagcgtatgggccgcggggctggatgataacggcaacactacccgacccggctcattgaccctgaccgcgcagcacgttcaggctaagggcaaaaatctggccaccaatacgctggctatccacagtcggcagattgacctgagcgacagccagactgcggccggacagattcaactcacagccggtcaatcgggcatcagtaccgctcgcgccagcgtcaacgccgaccgtttgaccgcaaaaacgccgggccagtttaacaacgacggcggccagttagtggcgagggcaatccacctcacaacgccggatttatccaatcagcagggaaaaattaaccagaccggtaccggtgaactgacgctccatacccgcaccctgaataaccgtgaagggacagtgttcaatcaggggaaattgaccctcaccactgaccggcttaacaaccgtcagggcactattgccagtcagggcgaggacctgcatctcaccgcgcatcaggccgataacaaccagggaacggtgcaactggcaggcaacgggaaactgtcgctcaacacgcaacggtggctgggtgataagggcaaattgctcaccaatggcaccctgacgatacaggccggtgaactgcaactcaaccacgccgaaactcaggccgggcagataaccatcaacgccgatactttgagccatcaaagcggcgtgatgcaacaatggggtaaggatgacttgtccctcactacccggatactggataaccacagcggcactattgcgggcaatggcaacctgaaccttaaggcaacgaccgtcgataatcgtcacggcaatatcgtggccgccgaccaaggttcgctgaaactgaccgtcaaagacacgctggataatcagtcgggcaaactggaagcgggccacgcgctccaacttagcgccactcaactggataatcgccgggggagcattgttgccgccggggacagcgccaccctcaccgttggcaaaactattcaaaacgctcacggccatcttgaagcccaaacccgactgactacgactagccagacgttggataacacccagggggtgttgctggcacaaaacattgacagccagaccacaggccatcccttcaccaataccgccggacaggtgatagccgaagacaccctgacggtcaacagtggtcaactggataatacggcggggctgttacaggccggtcgcgagatggccgttgatacccacgggcatgggctcaccaatacccaccatgccgaccaaaaagcgggccggttattgagtggcgggcagttaactttgcgcaccggcgacatcgacaacaccggagggatgatcgcagcggacggcaaaaccgtgctgaccagcaccgcgctcaataatactcagggccagatagccgggaatggcgggctggacattcacagtcaacaactgataaaccgcgaggggaccttacaatccgccgacgccctgactctggataccgacggccagttactggataaccaacaaggccagattatgggtgagggcaagaccactatcaccagcggcccactggacaatcgccacggtcatctgcaaggcggacagttggctattgacacccgacacgccgcgctggataaccgggacggcaaactgttatccaccgacacgttaaccctgaacactcaccagctcgacaatcgtcatgggcaggtgcaggcggtgggcaacaccgtgttgaatgttaagactcaaaccgataacaccggtggccttatccgtggtggcacgcaactcaccctgaacaccgctcacctgattaaccgcgagacagcacacacggataacgggctggaagcgcaaaacctgacggtaaacgcgcaacaggtagacaatactcagggcgctttacgggcagccaaccatctgcaagttcaggtgagtcacacgctggagaatgctcaggggttaatctccgcgggcaaacagcttaccgtaggcgacgcgacccgtcctgcgtctctggtgattaacaaccggcaaggcaccctgattgccggggaacaggccacgattaacgcacatggcctgagtggggacggccaactgttatcacagggcgatatggcggtcaccttaaccgaggattttcaccataccggcaacacggcggccaatggcaatctgaccctgaaaacgaccggcaatcttatcaatgaccgccagataaaagccggtcaaacgctgcatcttgatgcacacaacctcaccaatagcgcctccggtgaaattagcgccggacaaacacaaatccaggtccacgatacgctgaacaacaccggactgattgacggcggcctgacccacctcacggctaataccctgaacaacatgggtaccgggcgtatttacggtgaccaacttgccctccagacgggcacgttgaataacaccgcacaaaacggcaaagccgcggtgattgccgcgcgtgaccggctggatattggcaccggcacactgaacaacagtgaccatgcccagatttacagcgtgggcgacctgcacatcggcggccggttggataacaccctgacggccaccggtcaagcccgtgtgctcaataaccacgccgcgacgattgaagccgggcgcaacctgaagattcaggctgaccggattaacaacaccaacgccgggttggtgactcaggtcgtcgaaacggaaaaatcgccacatcacgatgccgtactgagcggccagaccacccgttacgactggtcgcaggtagacacctcccgccacaataaatacggcgtgcacgatgccatcatgccggacggcagcggcagtaatgacttttacgaatatcagtacacccgcaccgtcagggaaactcaggttaaacagagtgaccccggtaaaattctggccgggggtaatatcacgctcaacagtgcgcaggtcactaatcacgacagccagattgttgctggcggcacgctcggtggtgaaattggcgaactgcacaatattgccactcagggcgaacgtatcaccactgataccggcagtcagacccactggtatgcaaaaaagaaacgactgaagccccgattccgtggtaccaaaacctcacaagggaaaagccgcagccgttatgctcccgcgccggtaatagaaacgattgatttgaaaacgctggcctggcaggcgcatacccgtccacagggtaccgatattacgattacggaccgacaaaccggccagatacacgctgcccccacggcggtcacaccggtgaacggtatcaacaaccagccgctggtgctgcctcccggtcagccgtttgaactgagtttgcccccggagaccgtcaaaggacaaactgtcgacccggtgatacgcgtggtgacgcccgatacccgcttgccgaataacagcctgtataccgtgcaaccgggcagtgacagtcactatctggtcgaaaccgacccgaaattcacccagtataagcagtggctgggctcggactatatgcgggaacaactcactcacgacccggcgctggtccacaaacgtctgggcgatgggttctatgaacagcgtttggtgcgtgaccaaatcacccaactgaccggccagcgctatctgtccggttacaacaacgacgaagcgcagtttaaagcgttgatggatgccggcgttgcctttggcaaacagcagcaattaacgccgggcgtcgccttaagcccggcacagatggcgctgctgacctcagacattatctggctgactaaccaaaccgtgactttgccggatggcactaccgaggtggtcaccgtgccgcaggtttatgcgcgcgtccgtcagggcgacctgcgcagtgacggtgccttgctggccgggaataccgtggcgctcaacaatcaaggcgatatcaccaacagcggcaccatcagcgggcgtgacgtcactcaactgacggccaacaacctcaccaatagcggctttattcgcggcggtaaagtagatttagcggcccaacagacgctcaccaaccggggcggccagattcagggagatgaccgggtgactctgaaaggccgggatatcaccagcgcatcgaccgtgcgcggggatgaagctaaccgctggctggaccgtccggcaggcatctatgtgcagaacgataaaggcaccttatcgctgagcgccattaacaatgtccaattaaccgccagtgacgtcaagaatgccggtaaagacggtcacaccgagataacggcaggccataacctgacgctggacgccttaagcacgcgccgcacagagcaaggcgactgggggaaagataacacccgccatctgacccaacaacaggatatcggcagccagataaccggcaccggtgaggtgaccctgcaagccgggcaggatttgaacgccaccgccgctcacgtcaacgccggtcaacacctgacggcgcaggccggaaatagcctgacgctgaccaccgggaccgcctcatccgacttagtggagcacagcaagcaaaccagcaaaggctggctgtcgaaatcgtcagtggaaacccacgatgaagtgcatgaccggcaggcgctcagtaccacattcagtggcgataaagtgaatttacaggccggaaaagacctcaatatccgcggcagcaatgtggcgggcacgcaggatgtcagcctgaacgccggtcatcagctcaccgtcaccaccgccgcggaatctcacgatgaaacccatttgcggcaggagaaaaaatcgggcctgatggggactggggggattggcttcaccttaggtaaagccagccagaaagtcaccaccgacagtgaccgccagctgagtaaaggcagcacggtcggcagcagtcagggcaacgtcaccctcaacgccggagaacagctccgggttcacggcagtgaggtgattgccggtaaagacctgacgctgaccggtcaacaggtcgatatcaccagcgcggaaaaccgccatcacaccacgacaaaaaccgaacaaaaacagagcggtttaaccgtggcgctgagtggtgccgctgggggtgccgtcaacagcgcggtgcaaacagccagagccgcccgcactgaaagtgacccgcgagtaaaagccctgcaaaacactcaagccgccctcagcggagtgcaagcggcgcaggctggccgactggcggcggctcagggcagtgacgacaaaggcaataataatctggccggggtgagcctgtcttacggtcggcaatcttcccgttcagaacagcagcaccgccagaccacccaacagggcagccatctcactgcgggagataacctcacgataaccgccaaaggggatgacaaaggcgcatcaggccagaatggcgatatccgcattcagggcagccagttacaggcgggtaaagacctgcaactgaatgctcaccgggatattcagctctcctccagccagaacaccgaacagacgaccggcaaaaacagcagccacggcagcgcgctgggtgtgggcctgaccgtgggaccgggagggactggtttgaacatctcggccaatgtcagtcggggcaacggccgtgaaaacggcaacggcgtcagtcacactaacaccacgttacaggcgggacagaccgtcgggctgaacagtggccgggacacgacgttaaaaggcgctcaggtcagcggcgaacagattaccgccgaggtgaaacgtcatctgaccctcagcagcgagcaggatagccagcgctatgacagccaacaacagaatgccagcgccggcgtcagtgccaccgtaggccccctcaccaatggtaccgcgagcctcaatgccagccgcaataaactccacagcaactatgacagcgtgcaagagcagaccgggctgtttgccggtcaaggcggctatcaggttaatgtcggtgaccacacccaactggacggcgcggtgatagcgagtcaagccgacaaagccaacaacaccctgaacaccgggacgctgggcttcaaggatattaaaaatcaagcggactttactgttgagcaacaaagtgcgggcatcagcctcggccaaccgaccgccggtcaggttctcaataatctggcggtcaatgggctgacagggactcataactcaggccatgacagcaccaccacgcacgccgccgtcagtgacggcaatctgattatccgggataaggcgcaccagacgcaggatatcgcgaacttaagtcgcgataccgataatgccgcgaatgtcctgagtccgatatttgataaggaaaaagcacagcaacggctgaaacaggcgcaactgattggcgaaatcagcgcccaaatgaccgagatagcccgtacggaagggaaaattatcgccaccaaagcggcgaaagcgaaactggaccatatcagtgaaccggacaaagaggccgccagaaaaaaactggtcgacagtggcaatccacacccgacttcggcagatatcaataagcaagtttatgacaccgcttacacgcaggcactgaatgactccggcttggggaccggcggaacctatcaaaaagccttacaggccgctacggcagcgattcagggcttagcggggaacaacctcggtcaggcgctggccgggggcgcttcaccgtatctggcgggcgtgataaaagagctaaccaccgacccgcaaacccatcaagtggatatcgccaccaatacgctggcccatgcgattttaggcgcggtggcggcagaagtcagcggtaacaatgcgctcgcgggtgccgcgggtgcggcgtcgggggaactggccgcgcaggtcctgataaagcaactttacggtgatggggccaacgtcagtgagttaacggaggagcagaagcaaactatcagcaccctttccaccctggcagcaggactggcaggcggtattgccggtgactccaccgggagcgctgttaccggggcgcaggcagggaagaacgcaaccgataataatttcctgggaaaactggtaacagaagggtgtgcaatagctgctccgtgtcgagccaaagtggcagaaaaagtcctggagataggcgttaaggcgggtataaccggaatagtggcaaaggaaatcgctgataagatttcttcagaagacttagaccatctgattatgcttcagatgatgggaaatgatgaaatcacacagagttatctaaatacacttcaggataaatacactcaagttgctaatccaactgacctaccaacacataccggcaatacggaaggtaagccggatgtaggtggtaatacgacggtgaccccaattcctgatggcccgaaaaaagatgattttatttatcaggccaaaggagaaaaaccagaaaactattctcctgtaggagcaggtaggtcaggtgcatttaatgaagcaaaacgtcgctcaggaattcctattggaaaacatcctgatagagtattgccaaatgttgataagcgaggaaggctccagcctggaaaaatttatgaatttgatgttcctaaagcaggagggggaactcaaactatacaaattagggatgatgccaaaggtcatgattttggaataaatgatccccagaatagagggcctcattttaatgatgaaaaagggaatcactatgactactga

SEQ ID NO: 7505 - DNA, 813 bp, Photorhabdus luminescens
gtgatcaaggatatggtagacactaatatccgcaatcagcaggaaatgatggatttctgcaacagcaacccgacccagtgtgcacagaagtatggttatctggttgatcagtggccggtgtttgaacgtaccctcaaaaatatggaccgggatggcacattgccggttgagttcagaaattacctgtcggcggtgaatacgttaggtcaggcggccacaggcaaggtaggcgaactcggctggacaaaacgctttgaggcgatgggcatgagcaaggaaacggccgctgcgatggcgatgacattgccaattgtgatggagggggctaaagggccgaagtcatcgccaacaacaaagggaagcacaggcgcggctgttaatacagagaaaacggcgctggaaaagattgggaaaaacagtcaaggcacaacgaatctgggtgataaatcggataatactgtttatcatcaacagcttatcaaaaatgctgaaaagatatctactgcgaaaccaggacaacaagttgctgcgccaagggatctgaatgagcaaactttctggaaacaggttgaatcaaatccgtcacaaggaagtaaattgttaggtatgaataaagatccccgttttcctacagcggctggttttcagaaaatggaagcaaaacataggctccctaatggacaaacaataactatccattaccagtacaactcaaatactggtaaagcctatgacatgaaaattactactcctcagagaatccaacaggatcctaaaaaggtaatagattcaataaaggataatgttaaatga

SEQ ID NO: 7506 - DNA, 318 bp, Photorhabdus luminescens
atgaaaatacaagaatcagatggctctattgttgatgtttttgccatatattggtttggtgatgaaacatatttttatgggttaccaccaaattatggaggtttacaggcatataagtctcatgaagtctcagttatcgatacaacgatagattttaaaactgtttttttctcaaatgatgatgctaaaagtgttcatcattgggcattaatagaagaacagttgctggatgatctacttgagttagatgaaactgcttatcaacgctttttggcaatcctaaaggcagaaggtaatatagaacaggatttttgttaa

SEQ ID NO: 7507 - DNA, 243 bp, Photorhabdus luminescens
atggctgaacgcgattgtaatgtaaattcaggcagttcgaaagcgcaacgccgctataaggtcggctatatcagccgatgtcacgccgaccgccacactggcatgacccgctattacagccagcatcccagcttgcatcttaaaggtaattggctggaagaagcgggctttgtgaccgggcagccagtgcaggtcagtgttgagcacggacagttgattatccggctcgttgagaacagttga

SEQ ID NO: 7508 - DNA, 372 bp, Photorhabdus luminescens
gtgacgtcagttacagcaactttggaatttcctatgagcttttctgataaattggcggcttcccgtaaagagcttggtttcacgcaacaacagatggctgacaagattggtatgcacgtttcacaatacaagcgctatgaagccgggacatcccagccgacgattgatgtgtttcggcggattgcattagcgttgaatgtcagtgccgatatgcttctttttgatcccaatgagcgcggacccgatgaccggctaaaactccagttcgaagcagtctcacagttggatgagaaagagcgggaagcgattgagacagtgattagcagtatgttgcatatgcatgatgctaaacgttggacggtaaaacgttag

SEQ ID NO: 7509 - DNA, 429 bp, Photorhabdus luminescens
atgacccgcgttcccgataccgatttagcccgcttaaagcaaaccgtctcgttactggggctggcgcgtaagcaaggccgtccgatgaaaaaacgcggtgaggattatgtgctgcgctgtccgttccataacgagaaaacgccctcaatggtgatatcgcctgctaagaacctgtatcactgctttggctgtggcgcagcggggtcggtgctggactgggtgatacaaacggaaggggtgacgctgaaaatcgctatccgccggctgcgggagctggccgggttgccggatatggacaatgcagttgtggccgcttcttctttagccgccccgccggagtcctgtctttcctacacaaatattttaacccgcccccgcgttattgaacttttccctcatagattgatctcaataaaaaacacgacttga

SEQ ID NO: 7510 - DNA, 1383 bp, Photorhabdus luminescens
atgttttcaaccagcgccgaacaatgggcaaatgacacgtttcaacatgcggaattaggtgataaacgccgtaccaaccgcctggtgaaagtggcctgttcgttggctaaccatataggacaatcgctcgtgcaatctcttgactctcctgccgatgttgaagcggcctaccgactgacccgaaattccgccattgcgcctcaggccatcgccgaagccggatttaccgccaccgtcgctcacgctcaacgttatcattgcctgttagcgctggaagacacgacaaccctgtcattttcccatgcgtcggtcgccgatgaactcggctataccacctcaaaggaaaaatcccggggcatgcaggcacactcggtgttgttatttgcgcctgaagaacaacaggtcgtggggttgatagagcaacagcgctggtgtcgagatgtcagtgattatggcaaaagccgacaacgcgatacacgcccttatgaagggaaagagagttataagtgggaacgggcctcacaagccgtcgacagccggttaggggagcagatggccaacgtgatttctgtctgtgaccgtgaagccgatatcatcgaatatctgcgttataaaacgagccaaaaacaacgtttcgtcatccgttcgatgcaaaaccggcgtatagaggaaagtcaggataaactttatgactttattagccggttacagagtgctggagaacgattagttcaggtcagacagaaaggcgggcgtcaggcgcgtgtcgcgcattgtgatatcagttatgccgaagtgacgttgaaaatccccgaaggaaaaagcggtgaggcggtgcggatattttatgtcggttgctacgaaaaaggtccggaggatgggctttgctggcatcttctgacctccgaacccgtcaacagtcaggaagacgcccataaaatattcagttattacgagcgccgctggctgatagaagaatttcacaaagcgtggaaaacgggcggcacgcaggtagaagcgctgcgtatgcaaagcaaagataatctggagcgcatgatagtgctgctggcctttattgcggtacgaatacaccagctgcgttttatgggtctgaacaaagaagaggcagagaaagagagctgtgagacagtattaagccccctggcgtggaaattactgtggtcaaaacaagaaaaacgccgtgtgccgaaaaaagccccgagtttgcattgggccttcatcaatctgggaaaactggccggctggtacgattccaaacgcacgggtcgagtcggatgggaacgactttgggaaggctggtttcggctgcaaaccctgatagacggctatttgctggctaaatcagttgatttggagatctga

SEQ ID NO: 7511 - DNA, 2964 bp, Photorhabdus luminescens
ctgccgcgcccgaaactggccgatctggacgatgacgggcaggcgctgttgcatcaggtgattgatttttatcatcagaacttactggcgtcaccggaagccaaagcctggctggaaaaacgcgggctgcatcatcctgaactggtcagccacttccggctcggttatgcgggtcatcacggtatcagcggttccgcgggattgttgccgtccaaagacagtcaggaaggtcagcagttgcgcggcaagctgtcggggctgggcgtgttgcgtaccaccacccggcaggaccacttccggggctgcgtcgtggtgccgataatcggctgggccgaatcgaccagtgtggccagccgcgggcgggtgctgcaactgtatggtcgccgaacccagccggattacaaagtcctgaaagacagcccgaagcatctgtacctgtcctcaccgctagccggggtctggaatgaggcagcgatgaaagccgctgcggaaattatcctgtgcgaagcgctgatcgatgctatgaccttctggtgtgccgggttccgcaacgtgatcgccgcgttcggggtgaacgggtttaaccgtgagcatctcgaagccttgcagtatcacggcgtgaagcgggtgctgattgcctttgaccgggacgaggccggagaccgtggcgcggctaatgtagccgctgatttactggaagccggtatcgaggcgtggcgggtgcagttcccgccaggtatggatgccaatgactatgcgctgaaaagcggcaatgccgaacatgcgctggggctggccttgcaacaggcggtctggctgggacagggaacagcgccgggcgcggtgttcagccatgagcggcccgtctcgccgagtgtgacggaaaagccccaaagtgccggggtggctaaatcttcttctttagccgccccgccggcgctgaccgttgcccccgtgccctgtgagcgcacggcgtccggtgagttgttgatgaaaagcggcccccgggtctggcggatacgggggatgaaaaaatccccggtaccggacgtgatgaaagtcaatgtgcaggtgcgggatgaaacgtccggcctgttccatgtggatacgctggacatgtatcacgcgcggcatcgtcagaactacatcagcacggcggcgcaagagctggaatgcgagctgtcggtcatcaaacgcgaagccgggcgggtcttgctgatgctggagcagcaacaggacgcgcaacagcaagccgacgccgaagcctcagggacaacggcggtcacggtcagcgcggaagacgaagccgccgcgctggcgttgctgacatcgccgaacctgacagaacagattatcaacgacatggccgcctgtggcgtggtcggcgaatccaccaatctgctgaccgggtatctggcggcagtctcgcgcaaactcgataaaccgctggccgtgctgatacaaagcagttccgctgccgggaaatcgtcattgatggaggcggtgctgaacctgatgccggaagaggagcgtatccagtactcggcaatgaccgggcagagcctctactatctgggggaaaccagcctgcaacacaagatactggcgatagccgaagaagaaggcgtgcggcaggcggcttatgccctgaaactgttgcagtccgacggcgagctgaaaatcgccagcaccggcaagaacgaacagagcggcgaactggtgacgcgggaatacaaggtacagggcccggtgatgctgatgctgaccaccaccgccattgatgtggatgaagagctgctgaaccgctgtctggtgctgacggtcaacgaatcgcgcgagcagacgcaggccatccacgccatgcagcggcaccgccagacgctggccgggttgctggctgactcggaaaaaggctatctgacgcagttacaccagaacgcccagagcctgttaaggccgctgaaagtggtcaatccttacgcccatcaactgacgttcctgtcagacaaaacccggatgcggcgcgaccacatgaaatacctgacgctgatacaggccattgccctgctgcaccagtatcaacgtgaagtgaagaaaacgacccaccgcgggcaggtcatcgaatatatcgaagtcacccaggacgacattgccctcgccaaccggctggcgcatgaggtgctggggcgcacgctggatgaaatgccgccgcagacgcgcaagctgttgctgctgatacaggactgggtacgggaaaccgccggacaacaggcggtcaaggtcgatgaactgcattttacccggcgggatattcggaccgctttgcactggggtgatacgcaactgaaagtacatctggcgcggttgctggaaatggaatacctgttgctgcatcgccgcgggctgacctatgaatatacgctgttgtgggatggtgaagataccgggcaaccgcatctgtgcgggttactggagatgactgaatcccggtcagaaacggcaggcaatgtgtttcagtcggggtcagaggatgttcagtcgggcacgggtcggggcagggtcggcagtcagtcggtaaatcagaatccggcctcaaggcaggcaacatcagacctgtcggcggaagtggccggggtaaagcaaaaagcagttattaagacagaaaaaaaaccggcttcaatccccctgcccgaagaaacagaaatgacgaatgacgctgttgcgggcaaggcgttccggtcggggtcagagggtgttcagtcgggtacaggtcggccccaggtcggtacacagccggacagacaaaatccggcctcagcacagacagcacaaggtttaacaacagaaccgggcggggccggaaagaaaacggttaacagacataaaacgcaaaaggccccaccgcccgctgcctcagccgcccatccccaatccgaaacggaggttaatcatggcaaaccgtaa

SEQ ID NO: 7512 - DNA, 1131 bp, Photorhabdus luminescens
atggcaaaccgtaaaccccgcaaggggagtcttctgaccgttaatgacgtctaccgtcagcctgtggggccggcgcatgacccgaaaagcctgtatgcactgctgctgcgcttcgtggcctggcggcaggaacggaactggtcggaaaccacgctgaaagtgcagacccatcacacctatcactttatcctgtgggccacggaccggggcctgtactatgccgcggacatcacgcggccgatactggagcgttaccagcgctacctgtaccagtaccgaaagaccaacggagagccgctgagcatccgcacccagcgcacgcagttgcagccgttacaggtgtggttcaaatggctgacgaaacagaacctgatactggcgaacccggcagcggacattgagttgccgcgggaagaaaaacgcctgccgcggtatatcctgagcattgatgaaatcgagcatatcctgtcgctgcctgacccgaatacgttgcagggcgcgcgcgaccgggccctgatggagctgctctggtcaacggggatacgacgcagtgaagcggcccggctcgatatctacagcattgacgggtcacgcaaaacggtgaccatccggcagggcaaggggaataaagaccgggtattgcccctcggcgaacgggccttaaactggctccagttctatcagcaacaggttcgcccgcaactgctggtcaccccggacatccaatcgctgttcgtggcaatggacggtctcgacgggttgcagccgaacggtatcacgaatgccgtaagcggttatatccgggccgccggcattgagaaaaaaggtgcctgccacctgttccggcatgcgatggcaacgcagatgctggagaacggcgcggacctgcgctggatacaggccatgttaggccatgccagcgtggagtcaacccaggtgtatacgcaggtctctatccgggccttgcaggcggtgcacgccagcacccatccggcggagcaaatggccgacgaaaaagtccgcgacgccgatgaggtgggtttactggccgacctgtacgccgacgataacgccgacacggacacgccgccggacagttcagagccgacctcaaccgccgatagccgctga

SEQ ID NO: 7513 - DNA, 267 bp, Photorhabdus luminescens
gtggtcatgcaaggtcatacgcaaaccgaagccacagtgcctcagagcgtcgcaggggcgccgcttgcgggctctgtgccgcccgcgcccgcagaacgggcacccgccgcccaagcgagttgggcgacgttcgcccgttgccgaagaaggcgctacactgaccagagtgcggcgggaaaaaccggccttcgggggcgaaaagcgcgtcagggggttttgggtccggcggtgaacgcccattggaaaaaacgggtggtaactggctga

SEQ ID NO: 7514 - DNA, 468 bp, Photorhabdus luminescens
ttggcggtcaacgtcgcaatggaatgggttgttgtagacaacaaccacctaagtgtggagaagaaccaatcgcgcagtgaggaactggttaattgtcagggtgatagcagttgccgttctgccattagggataaatatcggcaggagtatgacaaggttcaggagcggatagcaacgtgttccggggctgaccagtgcgttgcggttgccaaagagctgcgggcattgcaaggtgattacagcgcccggatgagtgaaattcaggaaaaagccagaatgcagggtctggattccctcacaccggcagaagtgcgggaatgggcagatttacgcggtgccatgtcaaatattgatgcgtcccgcaatttagtactccggcggctcagaagaaactacccaggaaatcgtgaagattatggggcagacgggaattgcggcgtctgcggggattgctggagggatcagtaa

SEQ ID NO: 7515 - DNA, 312 bp, Photorhabdus luminescens
gtgacagcgaataatgggttagtttataaatcaaatcctaaacatactcttggtggtgatggaaatcgccgtaatgcgggaatagaaccaaaagactcattgaaactttttgaaaattcaattccaagctccaaaaattatggtaataaagaagttagatttgctaaggatgaaaaaggtaatgttcatcggttcgaagggaccaatggggaatatcactggaatggcagctctggagatataaaaaaccagttaacaagtaaacaggttccaagcgacattcaaaagaaattgggagttaggttgaaatga

SEQ ID NO: 7516 - DNA, 456 bp, Photorhabdus luminescens
atgatttatggcgatccgttttatttttctcttcagttcgatgctgttgaatcatggaactcatctgatggcttttggaaaaatggcatcttctttttctatttggatggacataaaatatttgatcttttggatgtttttgagctgaaaacaaccttcagtttttattcaaatatgaaaatagatgaattggtatgtaatgatgtcaacattggaccagttagcctgtatagaaatgctgagagctatttcacaggggatggagaaaatctcattgaggggctgttcgatatgacatgtacaccaatgggagataatggatattatgtttacttcatgaaaacgagccataatgatcgttttgtatggagtaatgatgatggaaaaacaataaatgaaacattattaccatctggtactgtaagttctgtaattaaaaaattatctaattattga

SEQ ID NO: 7517 - DNA, 132 bp, Photorhabdus luminescens
atgttaaacaatcatccgacatttaaaaggggtagttcattacgtctgggaaaagtggcttatcaggctgaaaagtcgcgtcggggcgttgtgggctggacatcgaaccataccgggaaaagttgcttttaa

SEQ ID NO: 7518 - DNA, 657 bp, Photorhabdus luminescens
atggaatgcgttgttactgacaataatgcactgagcttgccaaaagggatggcggattacggtcggtcagcatcaagtctgggtaccgctatgctaaatgaaggtaaatcccctcaagagatttcagcggcgttgtcaaaacatgccaaaggtgatcacccggaaggacaagatccggtaagaggattgttagtcgcttggggagcgggaatgtccacagtagtggcaccggtgctgctgccatcgggagcaacggtaggcagtatttttgctggaggtctaatcagtggaacagctaatgtcagtaatcaattgacaaatggtcctgtgaacattactgatgcactgatagccacaggaacaggggcattaacgcaaggcaaagggttttggtttacagaagtcgcgagtataacgggtgcttatgttggggcaaaactacaggataaaaatccacttgccccggtagtaggtgcagcagttggtaatgttgtaggtactgctggaggaaaagtaatcgacgttggaaataaatatttccctatagtatcgaataaaacgtcaagtactatcggagctattggtggtgctatagccagtgaagttacaggcagtaaagttgaggataagctggataaatcaggaggagcgaaatga

SEQ ID NO: 7519 - DNA, 348 bp, Photorhabdus luminescens
ctgaggaaataccctaatcataccggtaatacggaaggtaagccggatactggcgggaagaccacaactactccgattctgggagagccaaataaagacgacttagcctatctggctctgaaaggaaaagaagcccaagaagcagcagggaaattaggctttgatcggagaatagctcctcctaaagcaccatttaactcacatgggcaacctgtattttttgatggtaaaacctatattactcccgatgttgatagtcataatgttactaatggttggaaaatgtttgaccgtagaggcaagcgaatggggacttacgatagtgatctgaacagagttaaggactga

SEQ ID NO: 7520 - DNA, 456 bp, Photorhabdus luminescens
atgtttggtatatttcccggtgatgcacccatcagagaaaacgatgagctagttctgcctgcaacaattattattgatacatttacagaagcagttcacatacctttatcttattggagctttgaggattacaagcggagttggcgagtttctcttgaggagggtatacacagtaaaaagcctgtggcgctagctgtatcaatgtatgagcctgattacacaaattttatatttgtttgggtcatatatttcgcaggtgaggaagttttcttgcaaaatagcatcctctttttggatgagtgtccaggttttactccagagaagataaataactttatagagtcgcgtactacgcacaatgaagacggaatgaaaatatctgaatggaatactgatctaaatagcattatagatttttataacagtcttacaattagtacagaatcccagtcttga

SEQ ID NO: 7521 - DNA, 156 bp, Photorhabdus luminescens
gtggacaataatcacttaagcgttgaccagaatcgctcaaggagtgaggaactggtcaactgtcagggggataccagttgtcgttctgttgtcagggataagtatcgccaagaggtaaccctttttactcagaacattggtatcttggtgaagtag

SEQ ID NO: 7522 - DNA, 123 bp, Photorhabdus luminescens
atgggaagtctgtttggttataaagaaggaggaactcagtttgatcttatggggcaaaggaccgatacatttactaatgaacgggctattcaaaaaaataggagaacaaaatggttatcttag

SEQ ID NO: 7523 - DNA, 345 bp, Photorhabdus luminescens
atggttatcttagttaacaataacaagattaatatcaatgggcacttaattatacttaatcgaaaaatcattaaagcgatagaaattgataatggttttgttcttgtcttaattgatattcctataggagatgatggactaaataatttattttcttatacaaagaacggagagtttctttggcaaatagagccttcgaatttacaaaaagaagggcaaacaagttacccatacgaagggttgaatgttgttgaagggcaatactttgttgttgatttttatggaagaagaatatttttcgatccttatactggtctattcttatcacgagatattgtaaaataa

SEQ ID NO: 7524 - DNA, 513 bp, Photorhabdus luminescens
ttgtgtcgtttttttatagatggaatatttcttttttcacttggagatgtaaataaggttattaaaaaaggggtatttatcgggctaataagttatttttttatatactatcacctgtatgatttacgtaaattaataatcaatctttggattgaagttactattttgagaagttttatgaaatgtattaaatgtgaaaacccaacattacatgaatcagatttttgtgccgcatgtgaagaaaaagaactgagtagaattggcggatttctctatttcccggcaataaacattatctttgcaatattaagttctttatttagtgcatataaagcaatgacaatcctgatctctggttatgattttctaggtgaattacgtgtccttataggatttgagtttatacccgtcatctttcaagctgcctctttgttggctgcactcactcaccccggtcacatagttatctatgcgcccggggattcgttcccttgccgtcgcgatgcaacttga

SEQ ID NO: 7525 - DNA, 885 bp, Photorhabdus luminescens; identical to SEQ ID NO: 6610

SEQ ID NO: 7526 - DNA, 12216 bp, Photorhabdus luminescens
ttgatgggaaaatcatcgaatagaagtacagagtacttctttactgggaaatattacgacgataatgacggtaatagtattattgctattggtattggtggtgaagtttatgcttatggcggagatgatgatgttacgattggttcatttaaggtcgatgtataccatacgaatggtgaactttcggtaaagggtgcctcaggttataccggtattagtaaaacaggaaatggcggcttgtcattttctggcgcagccggtacggcttttattgatcatacgggtgaaaccggggatttatcttattcgggtgctgctggctataacaaactggttcgtaaaggttcatctggagatacccgttttaaaggggctggtggatacaatcaattatggcatgaaactgatcagggaaatgtttattttgctggcgcaggagcggctaataaaattgaccgtacctggtctaattattatgagggtactcaaggagatgtgacatttaacggcgcgggcgctgcaaatagtatcgattcgcggatagaaagcggtgatatcactttgaatggtgttggtgctgataatcatattgtacgtaagggtagagaaggtaacattatcttgcatggtgcgggggcagcgaatcgcattgaacgtacacgccacagtgaagatcagtatggacagacacagggtgatattactcttgaaggtgcggggggttataacaaactctattctgatgttgctcacggtaatattcattttactggcgcaggagcttataacgaaattacccgagcaggagcgagaaatgaaatagaatttgctcaggctaaagatattgtgatgacatcagcaacaatggaagagcgcgggattcaacaatctcaacaagttaaagcagttaaatccgaggtagagcctgatacttatctctttgccattgccgataatgttaatactaaagttgtcgctgtacggctgcaaaataatcctgataccggtaagctccgttattatgccacttcctggtataaggaaggtaaccatcttaaggatattgctaaggaaaatatcgacgtaaataatggatttatctccgttaaaggggacgatgctattacgcttgccaatattaatgtggtatatcgacaagaaaccatagtacagggtgttgaggaggtattattaaccgataaatgggtgaattattccgatggtactaacattaaagcgaaaaacgtcacactgggtagtgccaaaatggggggatacgcgatctcgtctaatgggctgaaaatcgatgtctctccggtgaaatcaaaccagcagccggatacttatgtatatgcaatatttctggagccttataccaaagtggttgaggttaagctggcgaatgatgatgaaacaggaaagctgaaatatattgcaagatcttggtataaaaaaggtgaccatactggccgtttagcaaatgaacgtttttcctatcctcgcggttatcaatcaattggggctggttatacattaagtcagcttcactatgatttaaatgtaacagatgagattactgattgtctgactgatattgaaggttattctgagcaagatgttatcaaatcatcaaagaatggcggtgatagttccggtaatatttatttcatcggtgctggtggtggcaacattattacatccaatgtgacgcacggtaatattaatttcacaggagcgggagcggctaacattattctgcacagttcaacattcggtaatacgtattttgaaggaggcggaggtgctaacgtcattgtgaaaaacggtgaagagggcgatctatcatttcgtggtgcgggtttagccaatgtcttggttcaccagagccagcgcgggaaaatggatgtttacgctggtggtgcggtcaatgttctcgtacgggtcggggatggacgatatctggcccaccttctgtcctatggcaatatctcgatccacaaaggtaacggtgacagccgggtactgatgttggggggatataacactcatacccaaataggtgatggtagcgcgaactggttcggggcgggcggttttaacgtcatcactcaggccggaacaggggatatcttctccgtatttttgggtggcgctaacgtgctaacaaagctcggtgcgggagatatggttgccggtatgcttggcggtgccaatattatcactcatctcagtgatgagactgaaactaccaacaccaccgccattgcgttgggcggagccaacatctttaccaagaaagggaaaggccatacgcaggcggtcatgggcggcggggcaaatgtccttacgcatatcggggacggcaataccacgggcgttatgctgggtggcgcgaatatcttgaccaaagttggaaagggtgacatgaccggcatcatgtttggtgttggcaacgtgttgacccatgtcggcgacggtttgacactgggcgtgatggccgcagcagggaacatcttcactaaagtcggggagggtacatcaattgcggccatgattggcgcgggtaacctgtttactcatgtcggcaaaggggatgcatgggcattaatggggggagtgggtaatatttttaccaaagtgggtgacggtgatgcgctggcattgatggtcgccgcaggtaatgtgtttacgcatattggggatggcaccagtgttgcgctgatgctggcaaagggcaatatcgccacgaaagtgggtaatggcatgacgttggcggcgatgatcggcaaagccaatatttttacccatgtcggggagggcaatacctttgcggccatgattggcggggctaatgtgctgaccaaagtcggtaacgacctgaccgctgccttaatggtagggaaagccaatatctattcgcatgtgggcaatggcaccagtattggtttgtttgccggtgaactgaacgtgatgaccaaagtcggtaatggcacaacgctggcggccatgtttggtaaagccaatatgatgacccatgtgggggatggcttaacgggggtcttggcactgggtgaggccaatatcgtcaccaaagtgggtgatgattttatgggggttgttgcggcggcgaaagcgaacgttattacgcatgtcggtgatgcgacgactgccgctatcctgtttggcaaaggcaatattctgaccaaagtgggcgacggtaccacagttggcctgcttatttccgatgtgggtaacgtgatgacccatgtcggcgagggtacgacagtggggtttgccaaaggtaaagccaatcttatcaccaaaattggcgatggtgccggggtgaatgcggcttggggggaagcgaatatcctgacccaagtggggaatggcgaccgttataatttcgcgaaaggtaaagccaacctgatgaccaaagtggggaagggacaggaagtcacggtggtgcagggggatgccaatatcattacccatgtgggtaacggtgatgattacaccggtgcctggggcaaagccaatgtcatcactaaaatcggtgacgggcgtaatgtagtgctggcgaaaggcaaggctaacattgtcactcaggtaggtcagggagacagctttaatgccttatggagcgaaggcaatattgtcaccaaagtgggagacggtatgcaggtgacggtggcaaaagggaaagctaacgtaacgacaactgtgggcaatggcttaaatgtcaccgctgctcatggtgacgcgaatataaacactcacgtaggtaatggcgtttcggttaacctggcgtggggtaagcacaatattaataccaaagtgggcaatggcctgaatgtggcggtcatgaaaggccaagctaatgccaatatccatgtgggtgatggtctgggcatcaatgcttcctacgcacgtaataatgtggcggttaagattggtaatggtgatttctacagcttctctgtaacgaatagcaacaaactttcttccctctttgagcatatcaaacagacaacattaggtgtgggaggcagtcaggcaatcaactatttggttcatggggaggaagctaacacgtcgggcacccacaaaggcagaggggcgattaatttagcggaagtatctggtattgatggctttcagatggatgaaattgcgccgataagttcagatttaaaccatagtttcaatggtgctataacagcggtggagacgcctgacgtcagttcaatagaaggtgctttgagtcaaaaaacgctatcggtgtcagatcaagatgaaaatctgatcgtcaatggtgattttgaacaaggtgagctgggttggcagtcaactcatggtatagaggcatataacccagcgagtgattatggtcttgataataccggtgatggtgaacgagtcagtaaatttgatgttgataaaaacaccgtaatttggcaggaattacaaaatttgtctgaaggagaagtggtttcactgacttttgattttatgagtcattttgagagggtggaccgtgatctgagtggcagcggaataatggtattgtggaatggtaagtctgtattctcaacttctggaccgcgagctatatggcgcactcaaaaactcgatttaatggcaaaagcagggactaaccggattgaatttaaaggtacaggtcaggatgatggatttagttacatcttagacaatatcattgtgaaatctgaaacgtcactgattgtcaataatgaccttgagcaaggtaaattggattggcaatcaaccaatgatattgcggcctatagctcagtgagtactgatgggcctaataatacccgttatggcgaacgagtcagtgaacttgatgttgataaaaacactactatttaccaggatctacaaaaccgttctgagggagaagtgatttcgctgagctttgattttgctaatcgtcccgatgcttattcagtcgacaatggtatggatgttttctggaacgacaaacttgtattctcgacttttggcgatgccgcgaaatggcaaaataaaacactagagctgacagcaaaagcgggcagtaaccgcattgagtttaaaggaacaggcttgagtgatggtgtcggctatattctggataacgttattgcaaaatctaagagctcacaacaagccaatattattaccgaacatgtgaaacaggataaagcggcgcaaaatgcgttaagcgataaagaaaaagcagaaaaagatcgccgactgttggaacaggaaaaagagaaacaactggcggagattgcgaaatcgcaatcccagttggaattaaccgatcaggcagcagttagccaaaatgggctgacacagcgtaatgcaatagaagcagaagcgcaggcggagactgacaaactggtttctatgacgcaaggtttggatgcgcttggtgactatgccaattacagcggccaatcaggtgaccaatggcgtaatcaatttgctagccaattcctggaccacgctcaggataagttgaatgacatcaaatttattgcgcagcgaaaattaatgcatgcccgacaagctattacggataaccaacaacacgtaaaagaagcggtgaagaaatccgaggtcggcgtagcacaaagtgaacagcatcatgccagtgcaaaacaagatattgcagcggctcagaaaaaagcagaattaagaaaagaagaagcattattgcaacaacaacgggccgaaaaggcggaaaatgatgcaaatatcgcctatcagggggcggaatatcggggtaaacgtgatattgctgcggctgaaaataaaattgcccaggtacaagaagatgttagaggggcaaaacagagcgattcaaaacctgatcgtaccggtgccggtggtagtggtttgtctggtaatggctatgaatcgacaggcgcgggggaaaccggtagctatattgatcccgaattaataccggaagctgaaaaaaaattctacaaaggattgaccgaagaagagctacaagcgttggatgatgctaaacaagcggttgatcgtctacagataaatgccagtattcgcgtggaaaataccggcgttttaacgacttcaaagtttgccaaaggacaatctgacgatagggtgataccaacgtcgaacagttcaggtgagcgtgtcagaagagtgccgcggatttcaggcattaatctgaaatcgttggggaatgatgtcaaggtagagcagaaaaattccgctatatttgaaaatgcaaaatttaatttattgaaagagggaaacaagctatttatcaatcccaatgtgcgaacattggggcgaaaaaggaagcttagcacggcgctggccacggtacgcgatactttctataagacgatgagccatttcgatgaagagcatatattgctgcttgaacgggcgatagctgattggcaacagcatagcccaaaggagtttgctctacgcaccaatcaggtgaacttagtacgttttaaaatgggccgaatgatagagcacttacaggctcagcgagctgaatccgctggcgtccttgggatcgccgtggcacctcaacatgctgaacatcttacgcaacgcgtcatctttgatggaaccggacgtgttgtcggtttaaaaggcggtataacacaaaacgaaattaatcgtcttattgaatggcagattaccccgttgacccgaacgaattcaaccgctgaacgggaagcgcctaagaccgaaagtgaaagtctgattgcttttatgagccgattggaaaccgcgaatatcccggaagcgaggtttttgattggacgggccaggggactctggctcaccggacaagtcacctcgaaggaaactatcaagttatttgatgatgctgccagtcagttacaggcataccctgagttacatggtttggtactgtcattacaggctgatgctcacagagaaaagtcaactacccaatatattgacaacttatttggtcgtcgttttgattccgaagtggcccatacgttggtaaaaatggcgtcaccggatgcgctagccacctccaggcggataggtcagtttctggtgcaggagtttgagctgtatatgcaaagtactgctgactcacccgtactcgacggacagattgatatcaggatgcaagcttttgccgaaaaaattaaaaaagatattcgtccctggttcagtcgagtgcctgaactgaccgcattcctgcaaaaaccgaccttggataactttaagatcatgatgactaaggtggataacggttttgaaatgatcaagattccgtttctggcggtaaaaatgtcgaacacggatggtatggggttacatttatctcaatggaaggcggaagcggacattttctatcgggaggagatctacaaggcgcgttccaccagtagtaaattaacgaatatggcggatgttacctataaagtgaagttaactgaacagcaaaccaatgattatggtattgcactgccctaccaaccatctggtgatcagtatggagatttcctgtatggcagaaaggtagcggcgggcagagtgctgacgcccggacaggaaacaacgcttgagcgtaacgccttggcgcaggggcattccgtggtgacgggggcatcgggctcgaccaatatcatggttcatctcaataactatattgccagtcaagatcctactttctcgcaagagcaggcctaccttaatacgttggcgtttctggtgtttgatggcggtcattcggttaatgaaagtttggtggtctataaagcattgcagatgaccggtgatgaacgtcggcaagtactacaaaactacaccgccagttatatggatctgatggatatcgccggagataaagggaaattatcgataaatcaggcactaaataacgcatttgagaaaacccaacacctttatcgagaaaatacccctgagagagaacagaacgactctccggtagaagcattacaggcgttatcgggcaaaaatggcgcgtcagagtcggtattaattgaaaatgatgatactccgccacgggataaagactctttaaacccagtgacccgattttttaacaacgaactgtatggttttaaagaagatcgccgtcatatcagtgataaaacgcagacgatacttaatgatgcggttgctaatggtaaatccagcaaaatcaccctaaaaggcgaagagggacgtttaaccggatattatcatcaaggtgacataaaaccagatgatatctcgacggcggcagagaaaaaagtcgtgcttttccttcatggttcaggtttatccgcggaagagcaagctcatgatatccaaagccattatcaaaagcagggcattgatatacttgctgtcaacatgcgcggctatgggggtagtgatggtagtcccggtgaacaagggttctatcaggatgcccggacgatgtttcgctatttggtgcaagatcgcggcattaagccgggtaatattattcttcatggttattccgttggtggaccggtggcggcagatcttgctcgatatgcgtcgcaaaataatcaagccgtgtcaggtctgttactcgacaggccaatatcgagtatgaccaaaaccataaccgcgcatgacgtaccaaaccctggtggcatgattggggcattggcaaaagcgatgaacggacaattttcagtagaaaaaaacctcaaaggtctgccgatcaatacgccgatcatgctgttaactgacaatcaaggtttggggcatgaaggggaaaagctgcgtgcaagattggccgcttctggttatcgcgtatcgggtgaacaaaccttttatggtcatgtcgagagcggtgctttaatgagccaatatactgataggattgtctcgacgctctccgattttcaaaataaaaatcgggatggagtgaagaactcgtggcaaaagagtgacaatcgtggaacacgttttgatggtcagatcattattcaaatggaaaatgacccgattgtcgcaaaagccgcgctcaatctggcgagtaaacaccggaaatccagtgtggtggttaaacttgattctaatggcaaatatcatgtcatttatggtgatcctgccggtttatcaggcaaattacgttggcagattgtggggcatggccgtaacgaatcggcacaaaataacactcgcctgagtggttacagtgctgatgaattggcaataaaactaaaacagttcagccagaactttgagcaggcaggtaaacctgatcgtatcagcatcgtgggttgttcactgattagtgatgataagcggaatggttttgcctatcgttttattaccgctttagataaacaaggtatccgtagtgaggtttcagctcgtcgcagtgaagtggccgttgatgcaacaggtcgtaagtttactcgcgataaaaatcatcagtgggttaacaagttggacgataacaaactggtgttacgctggaatgaacaggatgaactcacgacgacgacagaaaaattgcgtcgaggggtggctgaaagtgatatcaaccttgccaaagtggggcacacagaagctgattcagcaaccagaggggcaattgcggataaccatgatgttttcactgcgccaggaaagcgcaaaaacagggttgagcttggttcaaatcctcagtcggagccgctaggttacgccgggaatatacaggtaaacgtgggcgacggtgaatttactgcgattaactggggaacctcgaacgtcggtattaaagtgggtacgggtggctttaaatcactggcctttggcgacaacaatgtgatggttcacatcggggagggtgacagtaagcacagcgttaatctggcaggttatcaagcacttgaaggggcgcagatgttcattggcaaccgtaacgtcagcttcaaccaaggtcgcagtaatgacctgattgtcatgatggataaatccatccctacgccaccgttagttaatccatttgatggcgctgcgcgtattaccggtgtactgaaatctattgctcattccggcgaagagcggaactggttggcggcgcaaaatcagcagtggacgctatcgggcgcgaaaaaatttgtgcgtgacatgtcgggtttagaccaaaccagtagtgtggattacaagacattggttgatctggattcgcagctcaagcgcagtagccggggtttgaaaagcgacacagaagcggcattaaacaaaaaataccaccaatggttaaatggtcacggcaacaatattgataccaagaagatgagtcgtgtggataaattccgtcaagccaatgagaaactggctttcaattttgcggtaggtggtcaaggggcggacattcaggtcacaaccggtagctggaactttatgttcggtgaccatattcaatcgattttggataccaatctgggttcgttgtttggtctgatgacgcagcaatattcaacaacgggcttggcgaaaacaacctttacttacaacctacaggacttaccgcgtcagcttaaaaacaaactgctgggtcggttagccggtgtgaatgcagagaccacgttagcggatatttttggtgtggattatacgccggagggacagattgttgcccgtactggtgagccggttgatggtaaggctattttgcgagagatgttggaagtgattaagcagtttggtggtgatcaactaagtgtcttcactgatccggataaattgattgagggtttgaaacagaacgctaatatgagtgccgatggtattgagtcattttttgtcagtcatgggctgaaagagaaagcgcctgatgaaaatcgggaaaagagtgtaccggatgccgtcaacagtgggaagagtcaggctgatgacaaatcagagcgggcattgggctttaattcgctgaatttgcctaacctgtttgcgacgatattcagcaaagataaacaacaagagatgaagtcactcgtgaccaatctgaaagagaatctcaccgccgatctgctcaatatggagcagaaaacgtttgatttcctgcgtaacagtggtcatctgcaaggggacagcgatatccatatctcgttaggaaactataacttcaactggggcggtgatggtaaagatctcggtgcttatctgggcgataacaacaacttctggggtggccgcggagatgatgtttattactccatcggcacttccaacatctttaccggtggtgaaggtgatgacttgggcgttctgatgggacgtgaaaactggatgtttggcggtagtggcgatgataccgcagtggtagctggacgcattaaccatgtattcatgggtgagggtaacgatcagacatttgtttttggtgaaggtggcgttattgatgccggtaatgggcgggactacgttgtcacttctggtaactacaaccaggtggatactggcgaagatcaagattatgccgtgactatcggtaataacaaccgggttgagctaggtgaaggcaatgactttggccgggtgtttggtaatgacaaccgaattgatggcaacatgggtaacgatgtcattaaattgatgggctatcatgcggtaattaatggcggagaaggtgatgatcacctgatagcggctacaatttcgaaattcagccagtttgacggcggagagggtcaggatctactggtgttggggggataccagaaccacttccaaggaggggcaggagtagatagctttgtggtcagtggtaaggtgattgacagtcaggttgatgatattaatgcagaagatatgattgcctttaacgatattgactggcaagacttgtggttccagcgcagtggatatgatctggtgttatcagtgaatcgccctactcaggataaaacggctcagggtctatttgaatcggtgggttcagtcacctttagagattactttaatggtaaccgtgccaaattagtgacacagatggggcgtaaggatgcatcaggagagcgtgaatttacggcactttccgacaatgcggttgataccttaatccaggcaatgagcagttttgccccaacagccggtgataacggttttattgaagcgctggataacagggagaaaatggctattaccacggcttgggcagataccacaattggcaaggggaaatttgcctga

SEQ ID NO: 7527 - DNA, 10419 bp, Photorhabdus luminescens
ttgtcttacgggggggcgggggcatcgaatcgcattgaacgtatacgcggtaaaggtaagtatgtacagacacagggcgatattacttttgaaggggcggggggatataacaccctctattctgatgttgcccacggaaatattcattttgctggtgcaggcgcttataacaaaattacccgatcaggtgtgaaaaatgaaatagaatttgctcaggctcaagacattgtgatgacatcggcaacaatggaaggaagctggattcaacaatcccagcgagttgaagcggttaaatccgcggtagagcctgatacttatctctttgccattgctaataatgttaatactaaagttgtcgctgtgcggctacaaaataatccgaataccggtaagctcagttattatgccacgtcttggtataaaaaaggcgaccatcttaagaatattgccagggaaaatatcaatgtaaataatggatttgttaccattaaaaggaacgatgctattatgcttgccaatattgacgtgatatatcaacaaaaaaccacaatacagggtgttgtagatagattatttgtcgatagatggatacattatgcccgtgaggtcaacattaaagcggaagatatcacactggctagcgccaaaatggaaatagaagaggacgcactctcttctcatgggttgaaaatcgatgtctctgcggttaaatcaaacattcatccgaatcattatgtgtatgcagtatttcaggagccttataccaaggtggttgaaattgagctgatgaatgatagtcagacagggagactgatatatattgcaagatcctggtataaaaaaggtgactatactgaccgcatagcgaatgaaactttttcctattctcaaggttatcaatcaataaaagcgggttatacgttaagtcagcttcactataagttaaatgtaacagaggatattactgattgtttgactgatcttaataatgatgtcggggaagaccttatgacatcatcagaaagtagtggtgatagctccggtgatatttattttaatggtgcagggggtgggaacgttattatgtccaacgtgatgcacggtaatatttatttcacaggagccggggccgctaacgttattttgcacagttcaacattcggtgatattcgttttgaaggtgcgggtaccgctaacgtaattgtaaaaaacggcgaaaaaggggatctgacattccgtggtgccggtttagctaatgttgtggttcaccagggccagaacgggaaaatggatgtttacgctggtggcgcggtaaatgttctggtgcggatcggggatgggcaatacctggctcatctgttggcctatggcaatatttcaatccacaaaggcaacggtgacagtcgggtacggatgctgggtggatacaacacgcatactcagataggtaatggtagtgcgaactggtttgggatgggcggttttaacttcattactcaaaaaggtgctgggaatatcgtttccgtacttttgggcggtgctagcgcgattactaaactcgggacgggtaatctggttgccggtatgcttggcggcaccaatattatcacccatctcagtgaggagagtgaaaccgccaacacctccatcattgcactgggaggagccaacgtttttaccaggaaagggaaaggccatgcattagcgatcatggggggcggtaagaacgtctttacgcatattggtgaaggcaagaccacgggggtgatgctgggtggcgctaataccttgactaaagtcggaaagggagacatgaccggtgtcatgttcggcataggtaacgtgctgacccatgtcggtgacggttttgcactgggtgtgatggcttcggcaggcaatatcttcaccaaagttggggacgggacagtgattgcggctctgattggtgcgggcagcctgtttacccatatcggcaaaggggatgcctgggggttaatggggggattggggaatatttttaccaaagtgggtgacggtgacgcgctggcattaatggcagccgcgggcaatgtatttacgcatattggggagggttcaagtgttgcgctgatgctggcaaaaggcaatatcgccacgaaagtgggtgatggcacgacgttggcggcgatgattggcttggccaatctctttagccatgtcggggatggcaatacctttacagtcatgattggtggggccaatgtgctgaccaaagtcggtcatgaccagaccgccgccgtaatgatggggaaagccaatatttttacccacgagggtaatggcgccagtatcggtttgtttgccggtgaactgaatgtgatgaccaaagtcggtaaaggcacaacgctggcggccatgtttggtcgggctaatatcatgacgcatgtggggaatggcttaaccggcgtgttagcactgggtgaagctaatattgtcaccaaagtgggcgatgattttatgggggttgttacagcggcaaaagcgaatgtgattacacatatcggcgatgcgacaaccgccggaatcctgttgggcaaaggcaatatgctgaccaaagtaggagacggtaccacaattggtctgcttatttccgatgtgggtaacgtgatgacccatatcggcgatggtttgactgtaggatttgttagcggtaacgctaatcttatcaccaaaattggcgatggcaccggagtgaatgcggcgtggggggaggcgaatatcctgactcaggtgggaaatggcgaccgttacacctttgcgaaaggtcaggcaaacatcgtgaccaaagtggggaagggacaggaagtcacggtggtgcagggcgatgccaacattatcacccatgtggggaacggcgatgattacaccggcgcctggggcgaagccaacgttgtcactaaagtgggtgacgggcgtaatgtggtgttggcgaaaggtaaggccaacatcatcactcaggtcggtgagggaaacagctttaatgccttatggagtgaaggcaatgtggtcaccaaagtgggagacggtatgcaggtgacggtggcgaaagggaaagctaacgtcaccacgacaataggcaacggtttaaatgtcactgccgcgcagggcgatgctaacattaacactcatgtgggtgatggcatttcggttaacgtggcgtgggggaaatataacgttaataccaaagtgggccatggcctgaatgtggcggtcatgaaaggtcagggtaatgcgaatattcaggtggggaatggtttatatgtgaatgccgcttatgcgcgcaataatgcggcgattaagataggcgggggggatttttacagcctggcggttgccgcgagtaatacagaaagcaacaaactagccgctctctacaacaatatcaaacaaatggtactcggcgtggggggcagtcaggcgatcgactatctggtgcagggggaggatgttaacacgcttagtacccatagaggcaggggcgcgattcatttagcagaagtttccgctattgatggcttccagatggatgtaacttctccggtaaattcagacttaaattatcgtctcaatagtgctgtaacaggggtagagatgcctgatgtggatgtaatagaaagtgctttaaatcaaaaaacgcgatcgatattagagcagaataataatctgattattaatggtgattttgaacaaggtaagttgggttggcagtttaccaataatatagaggtatatggtccagcgagtaattatggtcttgataataccggtcatggtaaacgtgtcagtgaacttgatgtggagggaaacaccacgatttatcaggatctgcgtaatttgtctgaaggcgaggtgatttcactgagttttgattttgctcatcgttccgatatcgatgttattcaaaatggcatggaagttgtttggaatggagaacgggtattctcagttattggaaattcgatagagtggaaaactaaaacgttagaattaattgcacaggcaggcagtaatcgcattgagtttaaaggaaccggtgagaatgatggcatgggttatattctggataacgttattgcaaaatctgagaaaccgctacaaaccgatgtgattatcgaacatgtaagagaggatgaggcggcgcaaaatgcgttaagcgataaagaaaaagcgggaaaagatagtcaattgttggagcaggaaaaaaagcggcaactggcagcgattgcgaaatcgcaatcccaattggaatcaacggatcaggcagcgctgaatcgaagtgggctggcacagcggaatgcgatagaagcagaagcgcaggccgaggccgacaaattggtttccatgacgcaaggtttggtggagcttgatgaccatgcaggttacagtggtcaatcaggcgacccgtggcgcaatccgtttgctgccaagttcttgagctatattcaagatgagtcgaattacgccaaatttattgcacagaaaagattagcttattcccgacaggttattgcggataaccagcaacaaatcgaaaaagcggttgcgaaatctgaggtcggcgtagcacaaagtgagcagcaccatgccggtgcgaaacaagatattgcagcagctcagcagaaagcggcgttaagaaaagaagaggtattattgcagcagcagcgggcccaagaagcggaaaatgatgccaatatcgcttatcaggaggagcaagatcgggggaaacgtgatattgcggcggctgaaaataagattgctcaagtacaaatcgatgccaaagtagcaaaacagagcgatgccagacctgatcgtgccggtgccaaggggagcggtttagcgggcaaagcctacgaatcgacaggcgcgggggaaaccggtagccatattgatcccgaattcgtgccggaagctgaaaaaaaattctacaaagagttgaccgaagaagagctacaggcgctggagagtgctgaacaagcggttgagcatctacagataatggctggtattcatgcagaaaataccggcgttttaatggcttcagcgttggccgaaggacaatctgacgatagtgtgatgccggcatcgaaccgttcagatgagtttgtcataatagagccgcaaatttcaggtattaacctgaaatcgttagggaatgataccaaggtagaacagcagggaaattccgcaatatttgaaagtgcaaaatttaatttattaaaagagggcaatcaactatttatcaatcccaaagtacaaatattgggatggaaaaggccgcgtagtgcagttctgactgttgtacgtgatactttctataaaacgatgagtcatttcgatgaagaacatgtattgcggtttgaacaggcgatagctgactggcaacagaatagcccaaaggaattcgctctatacgtcagtgaagtgaacttaatacgccttaggatggaccggataatggcgtacttacaggctcagcgcgctggagccgtaggggtgtttgggattgccgtggcacctcggtttgcggaacaatttactcaacgcgtcatctttgatggaaccggtcgggtagttggtttaaaaagcggtgtcacccaagacgaaattaatcagcttattgagtggaaaattacccccttgactcgaacgaattcaaccgctgaacgggaagcgccgaagactgagagtgaaagtctgattgcttttatgagtcaattggaaactgccaatatcccggcagtgctgcctttgattggacgcgccagacaactctggctcaccggacaagtcacatcggaagaaactatcaagttatttaatgacgccgtcagccagttacagggctaccctgagttacatgctttggttctgtcattacaggctgatgcttataaagaaaagtcgactacccaatatattgacaacctatttggccgtcgttttgattccgaagtggcccatacgttggtgaaaaccgcgccaccggatgcgctagccacctccagacggataggtcagtttctggtgcaggagtttgagctgcatatgcaaaatactgctggctcaactattcgcgatgcacagattgctttcaggatgcaagtttttgccgaaaaaattaaacaggatatccgcccctggttcagtcagacaccagaactgatcacattcctgcaagaaccgaccttggataactttaagatcatgatgactaaggtggataacgggtttgaaatgatcaaaattccgtttctggcggtaaaaatgtcgatcacagacgggatggggttacatttatctcaatggaaagcggaagcggatactttctatcaggaagagatctacaaggcccgttcgaccagtaatacattaacgcattatgctaatgtgacccacacagtggagttaactcagcagcaaaccaatgattatggtattgcattgccccaccagccatccggtgatccgtatgaaaatttcctatttggcagaaatgtgacggcaggcagggtgctgatgcccggacgggaaaccgcgcttgaacgtaacgctctggcgcaagggcattcagtggtggcgggggcatcgggctcaaccaatatcatggttcacctcaataacgatattgcccgtcaagatcctaccttctcgcgggaacaggcgtaccttaatacgttggcgtttctggtgtttgatggcggccattcggttaatgagagtttgacggtctacaaagcgttacaggcgatgggtgatgagcgtcggcaggtactgcaacattacaccgccagttatatggacctgatggatattgccgaagataagggggaacaatggataaatcaggcattaaatagtgcatttgagaaaaccctggacctttatcggaaatattcccctaagagagaacggaacaactctccgacggtggcatcgcaggcgttaccagataaacatggcgcgtcagagtcagtattcattgaggatgagagcactttgccacgggataaaactgctttaaacccagcaccccaattatctaacagcgaacggtatagttttaaagaagatcgcagctatatcagtgatgagacgcagacgatacttaataatgtggtgaagagctctaggcaaaagagtgacaatcatgggacccgttttgatggtcagctcattattcagatggaaaatgacccgattgtagcaacagccgcaattaatctggcgggtaagcacccagattccagcgtggtggttaaactggatgcggatggcaaatatcatgtcatttatggtgatcctgccgaattatctggcaagttgcgttggcaaattgtggggcatggccgcgacgaatcggcacaaaataacactcgtctgagtggttaccgtgctgatgaattggcaataaaactcaaacagttcagtcaggactttgcgccggcaggtgaacctgagcgcatcagcatcgtgggctgttcactgatcagtgaggataagcagcatggttttgcccaccgttttattatcgctttagataaacagggtatccgtagcgaagtttcagcgcatcgtagtgacgtggccgttgatgcaacaggccgtaaatttgcccgcgataaacatcatcagtgggttaacaaattgaaggataacaaacgggtgttgtactggaatgaagagggagaactcgcgacgacaacagagctggaacgttgtggggtagcagaaagcgatatcaaccttgcccgggtggggtacacggcagcggatttagtcactagaggggcaattgcggataaccatgatgcgttcactgcgccaaggaagcccagaaataggatagagccgggttcaaatcctcaattgggtaagccgctgagttacgccgggaatatgcagataaatgtgggcgatggcgagtttaccgcgatcaactggggaacctccaacgtagggatcaaagtgggtaccggcggctttaagtcactggtttttggtgacagcaatgtgatggcgcacatcggggagggtgacagtgaacacagcgtcgagattgccggttatcaagcgcttgaaggggcgcaaatgtttattggtactcgtaacatcagcttcaaccagggacgcagtaatgacttgattgtcatgatggataaatctatcgctacgccactgctggttaatccatttgacggcccggcgcgtattaccggtgtactgaagtctattgctcgttccggcacagagtggaactggttagcggcacaggatcagcagtggacgatatcgggagtgagaaagtttttgtggaacatgtcgggtttagaccaaaccagcagtgtggattacaagacgttggttgatctggatgcgcagcacgagcgcagtagccggggtttgaacagtgacatggaaacagcattgaacaaaaagtactaccaatggctaagtaataacggcaatgatactgagaccaataaaatgagccgtgtggataaattccgtcgggccaatgagaagctgattttcaattttgcggtaggtggtcaaggggcggacattcaggtcacaaccggtagctggaactttatgttcggtgaccatattcagtcgattctggataccaacttgggttcgttgtttggcctgatgacgcagcaatattcaacaacgggtatggcgaagaccacatttacctataagccccaggatttaccgcgtcagcttaaaaacagactgctggggcgattagccggtgtaaatgcagagaccacgctggcggatatttttggcgtggattataccccaaaaggccgaattgttgcccgtaccggcgagccggttgatggccaggcgattttgcgagagatgctggaagtgattaggcagtttgggggggatcaattccatgttttcgctgatccggataaatggattgaggggttgaaacagaacattgatatgagtgctgatggtattgaatcatttcttgtcagtcataggctgaaagagaaagcgccagatgaacatcgggaagaaagcgtaccgggcgacatcaacaccgggaatagtcaggcggataacaaaccagagcggatatggggttttaattcgctgaatttgcctaacttgtttgcgacgatgttcagtaaagataaacaacaagagatgaagtcactcgtgaccaatctaaaagagaatcttactgcggatctacttaatatggagggaaaaacctttgatttcctgcttaacagcggccacctgcgaggggacggtgatatccatatctcgttggggaactataacttcaactggggcggtgaaggtaaagatctcggtgcttatctgggcgataacaacaacttctggggagggtacggagatgatgtttattactccatcggcacagctaacctctttaccgggggggaaggcaatgatctgggcgttctgatgggacgtgagaactggatgtttggcggtcatggggatgataccgcggtaatagccgggcggattaactatgcttttatgggtgaaggtaatgaccagacatttgtttttggtgaaggcgggctgattgatgccggtagcgggtatgattatgttgtgactgcgggaaactacaaccgggtggagaccggcgaagatcaggattatgccgtgaccatcggtaataacaactgggttgaattgggggcaggccatgactttggttgggtgtttggtaatgacaatcgaattgatggcaacacgggtgacgatgttattaaactgatgggttatcatgcggtaattaatggcggagaaggtggtgaccacctgatagcggccactatttcgaagttcagccagtttgatggcggagagggtcaggatctgctagtgctgggcggttatcagaaccatttccagggtggtgcaggggtagacagctttgtggtcagtggccaggtgattgacagtcaggttgatgatatcaatgcggaagatatgattgcctttaacgatattgactggaaagatttgtggttccagcgcagtggatatgatctggtgttatcagtaaaccgtcctacacaggataaaaccgcgcagggtatctttgaatcaataggttcagtcacctttagtgattactttaatggtaaccgtgccaaactggtgatgcggatgggggataagaatgccttgggagagcgtgagtttactgcgctgtcggataatgcagttgataccttaatccaggcaatgagcagttttgcacccactgtgggggataatggttttattgacaatctggcgagtcagacgaaaatcgtcatggcaacagcgtgggcagataccacgagaggcaaagtgcagtttgcgtaa

SEQ ID NO: 7528 - DNA, 654 bp, Photorhabdus luminescens
atgggtaaatcattaaataatataagtgcagagttcctctttacaggaaaacactacgacaataataacggtaataggattgctgctattggtgttggtggtgatgtttatgcttttggcggggatgatgatgttacgattggttcatttaaagtcgatgtataccatacagatggtgacctttcggtaaaaggggcatcaggttataccggtattagtaagacgggaaatggcagactgtcatttgagggggtagctggtgcaactttcattgatcacataggtgaaaccggggatttatcttatatgggtgctgctggctataacaaactggttcgtaagggggtgtcgggtgatatcggttttaaaggggccggtggatataatcagttatggcatgagactaaccagggaaatttaggttttgctggtgcaggggcatacaatgacattgaccgtacttggtttaatcgttattcaggttcacaggggaatgtggtttttgatggtgccggcgcggcaaacagcatcaattcacgggtagaaagcggtgacatcatttttcagggtgttggcgctgataatcatatcgtgcgtaaaggtagaagcggtaatattgtcttacgggggggcgggggcatcgaatcgcattga

SEQ ID NO: 7529 - DNA, 11019 bp, Photorhabdus luminescens
atgggtaaatcatcaaatagaagtacagagtacatatttacgggaaaatactacgacgacgatgataatatcgataatagtattactgctattggtattggtggtaacgtttatgcttatggcggagatgatgatgttaccgttggttcatttaaagtcgatgtataccatacagatggcgaccttgcggtaaagggggcttcaggttacaccggtattcataaaacgggaaatggcgggctgtcatttgcaggggcagccggtgcggtttttattaatcacacgggtgaaacgggaaatttaaattattcgggtgtggccggttataataaactggttcgtaagggtttatctggtgatagcagttttaaaggcggcggtggatacaatcagttatggcatgaaactaaccggggagatttagattttgccggcgcaggggcaggcaataacattgaccgtacctggtttaatcgttatcaagattcacagggaaatgtgatatttaatggcgcaggcgtgacaaacaacatcaattcgcgggtagaaagcggtgacatcattttgcatggtattggtactgataatcatattgtgcgtagaggtagaaacggtgatattctcttgcgtggtgtaggtgcagcgaatcgcattgagcgtatacgccacagtgaagataagtatggacagacacagggtgatattactcttgaaggtgcggggggatataacacactctattctgatgttgctcacggtaatattcattttaccggtacgggggtttataacaaaattgcccgagtaggtgtgagaaacgaaatagaatttgctcaggctaaagatattatcatgacatcggcaacaatggagggagatgggactcaacaatctcggcaagttaaagcggttaaatccgcggtagagcctgatacttatctctttgccattgccaataatattaatactaaagttgtcgctgtacggctgcgaaataatcctgataccggtaagctccgttattatgccacttcttggtataagcaaggtgatcatcttgaggatattgctaaggaaaatatcaatacaaataatggatttatccccgttaaaggggacgatactattacgcttgccaatattaatgtggtatatcgacaaaaaaacacaatacagggtgttgtgaaggcattattaaccgataaatgggggaattatgcccgtgggatcaatattaaagcggaagatgtcatactggctagtgccaaaataggaggggacacactttcttctaatgggctgaaaatcgatgtctctccggttaaatcaaacacgcagccgaatacttatgtgtatgcaatattcctggacccttataccaaagtggttgaggttaagctggcgaatgatagtgaaacagggaggctgaagtatattgcaagatcttggtataaaaaaggtgaccatactggccgcatagcaaatgaaactttttcctatccttatggttatcgattaataagagctggttatacggtaagtgagcttcactataagttaaatgtaacagatgatattactgattgtttgactgatcttaaaagctattttgagcaagatgttatcaaatcatcaaagagtggcggtgatagttccggtaatatttattttagcggcgcagggggcggaaacattattaaatctgatgtcacgcggggagatattaatttcacagggttgggggcagcgaacgttattttgcacgactcaaagttcggtgatacgcattttgacggtgcgggtgccgccaacgtgattgtaaaaaaaggtgaaaagggcgatctgacattccgtggcacgggtttagccaatgttctggttcaccggggtcagagtgggaaaatggatgtttacgccggtggcgcggtaaatgttcttgtgcgtatcggggatgggcaatacctggctcatctgctggcttatggcaatatctcaatccacaaaggcaacggtagcagccgggtgcggatgctgggcggatataacacgcatactcagataggtaatggtgatggaaactggtcagggaagggcggttttaacgttatcactcaagcgggaaaagggagcatctcctccgtactgttaggtggcgctaacgcactgactaagctcggggcgggcagtctggttgccggtatgcttggcggtgccaatattatcagccatctcagtgaggagactgaaacgtcaaataccacagcaatagcgttgggcggtgccagtatcctgactaaaaaagggacaggccatgcgcaggcggtcatgggcggcggggcaaatgtccttacgcatatcggggacggcaataccacgggcgttatgctgggtggcgcgaatatcttgactaaagtcgggagtggcgactcgaccggcattatgttcggcataggcaacgtgttgacccatgtcggcgacggtttgacgctgggcgtgatggctgcggcaggcaatatcttcactaaagttggggaggggacatctatcgcagccttgactggtactggcaacctgtttacccatatcggcaaaggggatgtctgggcgctaatgggcggtgcagtgaacgtctttaccaaagtgggtgacggtgatgcgctggcattgatggtcgcggcgggcaatgtgtttacgcatattggggatggcaccagtgttgcgctgatgcaggcagaaggcaatatcgccacgaaagtgggtaatggtatgacgttggcggcgatgatcggcaaagccaatatttttacccatgtcggggagggcaatacctttgcggccctgattggcggggccaatgtgctgaccaaagtcggtaacgaccagacagccgctttaatgatagggaaagccaatatctattcccatgtgggtaatggccccagtatcggtttgtttgccggtgaactgaatgtcatgaccaaagtgggtgaggggacaacgctggcggccatgtttggtcgggctaatataatgactcatgtgggggatggtttaaccggcgtgttagcactgggtgaggctaatatcgttactaaggtgggtaatgattttatgggggttgttgccacggtgaaggcgaacgttattacgcatgtcggcaatgcggtaaccgccagtatcctgtttggcaaaggcaatattctgaccaaagtgggcgacggtactacagtcggcctgcttgtttccgatgtgggtaacgtgatgacccatattggagaaggctcaacggtggggtttgccaaaggaaaagccaatcttatcaccaaaattggcgatggtgccggggtgaatgcggcttggggggaagcgaatatcctgacccaagtggggaatggcgaccgttataatttcgcgaaaggtcaagccaacctgatgaccaaagtggggaagggacaggaagtcacggtagttcagggggatgccaacattatcacccatgtgggtaacggtgacgattacaccggtgcctggggcaaagccaatgttgtcactaaagtcggtgacgggcgcaatgtggtgctggcgaaaggtaaggccaacataattactcaggtaggtcagggagacagctttaatgccttatggagcgaaggcaatattgtcaccaaagtgggagacggtatgcaggtgacggtggcaaaagggaaagctaacgtaacgacaaccgtaggcaatggcttaaatgtcaccgctgctcatggtgactctaatataaacactcacgtaggtaatggcgtttcggttaacctggcgtggggtaagcacaatattaataccaaagtgggcaatggcctgaatgtggcggtcatgaaaggccagagtaacgccaatattcaggtgggtcatggtttagcggttaatgcctcttatgcgcgcaataatgtggcgattaagataggtgagggtgatttttacagcctggcggttgccgcgagtaatacggaaagcaacaaactggccgctttcttcaacaatatcaaacaaacggtactcggtgtgatgggcagtcaggcgatcaactatctggtgcagggggaggaagttaacacgtttggcattcataaaggcagaggggcgattcatttagcagaagtttctactattgatggcttccagatggaggcaattgcgccggtaagttcagacttaaattatcgtctcaatggtactgtgaccgcggtagagacgcctgatgtggatgtaatagaaagtgttttaaatcaaaaaacgcgatcgatatcagatcagaataataatctgattattaatggtgattttgaacagggtaagctgggctggcagtcaactcatggtatagaggcgtatggttcagcgagtgcttatggtcttgttattgccggtcatggagaacgcgtcagtgaacttgatgcggagagaaacaccacgatttaccaggatctgcaaaacttgtctgaaggagaagtgatttcactgagttttgattttgctcatcgttccaatacctatgttatcaacaatggcatggaagttttctggaatggacaatgggtattctcagcttctggcaatgcaatagagtggaaaagtaaaacgctggaattaattgcacgggcaggcagcaaccgcattgagtttaaaggaaccggtttgaatgatggtgtaggctatgttctggataacgttgttgcaaaatctgagaacccactacaaaccgatgtggttaccgaacacgcgaaacaggataaagcggcgcaaaatgcattaaacgataaagaaaaagcggaaaaagatcgccaactgttggaacaggaacaagagaaacaactggcaggaattgcgaaatcgcaatcccagttggaattaacggatcaggcagcagttagccaaaatgggctgacacaacgcaatgcgatagaagcagaagcgcaggcggagactggcaaattgatttccatgacgcaaggtttggcggtgcttgataaccatgctagttacagcggccaatcaggtgacccgtggcgcaatccgtttgcggccgagttcttgaaccatgttcaaaatgagttgtattacgtcaaatttattgcacagaaaaaattagctaatgcccgacaggctattgcggataaccaacaacaagtcaaaaaagcagttgcgaaagcggaagccggcgtagcacaaagtgagcagcattgtgtcagtgcaaaacaagatattgcagcggctcaggaaaaagcagaattaagaaaaatagaggcggtattgcagcaacagcaagccaaagaagcggaaaatgacgcaaatattgcctatcagggggcggaatatcggggtaaacatgatattgcggtggctgaaagtaagattactcaagtacaagtcgatgccaaagtagcaaaacagagcgattcccgacctgatcgtaccggtgctggggggagtggtttatcgggcaaagcctacgaatcgacaggcgcgggagaaaccggtagccatattgatcccgaattggtgccggaagctgaaaaaaaattctacgaggggctgagcgaagaagagctacaggcgctggatagtgttgaacaattggttgatcatctaaagataaatgccagtattcatgcggaaaataccggcgttttaactgcttcaaaatttgctaaagggcaatctggcagtatggtgatgccagcgtcgaacagtccaggtgaatttgtcagaagagtgccgcgaatttcaggcattaatctgaaatcgttgggggatgatatcaagctaggacagaagggaaattccgcaatatttgaaagtgcaaaatttaatttattgaaagagggcagtaagctgtttatcaaccctgatgaacgaacattagggcagaaaaggccgcttagtcaagcgatgactgctgtacgtgatattttctataaaacgatgagtcatttcgatgaggaacatgtattgcagtttgaacaggtgatagctgactggcaacagcatagcccaaaggaatttgctctacgcgccaatcaagtgaacttaatacgttttaggatgggccgggtaatggagtacttgcaggcccagcgtgccgaatccgcaaaggtgcttgggattgccgtgtcgcctcagcgtgctgaacaacttagtcaacgcgtcatctttgatggaaccggccgggtggtcggtttaaaaggaagtgtcacccaagacgaaattaatcatcttattgagtggaaaattacccccttgacccgagcgaattcaaccgctgaacgggaagcgcctaagaccgaaagtgaaagtctgattgcttttatgagccggttggaagccgcaaatatcccggaagcgatgcctttgattgaacaggccaggggactctggctcatcgggcaagtcacctcgaaggaaactatcaagttatttaatgatgctgccagccagctacaggcatacccggagctacaggctttggtactgtcattacaggctgatgctcacaaaaaaaagtcgactacccaatatattgataacttatttggccgtcgttttgattctgaagtggcccatacgttggtgaaaaccgcgtcaccggatgcgatagccgtctccaagcggataggtcagtttctggtgcaggagtttgagttgtatatgcaaaatactgctagctcaactatccgcgacggacagattactaacgggcagatggctatcaggatgcacgcttttgccgaaaaaattaaaaaggatatccgcccctggttcagccgggtgccagaactgactacattcttgcaaaaaccgaccttggataactttaagatcatgatgactaaggtggataacgggtttgaaatgatcaaaattccgtttctggcggtaaaaatgtcgaacacggatggtatggggttacatttatctcaatggaaggcggaagcggatattttctatcgaggtgagatctataaggcccgttcgaccagtaatacattaactcatcgtgctgatgtgacccacacagtggaattaattgaccagcaaaccaacgattatggtattgcactgccctaccagccatctggtgatcagtatgacgatttcctgtctggcagaaaggtggcggcaggcagtgtgctgacgcccggacaggaaaccgtgcttgaacgtaacgctctggcgcaagggcattctgtggtaacgggggcatcgggctcgactaatatcatggttcacctcaataactatattgcccgtcaagatcccactttctcgcaggagcaggcataccttaatacgttggcgtttttggtgtttgatggcggccattcggttaatgagagtttggtggtttacaaagcgttgcaggcgaccagtgatgagcgtcggcaggtactacaacactacactgccagttatatggatctgatggatattgccggagataagggagaacgatggataaatcaggcattaaatagcgcatttgagaaaactctgcacttttatcgagaaaatacccctgagagaaaacggaacgatgttccggtagaagcattacaggcgttatcgggcaaaaatggaacgtcagagtcgctattcattaaggatggtggtacttcaccgcaggataaagccgctttaaacccagtgacccgattctttaacaacgaactatatggttttaaagaagataaaaatcaggatagggtgaagaattcgcagcaaaagaatgacaatcgtgggacgcgttttgatggccagatcattattcagatggaagatgacccgatcgtggcaaaagccgcgatcaatctggcgggtaaacacccggattccagcgtggtggttaaattggatgcggatggcaaatatcatgtcattgatggtgatcctgccggattgtcaggcaagttgcgttggcaaattgtggggcatggccgcgacgaatcgacacaaaataatacgcgcctgagtggttaccgtgctgatgaattggcaatcaaactaaaacagttcagtcaggactttgagcaggcaggtaaacctgagcgtatcagcatcgtgggttgttcactgataagtgatgataagcagaatggttttgcctaccgttttatgtttgctttagataaacagggtatccgtagcgaggtttcagtacgccgaagtgacgtggctgttgatgcaacaggtcgtaaatttacccgtgataaaaattatcagtgggttaacagattggacgataacaaacaggtgttgtgctggaatgaagagggggaactcacggccacaacagagagggagcgttgtggggtggctgaaagcgatatcaaccttgcccgggtggggtacacggaagctgattcagtaaccagaggggcaattgcggataaccatgatgttttcatcgcgccaaggaagcgcaaaaacaggatagagcccggttcaaatcctcaatcggataagccgctgagttacgccgggaatatacaggtaaacgtgggtgatggtgaatttaccgcgatcaactggggaacctcgaacgtcggtatcaaagtgggtacgggcggctttaagtcactggcttttggtgacaacaatgtgatggcgcacattggggagggtgacagtaagcacagtgttaatctgggtggttatcaggctttcgaaggggcgcaggtgtttattggtactcgtaacatcagtttcaaccaagggcgcagtaatgacctgattgtcatgatggataaatccctctctacaccaccgctggttaatccatttgatggtactgcgcgtatttccggtgtactaaagtctattgctcgttctggtgaagagcagaactggttagcggtgcaggatcagcagtggacgttatcgggtgcggaaaaatttgtgcgtgacatgtcgggtttagaccaaaccagtagtgtggattacaagacattggttgatctggatgcgcagcacgagcgcagtagccggggtttgaaaagtgacacagaaacagcattgaacaaaaaataccaccgatggttgagtgataacagcaatgatattgataccagtaaaatgagccgtgtggataaattccgtcaggccaatgaaaaactgattttcaattttgcagtaggtggtcgaggggcggacattcaggtcacaactggtagctggaactttatgttcggtgaccatattcaatcgattctggataccaacctaggttcgttgtttggcctgatgacgcagcaatattcagcaacgggtatagcgaagacaacctttacctacaagccccaggacttaccgcgccagcttaaaaacaaactgttgggtcggttagccagtgtgaatgcagagaccacattagcggatatttttggtgtggattgcacgccggaagggcagattgttgcccgtactggcgagccggttgatggcacggcgattttgcgagagatgctggaaatgattaagcagtttgggggggatcaattccgtgtcttcgctgatccggataaatggattgaggggttgaaacagcacatcgatatgggtgctgatggtattaaatcatttcttatcagtcatgggctgaaagagaaagcgcctgatgaaaatcgggaagaaagtgtgccgggtgttatcaacagtgggaatagtcaggttgataacaaaccagagcgggcattgggctttcattcgctgaacttacctaacctgtttgcgacgatatttaacagaaataaacaagaagagatgaggtcattagtgaccaatctgaaagagaatctcaccgccgatctgctcaatatggagcagaaaacgtttgatttcctgcgtaacagtggtcatttgcatgatgatggcgatatccatatctcgttagggaactataacttcaactggggcggtgacggtaaagatctcggtgcttatctgggcgataacaacaacttctgggggggacgtggagaggatgtttattacgccatcggtatttccaacctctttactggcggggaaggcaatgatctgggtgtcctgatggggcgtgaaaactggatgtttggcggtcatggggatgataccgcggtaatagccgggcggattaactatgcttttatgggtgaaggtaatgaccagacatttgtttttggtgaaggcgggctgattgatgccggtagcgggtatgattatgttgtgactgcgggaaactacaaccgggtggagaccggcgaagatcaggattatgccgtgaccatcggtaataacaactgggttgaattgggggcaggccatgactttggttgggtgtttggtaatgacaatcgaattgatggcaacacgggtgacgatgttattaaactgatgggttatcatgcggtaattaatggcggagaaggtgatgaccacctgatagcggccactatttcgaagttcagccagtttgatggcggagagggtcaggatctgctagtgctgggcggttatcagaaccatttccagggtggtgcaggggtagacagctttgtggtcagtggccaggtgattgacagtcaggttgatgatatcaatgcggaagatatgattgcctttaacgatattgactggcaagatttgtggttccagcgcagtggatatgatctggtgttatcagtaaaccgtcctacacaggataaaaccgcgcagggtatctttgaatcaataggttcagtcacctttagtgattactttaatggtaaccgtgccaaactggtgatgcggatgggggataagaatgccttgggagagcgtgagtttactgcgctgtcggataatgcagttgataccttaatccaggcaatgagcagttttgcacccactgtgggggataatggttttattgacaatctggcgagtcaggcgaaaatcgtcatggcaacggcgtgggcagataccactgagggtaaggtgcagtttgcgtaa

SEQ ID NO: 7530 - DNA, 5127 bp, Photorhabdus luminescens
atgtgtagcataattacgaaacgttatttagaaaaaatcgtcgatgtcgaccagtggtttgataatggtaacgataatacgaggttacccgatgagttatatttcattgaagaccggattgtatttaatcatcaaagaaatactaaaattcttacggagaatgtggatagcgcttggaaacccttgccaaagttgatgtcggtaagtgagtttcaggaagcggcatcggtggtgggcaaaattcgtggtgataattacaaaaaagtcattgatgcgctagagagttatcacaatatccaacaaggcagaaaagactatatattgaatgtggttagaaaattatccgatttgcgccaacaagttgaaggatacctcttaggtcatcctgactcaggtcgtgtaccggcgatgagggccttattgtctcaaattgacacgtgctttaatgagtcgatggtctttgctgggtccaccgtaaaaatcccagggcaaggcgatttcagtaggctgtatgatcagcttggcagtgccaatcttaaagattcaaaacacctttatattgatgaaaacggtgattttgttactcggggtaaggaaaatattcatattaatcagaaagcggaaagtgctgataaggcggttgagcaagtcaaagcggcggttattcaagaatatggtcaagatatttcagatgccgtcttctcgaatctgaaagccagcgatttatcgaatgacgggaaaggtattgatgtctctggtttaagaaagatccatcaggcgattgagcaatatttatctccaataagtgccacactgtttgtttggaaaccaagcgctcatagcctattaggccacggcgcaatgcaaattggccaggggcgtgcgcatgttaatgcggacatcgcaggctttatcaataagagaaattatgccagttggtggccgttgttgaatcatagaacccttgaaatagatgtcgcctacgaagagcgcgataagttcggtttgagatatggtgactataaattacaacgtttcactagcaggctagaatgggcacaaggggtagatgtcgccttcaaagatgttactgaagactttactatgatggcattggcagatcctagattgctgcaatcatccggtattcctaaacagatataccagccatttgttgacatgtggaatggttatgaacacgagagggcagatgttggcaggttttttgcggaagaactgcgataccaagccaataaaaatgttcaagaccctcaattgatagaaaaacgtactgccaatgtcattcgtcaatttaaagagcgagagttggcggatattcagaactttagagaccgcgaagccgatcaagggcgcgtatttcgtattaatcttgaaggtctggatgtggcggcaatgcaggcgaaatggcgtaaaatcagcaatgatcctaatgaacattaccaactgctgaggaataactgttcaagcattgttgccagaatattaaaagcagggggagcagataaacttgtcggccataagtggctgccaaagtttggtgtctggacgccaaccgagttgtttaactatgctcaggcacttcaggaggctcagcttgaaataatagcgaaaaagaaaagccacacgcctgtggaagatttaaccgcattatctggcaaaaataaggtattggaaacggctgtggtgaaaaatggcggcacttcgttactgaatcagcttattaccaaggggggcttgcgtagatataatgatgttgccaatgtgccgcgtgttcaattgcttaatagtttgcaagtcgcaccagcggtaaagttagctcataagcccgttgagctctggcaaaccgccgaggtaacaccacaaaccgatggccgtgaaacgcattttgatagtcagatcattatccaggtggaggatgaccttgctgtcgccgaagcagcggctaatctggcgggtaaacacccagattccagtgtcgtggttcagcttgattctgagggtaaataccgtgttgtctacggcgatttatctcaacttaaaccatcagacaagttgcgttggcaacttgtggggcatggtcgtagcaaatcagagcagaattacactcgtctgggtagttacagtgcagatgagctggccgtgaaactcaaacaattcactcgaaactttagtcaggcgggtaaaccagaccacattagcatcgtgggttgttcgctgataagtgatgacaaacgaaatggttttgcccgtcactttattacggccttaaaggagcagggtattcagacgacggtttcggctcgtcgtagtgcagtcgccgttgatgtggacggccgtaaatttacctggaatgaacgccgtcaatggatccataagctggctgataacaaagtcgtcctgagttggaatgaaaaaggcgaacttgaaacccgttcagagcgcgtgcgtcatcatattgctgaaagcgatatccatctttcgcgtgtcggcatggcggatgcggagatgccggccagaggggcggttgtggataataccgatattttcattgcaccagagaaacgcaaaaataacattgagaccgattcaagtgatatctcgaataactggctaagttactcgggtaatattcaggtgggggtggggaatggcgaattcaccgcgctcaattggggaacctcaaacgtgggtgtcaaagtcggtatggggggctttaagtcactggttttcggggataataatgtgatggtgcacatcggcaatggcgacagtaaacaccgcgtcgatattgccggttatcaggcgcttgaaggggtgcagatgtttattggcaaccgtaacatcagtttcaatcaggggcgcagtaatgacctgattgtgatgatggataaatctctgccaacgccgccgctggttaatccgtttgatggtaccgcccgtatttccggggtcttgcaaggtattgctcattttggtgaaaagcaggagtggctggcggcgcaagatcagcaatggaccctcgccggtgcgaaaaaatttgtgctggatctgtccggtttggaccagaccagcagcgtggactataaaacgctggttgatctggattcacagcatgcccgtagtagccgtggtttgaagcaagatattgaagtgacgttgaataaaaaattcaaccagtggctcacccgcaatgtgagtgatatgggcacaatgagccgcgcgaataaattccgtcaggtcaatgagaaactggcattcaactttgcggtaggtggccggggagcggatattcaggtgaccacgggtaactggaacctgatgttcggtgataatattcagtcgattttggataccaacctgggttcgttgtttggcctgatgacgcagcaatattcggcaacgggtatggcgaagaccacgtttacctatcatccacaggatttgccgcgtcagcttaagaataagctgctgggccgattagccggtgtaaacgcggagacgaccttagcggatatttttggcgtgaattacaccccggaaggtcagatggtttcccgtacaggagacctggttaatggcgaagcgattctgcgagagatgctggccgtgattgcagaatttagtggcgatcaactgaaagcgtttacaaatccggagaagttgcttgatggtttgaaagcgggcatggcgatgggcggggatggcatcagatcgtttgctgaaagtcatggtctgcaagagagagccccggatgaaaaccgtggatcagaattgccagtcagcatcaatggaataagtgctcaggccgatgataaagcaaaacctgtatttggttttaactctctgaatctgcctaatctgtttgcaacgatgttcagtcaagataagcagacagaaatgcactccttagtcacgcatctgaaagagaatctcaccgcggatctgctcaatatggagcagaaaacatttgatttcctgcgtaacagcggtcatttgcaaggggatggcgatatccatatctcgctggggaactataacttcaactggggcggtgacggtaaagatctcggcgcttatctgggtgataacaacaacttctggggtggtcgcggagaggatgtttattacgccatcggtacttccaacctctttaccgggggtgaaggcaatgatctgggcgtcctgatggggcgtgaaaacgggatgtttggcggtcatggcgatgataccgcggtaatagccgggcggattaactatgcgttcatgggtgaagggaatgaccagacatttgtttttggtgaaggcgggctgattgatgccggtaacggggacgactacgttgttacctccggcaactacaaccgggtggagaccggggaaggtcaggattatgccgtgaccatcgggaataacaaccgggttgagctgggtgaaggccatgactttggtcgggtgtttggtaatgacaaccagattgacggtaacgcgggtgacgatgttattaaactgatgggctatcatgcggtaattaatggcggagaaggtgatgaccacctgatagcggccacaatgtcgaaattcagccagtttgacggcggtgaaggtcaggatctgctggtgctggggggataccagaacgacttccgggggggcgcaggagtagacagctttgtggtcagtggtcaggtcattgacagtcaggttgatgatatcaatgcggaagatatgattgtttttaacgatattgactggcaaaacctgtggttccagcgcagtggatatgatctggtgttatcagtaaaccgtcatattgaggataaaactgcgcagggcgtctttgaatcaacagggtcagtcacctttagtgattactttaatggtaaccgagccaaactggtggtgcagatgggggataagaatgcctcgggggagcgggagtttactgcgctgtcggataatgcggttgataccctaatccaggcaatgagcagttttgcgcccaccgtgggagataatggctttattgacaatctggcgagtcaggagaaaatagtcatggcaacggcgtgggcagataccactgtgggtaaggtgcagtttgcgtaa

SEQ ID NO: 7531 - DNA, 5856 bp, Photorhabdus luminescens
atgggtaaatcatcaaatagaagtgcagtgtacctctttacaggaagatattacgacgataatgacggtaatagtattactgctattggtattggtggtgaggtttatgcttatggcggaaatgatgatgttaccgttggttcatttaaagtcgatgtataccatacagatggcgaccttacggtaaagggagtatcaggttataccggtattcataaaacgggaaatggcgggctgtcatttacgggggctgccggtgtagctgctattgatcacacgggtgaaacgggaaatttaaattattcgggtgcggccggttataataaactggtccgtaaagggttgtctggtgatactcgttttagaggggccggtggatacaatcagttatggcatgaaactaatcggggagatttagattttgccggcgcaggggcaggcaatgatattgaccgtacctggtttaaccgttatcaagattcacagggaaatgtgacgtttaatggcaccggtgctgcaaacaatatcagctcgcgggtagaacacggtaatgttacattcaacggggccggtgctgataatcacatcgtacgtaaaggtaaagagggtaatattatcttacgtggcgcgggggcatcgaatcgaattgagcgtgtataccaaaataaagacgagtatgaacagacccgcggtgatattacttttgaaggtgtcggcggttatagccagctctattctgatgtcgcgtatggcaatattaatttctccggtgcgggggcttacaatgtaatcaccagaatagatgcgaatagcgatttcgatgatgagacactggagtttgctaaagccaaagaagttgtattaacgacggcaacgatggaaggaagctggatacgagagtctcagcaagttacagggatgaaatcaaccgtcgagccggatacctatctttttgcctttgctgacaaaatgtacactaaaatcagtaaagttcggctgcgaaataatcccaccacgggcagactcggttattatgccacttcctggtataaagcgggcaatcaccttgaaaatcttgcggcgaaagaaatttcgtcaggcaatggatttatcacggtaaatgctaatggcgcttatcatctctccggtttaatctttgagcgtctgcaacccgtcacgatccatgctatcgaggaaaacctgttgtcagatcagtgggtaacctatacgggtggcatgatggttaaagcggaggatatctcgctaggcgatgccaaaatgggggggtatgctgtcttttctgatggtagcacagtcgatgtttccgcagtcaaatcgaaccgaaaacccaatacttatgtgtatgccaaagtattgggaccctataccaaagtggttgaagttcagttggccaatgatcccgaaacaaagcaactaaaatacatcgcaacagcctggtataaaacaggcgattatacgggtgatttagccaatgaagagttttcctatgataacgggtatgcctctgctggctccggttacacattaagtcagcttcaatatgacatcaatacagtgcgccgtaccgcccatcaattagtgcatagcaaagaatatcatcagcaagatcttgtgaaattatctgcaagcagtggtgacgttaattttaacggtgcagggggcggaaacattattaaatctgatgtcacgcggggagatattaatttcacagggttgggggcagcgaacgttattttgcacgactcaaagttcggtgatacgcattttgacggtgcgggtgccgccaacgtgattgtaaaaaaaggtgaaaagggcgatctgacattccgtggcacgggtttagccaatgttctggttcaccggggtcagagtgggaaaatggatgtttacgccggtggcgcggtaaatgttcttgtgcgtatcggggatgggcaatacctggctcatcttctggcttatggcaatatctcaatccacaaaggcaacggtagcagccgggtgcggatgctgggcggatataacacgcatactcagataggtaatggtagcgcggattggtctgggtctggcggttttaacgtcatcactcaggcgggaaaagggagcatctcctctgtactgttaggcggcgctaacgtactgactaagctcggtgcgggtagtctggttgccggtatgcttggcggtgccaatattatcagccatctcagtgaggggactgaaacgtcaaacaccaccgccattgcgttgggtggagccaacatctttaccaagaaagggaaaggccatgcgcgggcggtcatgggcagcggggcaaatgttcttacgcatatcggggacggcaataccacgggcgttatgctgggtggcgcgaatatcttgactaaagtcggaaagggcgacacagctggcatcctgttcggcataggcaacatgttgacccatgtcggcgacggtttgacactgggcgtgatggccgcggcagggaacatcttcactaaagtcggggagggtacatcaattgcggccatgattggcgcgggtaacctgtttactcatgtcggcaaaggggatgcatgggcattaatggggggagtgggtaatatttttaccaaagtgggtgacggtgatgcgctggcattgatggtcgccgcaggcaatgtgtttacgcatattggggatggcaccagtgttgcgctgatgctggcaaagggcaatatcgccacgaaagtgggtaatggcatgacgttggcggcgatgatcggcaaagccaatatttttacccatgtcggggagggcaatacctttgcggccatgattgggggtgccaatgtgctgaccaaagtcggtaacggcctgaccgctgccttaatggtagggaaagccaatatctattcgcatgtgggcaatggccccagtatcggtttgtttgccggtgaactgaacgtgatgaccaaagtcggtaatggcacaacgctggcggccatgtttggtaaagccaatgtgatgacccatgtgggggatggcttaacgggggtcttggctctgggtgaggccaatatcgttaccaaagtgggtgatgattttatgggggttgttgcggcggcgaaagcgaacgttattacgcatgttggtgatgcgacaaccgccagtatcctgcttggcaaaggcaatattctgaccaaagtgggcgacggtaccacagttggcctgcttatttccgatgtgggtaatgtgatgacccatgtcggcgagggcacgacagtggggtttgccaaaggtaaagccaatcttatcaccaaaattggcgatggtgccggggtgaatgcggcttggggggaagcgaatatcctgactcaggttggtgatggcgaccgttataatttcgcgaaaggtcaagccaacctcgtaactaaagtggggaagggacaggaagtcacggtagtgcagggggatgccaacattatcacccatgtgggtaacggtgacgattataccggtgcctggggcgaagccaatgttgttactaaagtcggtgacgggcgcaatgtagtgctggcgaaaggcaaggccaacataatcactcaggtaggtcagggagacagctttaatgccttatggagcgaaggcaatattgtcaccaaagtgggagacggtgtgcaggtgacggcggcgaaagggacagctaacgtgaccacgacaataggcaacggtttaaatgttaccgccgcgcatggcgacgcgaatattaacacccatgtgggtaagggtatttcggttaatgtggcgtggggtaaatataacgtcaataccaaagtgggcaatggcctgaatgtggcggtcatgaaaggccagagtaacgccaatattcaggtgggtcatggtttagcggttaatgcctcttatgcgcgcaataatgtggcgattaagataggtgagggtgatttttacagcctggcggttgccgcgagtaatacggaaagcaacaaactggccgctttcttcaacaatatcaaacaaacggtactcggtgtgatgggtagtcaggcgatcaactatctggtgcagggggaggaagttaacacgtcgggcactcatagaggcagaggggcgattcatttagcgaaagtttctgctattgatggttttgaactggatgaaattgcgccggtaaattcagatttaacccatcatctcaatggtgttgtcacagcggtggagacgcctgacgtcagttcaatagaaggtgctttgagtcaaaaaacgcaatcggtgtcagatcagagtaaaaatttgatcgtcaatggtgactttgaacaaggtgagctgggctggcagtcaactcatggtatagaggcatatggttcagcgagtgtttatggttttgatattgccagtcatggagaacgcgtcagtgaacttgatgcggagagaaacaccacgatttaccaggatctgcaaaacttgtctgaaggcgaggtgatttcactgagttttgattttgctcatcgttccaatgcctatattatcaacaatggtatggacgttttctggaatggaaaacgagtattctcaacgtctggaaatgcaatagagtggcaaagtaaaacgctggaattaattgcacgggcaggcagtaaccgcattgagtttaaaggaaccggtttgaatgatggtgtaggctatgttctggataacgttgttgcaaaatctgagaacccacgacaaaccgatgtggttaccgaacatgtgagacagggtaaagcagtacaaaatgcattaagcgataaagaaaaagcggaaagagatcgccaactgttagaacaggaacaagagaaacaactggcaggaattgcgaaatcgcaatcccagttggaattaacggatcaggcagcagttagccaaaatgggctgatacaacgcaatgcgatagaagcagaagcgcaggccgtgacggaagagctgactttactcgcggacaaatttaaagcacttaaagatgaaactgatgagagtcgtgagttagagagccattatctcgactatgcgggtggaatctctgaggacatccagaaacgattggatgatattaagccgacattagaaaaacggctggcggatatccatcgggatgctattgatatacagcaaaaagtaaaagataccgtggtgctatcagcagccggaacggaaaaaggtaaacaaaatcgtgataaggctattcttgatggtgtagaggcgcaattaaaagcagagcagagagaaaaagaagcgcttttgcaacagcagcaagcggaaaaggcgaaggataacgccaatatcgcgtatcagaatgcagaaaatcggggtcagcgagatattgcggcggcggaaaataaagcggctcagactcaggcggatgctaaaggggcgaaactgagcaatgacaagcctgttcgcagtggtgcaagtggcagcggcttgtcaggagaaaaagcctatgagtcaactggcgcgggagaaaccggcagccatatcgatccggaatcaatgccggaagcgggaaaccgatattatcaggggctgaccgaagaagagttgcgagcgttggcgagtgcgaaacaagctgttagccggttgcagatcaacgcgggaattcgcgcaaaaaataccggtgtttcgctaattcctcggtctgttgaaacacaatctgacagcattatgggatctcctttacatgagacgcgtgaactcattagaaaagtgccgataatttctggtgttaatctggaagaattgggggaaagtgaaaaaaaagagctcaacgttgtcgtactaaataagatttcaaaatag

SEQ ID NO: 7532 - DNA, 429 bp, Photorhabdus luminescens
atggattacagatatggcagccacacggtatttcagattgaataccattttgtgtgggtaacgaaatacagatacaaagtgctgacaggagaagtggcaagtcgagtgcgagaattaatccgtcagacatgcggctcctttgaaatcagaatattaaagggagttgtgagtcaagatcacgtgcatatactcgtcagcagtcccccaacattagcgccaagtgaaatcatgagaaggctgaaggggagaacggccagtaagctgtttgaagaattttcgcatttgaaaaagcggtactggggccaacatttttgggggcgaggctatttttgtgcaacggtggggcagttaacggaggaaatgatcaaaagctatttagaacatcattttgaacccaatccgaatgataatttcaggatggataattga

SEQ ID NO: 7533 - DNA, 10065 bp, Photorhabdus luminescens
gtcacagggatgaaatcaaccgtcgaaccgaatacctatctttttgcctttactgacaaaatgtacactaaaatcagcaaagttcggctgcaaaataatcccattacgggcaaactcggttattatgccacttcctggtataaagcgggcaatcaccttgaaaatcttgcggcgaaagaaatttcgtcaggcaatggatttatcgcgataaacgttgatggcgcttatcatctttccggtttaatctttgagcgtctgcaacccgtcacgatccatgctatcgaggaaaacctgttgtcagatcagtgggtaacctatgcgggtggcgtgatggttaaagcggaggatatctcgctaggcgatgccaaaatggaggggtatgtcgtcttttctgatcagggaaaagtcgatgtttccgcagtcaaatcgaaccgaaaacccaatacttatgtgtatgccaaagtcataggatcctatatcgaagtagttgaagttcagttggccaatgatcccgaaacaaagcacctcaaatacatcgcaacagcctggtctaaagcaggcgatcatacgggtgatttagccaatgaagagttttcctatgctaacgggtatacctctgtctgccccggttacacgttaagccagcttcaatatgacatcaatacagtgcgccgtaccgcccatcgattagtgcatagcaaagaatatcatcatcaagaccttgtgaaattatctgcaagcagtaatgacattaattttaacggtgcgggtggtggaaacgttattacatctgatgtcacacggggagatattaatttcacaggagcgggggcggcgaacgttattttgcatggctcaaagttcggtgatacgcattttaatggtgcgggtgctgccaacgtgattgtaaaaaaaggtaaaaagggcgatctgatattccgtggtgccggtttagccaatgtcttggttcaccaaggcaagagcggaaaaatggatgtttacgccggtggcgcggtaaatgttcttgtgcgtatcggggatgggcaatacctggctcatctgctggcttatggcaatatctcaatccacaaaggcaacggtagcagccgggtgcggatgctgggcggatataacacgcatactcagataggtaatggtgatgggaactggtccgggaagggtggttttaacgtcatcactcaagcgggaaaagggagcatctcctccgtactgttaggtggcgctaacgcactgactaagctcggggcgggcagtctggttgccggtatgcttggcggtgccaatattatcagccatctcagtgaggggactgaaacgtcaaacaccacagcaatagcgttgggcggtgccaatatcctgactaaaaaaggaaaaggccatgcgcgggcggtcatgggcggcggggcaaatgtccttacgcatatcggggacggcaataccacgggcgttatgctgggtagcgcgaatatcttgactaaagtcgggagtggcgactcgaccggcattatgttcggcataggcaacgtgttgacccatgtcggcgacggtttgacgctgggcgtgatggctgcggcaggcaatatcttcactaaagttggggaggggacatctatcgcagccttgactggtactggcaacctgtttacccatgtcggcaaaggggatgtttgggcgctaatgggcggtgcagtgaacgtctttaccaaagtgggtgacggtgatgcgctggcattgatggtcgcggcgggcaatgtgtttacgcatattggggatggcaccagcgttgcactgatgcaggcagaaggcaatatcgccacaaaagtgggtaatggtatgaccttggcggcgatgatcggtaaagccaatctctttacccatgtcggggagggcaatacctttgcggccctgattggcggggccaatgtgctgaccaaagtcggtaacgaccagacagccgctttaatgatagggaaagccaatatctattcccatgtgggtaatggccccagtatcggtttgtttgccggtgaactgaatgtcatgaccaaagtgggtgaggggacaacgctggcggccatgtttggtcgggccaatataatgactcatgtgggggagggtttaaccggcgtgttagcactgggtgaggccaatatcgttaccaaggtgggtaatgattttatgggggttgttgccacggtgaaggcgaacgttattacgcatgttggcaatgcggcaaccgccagtatcctgtttggcaaaggcaatattctgaccaaagtgggcgacggtaccacagttggcctgctgatttccaaagtgggtaacgtgatgacccatgttggtgagggcacgacagtggggtttgccaaaggaaaagccaatatcatcacgcagattggtaatggtaccggcgtaaatgcggcttggggggaagcgaatatcctgacgcaggtgggaaatggcgaccattacgcttttacgaaaggtcaagccaacttcgtaactaaagtggggatgggacgggaagtcacggtagtgcagggggatgccaacattatcacccatgtgggtaacggtgacgattataccggtgcctggggcaaagccaatgttgtcactaaagttggtgacgggcgcaatgtagtgctggcgaaaggcaaggccaacataatcactcaggtaggtcagggagatagctttaatgccttatggagcgaaggcaatattgtcaccaaagtgggagacggtgtgcaggtgacggcggcgaaagggacagctaacgtgaccacgacaataggcaacggtttaaatgttaccgccgcgcagggcgacgcgaatattaacacccatgtgggtaagggtatttcggttaatgtggcgtggggtaaatataacgtcaataccaaagtgggcaatggcctgaatgtggcggtcatgaaaggccagagtaacgccaatattcaggtgggtcagggtttagcggttaatgcttcttatgcgcgcaataatgtggcgattaagataggtgagggtgatttttacagcctggcggttgccgcgagtaatacagaaagcaacaaactggccgctttcttcaacaatatcaaacaaactgcactcggtgtgatgggcagtcaggcgatcaactatctggtgaagggggaggaaactaacacgtcgggcactcataaaggcagaggggcgattcatttagcggaagtttctgctattgagggtttccatatagatgaaattgcgccagtaagttcaaatttgagcaatcgtttgcttggttctgtcaccgcggccgaaacgcctgatctcgaaaatattcatcattcattgaatattaatgaaagcgatgattcggaacaggaaattaatctgatcatcaatggtgattttgaacaaggtgagttgggttggttggccactcatggtattgaagcatatcacccagccagtatttatgtccttgaaacagagggatatggcgagcgcgtcagtgaacttgatgtggagagaaacaccacgatttatcaggatctgcaaaacttgtctgaaggcgaggtgatttcactgagttttgattttgccaatagtctccatgctgctcttaccgacagtggcatggaggttttatggaatggaaaacttgtattctcggcttttgacggtgccgcgaaatggcaaaataaaacactggagctaacagcaaaaacaggtagtaaccgcattgagtttaaaggaaccggtgaggatgatggtacaggttatattctcgataatattgttgctaaatctaagagctcacgactcactaaggctgttatcgaacacgcgaaacagggtaaagcggcacaaaatgcattaaacgataaagaaaaagcggaaaaagatcgccagcttctagaacaagaaaaagagaagcaactggccgcgatggcgaaatcgcaatcccgattagaatcaacaaatcaggcagcacttaaccagaatgggcaagtgcagcgagcggcgataaaagaagaagctcaggcagtgacggaagagctgactttactcgcggacaaatttaaagcacttaaagacaaaactgatgggagtcgtgagttagagaaccattatctcgactatgcgagtggaatcgctgaggacatccagaaacgattggatgatattaagccgacattagaaaaacggctggtggatatccatcgggatgctattgatatacagcaaaaagtaaaagataccgtggtgctatcagcagccggaacggaaaaaggtaaacaaaatcgtgataaggctattcttgatggtgtagaggcgcaattaaaagcagagcagagaaaaaaagaagcacttttgcaacagcagcaggcggaaaaggcgaaggataacgccaatatcgcgtatcagaatgcagaaaatcggggtcagcgtgatattgcggcggcggaaagtaaagtggctcaaacccaggcggatgctaaaggagcgaagttgagtaatgccaagcctgttcgcagtggtgcaagtggcagcggcttgtcagaagaaaaagcctatgagtcaacaggggcgggagaaaccggcagtcatatcgatccggaatcaatgccggaagcgggaaaccgatattatcaggggctgaccgaagatgaatggcaggcgttggcgagtgcgaaacaagctgttagccggttgcagatcaacgcgggaattcgtgcaaaaaatgccggtgcttcggtcatttctctgtttagcggaacgtcatacactagggttgtggaacctatctcaaatcaacccagaaaattaatcgcaaaagcacctgtaatgtcgggtatcaatttgcaaggattagggcaaattacgggtggagatagccttaaatcccatttttccatcctgagagagtttgagcctttcttgctgagtcaggatgacaaacggtttattgattcaacgaaaagatattttggtcagataaataccgatcggcccagtaaggcgctagagggagtacgtgaggctttcaacaatgcggtcgaacaacctgatgaacagcatgtgttgcagcttgagcaagcgcttgctcattggcaacagcatgatcctcatgagtttgccaagcgtggtcggttagtcaaaagcctgcgttttgaaatgggggaactggttgcctaccttcaggcaaaaagagctgaatccgtcggggttctggggattagtttggcacctgaccatgttgcacagtttgaccaacaggtatcctttgatgggtttgggcgtgtggcgggcttgaaaggcgacatcgcgcaaagcgacattaatcgtcttactgatttacaaatcaagccattgactcagactaactctgtggcagagcgggaagcgcctaaaactgaaagtgacagccttatcgttttcgttagccgattgcaacaggaagcgatccccgaaggtatgccgttagttgagcgggccaaaaacctttggtttagcggacaagtcacacaacaggaaaccattaagctatttgaggatgccgctacccagttgcagacatatcctgaattacacacgttagctcaacagttactggcggatgcccgtaaagaaaaggccacgggacaatatatcgacaacctgtttggccgccattttgattctgagttggccgatgaattggtgaaaacagcgccacaggatgctatgaccacagcccggcagacaggacaatttctggtagagcaatttgaacagtgggtagagggtcgttatcctgatgtcaccgagcgtgagaagattgttgctgaaacgatggagagttttgtcaaggtcatcaatcgggactgtcgcccctggtttagtcgagtgcctgaattgatgacgtttctggacgaaccgacttttgccaatttcaagaccatgatgactcaggttgatgatggttttgctgtgattaaggtaccatttctggcagtaagaatggcgggcacaaaggaaatggggatggatagggcggcgtggaaggttgaaggtgatcgtttttattatgatgttatcagcgaagcccgttcgctcggtactaaactgactgtcggggcgaacgtcacgtacgaagttgaagtaactggaaagatgaagaccaacgattatggtacggcgctgccccaccagcctgcgaatggcaaatatgatgactttttgtatggcagaaatattgccgtggcgcggatcttaacccccggacgggaaactacatttgagcgtaatgggttagcgcacggccacgcggtgttgacaggcgcgtctggctcgaccaatgtcatggtgcacctcaataaatatatcgctcgtaaacagcctactttctcggctgagcagggctatctcaatacgctggcatttttggtatttgatggtggtcattctgtcaacgaaagtctggtggtttatcaggcactacaggcaaccactgatggacaacgtaagcagatattgaatagctacaccgtcaattatcgggacttggtggatattgtcggtgagaaaggtaaagtttgggtcagtcaggcgttggataatgcgtttaaagacacagaggcgctttatcggaaacatgtctgggtgaaaccgcaacatcgccctgcggtggaagcgctggacgggttatctggtaaggaagaggcgttaaagcctgctatcatcgacgatactcatcatcaaggtgaaaaaattagcaaaccccttgatgactggcagatggtggcggtgacgccgcaaattgatggtcgtgaaactcgttttgatggtcagatcattatccagatggaggatgaccctgtagccgccaaagcagcggctaatctggcgggtaaacacccggattccagtgtcgtggttcaacttgactctgagggcaaatatcgtgtggtttatggcgatcttgcccgattatccggtcagttgcgttggcaagttgtcggtcatggccgtgatgcgtcagagcaaaataacatgcgtctgagtggttataccgctgatgaactggcgaccagattaacgcagttttatcaggacgctaatttggctaaaagcataacgcacaaacctgatcacattagtcttgtgggctgttctttgataaatgatgacaaacgggatggctttgcccgtcactttattaccgccttaaaggcgcagggtattcacaccacggtttcagctcgtcgtagtgacgttgacgttgatgtgactggccgtaaatttacccgggatgagcgccatcaatggatccataagctggctgataacaaagtcgtcctgagttggaatgaaaaaggcgaacttgaaacccgttcagagcgcgtgcgtcatcatattgctgaaagcgatatccatctttcgcgtgtcggcatggcggatgcggagatgccggccagaggggcggttgtggataataccgatattttcacagtgccggagagacgcaaaaatagcattgagaccgattcaagtgatatctcgaataaccggctaagttactcgggtaatattcaggtgggtgtggggaatggcgaattcaccgcgctcaattggggaacctcgaatgtgggcgtcaaagtcggtatggggggctttaagtcactggctttcggggataataatgtgatggtgcacatcggcaatggcgacagtaaacaccgcgtcgatattgccggttatcaggcgcttgaaggggtgcagatgtttattggcaaccgtaacatcagtttcaatcaggggcgcagtaatgacctgattgtgatgatggataaatctctgccaacgccgccgctggttaatccgtttgatggtaccgcccgtatttccggggtcttgcaaggtattgctcattttggtgaaaagcaggagtggctggcggcgcaagatcagcaatggaccctcgccggtgcgaaaaaatttgtgctggatctgtccggtttggaccagaccagcagcgtggactataaaacgctggttgatctggattcacagcatgcccgtagtagccgtggtttgaagcaagatattgaagtgacgttgaataaaaaattcaaccagtggctcacccgcaatgtgagtgatatgggcacaatgagccgcgcgaataaattccgtcaggtcaatgagaaactggcattcaactttgcggtaggtggccggggagcggatattcaggtgaccacgggtaactggaacctgatgttcggtgataatattcagtcgattttggataccaacctgggttcgttgtttggcctgatgacgcagcaatattcggcaacgggtatggcgaagaccacgtttacctatcatccacaggatttgccgcgtcagcttaagaataagctgctgggccgattagccggtgtaaacgcggagacgaccttagcggatatttttggcgtgaattacaccccggaaggtcagatggtttcccgtacaggagacctggttaatggcgaagcgattctgcgagagatgctggccgtgattgcagaatttagtggcgatcaactgaaagcgtttacaaatccggagaagttgcttgatggtttgaaagcgggcatggcgatgggcggggatggcatcagatcgtttgctgaaagtcatggtctgcaagagagagccccggatgaaaaccgtggatcagaattgccagtcagcatcaatggaataagtgctcaggccgatgataaagcaaaacctgtatttggttttaactctctgaatctgcctaatctgtttgcaacgatgttcagtcaagataagcagacagaaatgcactccttagtcacgcatctgaaagagaatctcaccgcggatctgctcaatatggagcagaaaacatttgatttcctgcgtaacagcggtcatttgcaaggggatggcgatatccatatctcgctggggaactataacttcaactggggcggtgacggtaaagatctcggcgcttatctgggtgataacaacaacttctggggtggtcgcggagaggatgtttattacgccatcggtacttccaacctctttaccgggggtgaaggcaatgatctgggcgtcctgatggggcgtgaaaacgggatgtttggcggtcatggcgatgataccgcggtaatagccgggcggattaactatgcgttcatgggtgaagggaatgaccagacatttgtttttggtgaaggcgggctgattgatgccggtaacggggacgactacgttgttacctccggcaactacaaccgggtggagaccggggaaggtcaggattatgccgtgaccatcgggaataacaaccgggttgagctgggtgaaggccatgactttggtcgggtgtttggtaatgacaaccagattgacggtaacgcgggtgacgatgttattaaactgatgggctatcatgcggtaattaatggcggagaaggtgatgaccacctgatagcggccacaatgtcgaaattcagccagtttgacggcggtgaaggtcaggatctgctggtgctggggggataccagaacgacttccgggggggcgcaggagtagacagctttgtggtcagtggtcaggtcattgacagtcaggttgatgatatcaatgcggaagatatgattgtttttaacgatattgactggcaaaacctgtggttccagcgcagtggatatgatctggtgttatcagtaaaccgtcatattgaggataaaactgcgcagggcgtctttgaatcaacagggtcagtcacctttagtgattactttaatggtaaccgagccaaactggtggtgcagatgggggataagaatgcctcgggggagcgggagtttactgcgctgtcggataatgcggttgataccctaatccaggcaatgagcagttttgcgcccaccgtgggagataatggctttattgacaatctggcgagtcaggagaaaatcgtcatggcaacggcgtgggcagataccactgtgggtaaggtgcagtttgcataa

SEQ ID NO: 7534 - DNA, 990 bp, Photorhabdus luminescens
atgtcccgccgtaaccgaatagcggctggcgtagccagagggcggggagataccctcttgtatgatttaaagggatttttgatgggaaaagcatctaatagaagtgcagtgtacctctttacaggaagatattacgacgataatggcggtaatcgtattactgctgttggggctggtggtgaagtttatgcttatggcggaaatgatgatgttaccgttggttcatttaaagtcgatgtataccatacagatggcgaccttacggtaaagggagtgtcaggttataccggtattcataaaacgggaaatggcgggctgtcatttacgggggctgccggtgtagctgctattgatcacacgggtgaaacgggaaatttaaattattcgggtgcggccggttataataaactggtccgtaaagggttgtctggtgatactcgttttagaggggccggtggatacaatcagttatggcatgaaactaaccggggaaatttagattttgctggtgcaggggcaggcaatgacattaaccgtacctggtttaaccgttatcaagattcacagggaaatgtgatatttaatggtgccggtgttgcaaacagtatcaattcgcgggtagaacgcggtaatgttacattcaacggggccggtgctgataatcacatcgtacgtaaaggtaaagagggtaatattatcttacgtggtgcgggggcatcgaatcgaattgagcgtgtataccaaaataaagacgagtatgaacagacccgtggtgatattacttttgaaggtgttggcggttataaccagctctattctgatgtcgcgcatggcaatattaatttctccggtgcgggggcttacaatgtaatcaccagaatagacgcgaatagcgatttcgatggtgagacactggaatttgctaaagctgaagagatcgtattaacgacggcaacgatgggaggacgcgggatcgaagagtcccagtaa

SEQ ID NO: 7535 - DNA, 462 bp, Photorhabdus luminescens
atggcgattatacatcaaccagcgaaactgaataccgcagaaattcaggcaatgattggaggagtgatgctgctgagccagtattctcctctgcatcgaagatacctggtgtccgagtggcaacagcgtatcttgcctgcatttgaactgaatcagttttgctactatgcagatggacaagggcacccaatcgccttttgtaattgggcttttttatctgagcagaatcgagatgagcttctttcgggagaaagagagcttatccacacagactggcgctcaggtccacatatcttttttcctgaaatgattgcgccttttggtcacgggcgtgaagttgccagggatttgcgccgccgtgtctttttgccgtggaaaggccagaaagcttgtactgtccgcgggaagctggatgttcaaaataaccgctgtattcgtcaggtacagtggttttttgtttga

SEQ ID NO: 7536 - DNA, 366 bp, Photorhabdus luminescens
ttggtaaataaaaatatgtctgaaaaattcgtacaaaccatctctagtgttaattataataaaggtgttttttctctttatttcgttggtcaagaacctaatcgtatggcgaatgggataatggcagaaaatgataatgaacttgaattaaagcaagttatccatatgccagcatcaggatttatgtatatggtttctatggttaaaaatatgttggaagatccacgaatggcggctgaatttgataaattagttgcagcagggtttttacccgcgccacaagtggctgaagagcaaattgcatcggaatctatagtggaagagccggctaacgctaaaaaacgcctatctaaaaatacaaaataa

SEQ ID NO: 7537 - DNA, 2106 bp, Photorhabdus luminescens
atgaatgaaattgagaaattgactatagcatcattaagattaatattgatgatatataatagaaaagaaaacatcactgacattgataacttaaaaaaatctaattgttactattcatatataagtaatatagaggaaaaatttaatttatcgatttcaagtaaaaattccgtaagcaaaaagcaccataatatacttttacccgcaatcttgtttgataataatggcctaccttttgttttagccaaatcgaataaagagagctcactaatacagagggttgataaagaaaatcctgaaatatggtccgaagaaaggctgataaaagagtggaatggaaaatggattaaaataaaacagaaacaagctaaatttaacatccgttggtttattccagaatttctggcacaaaagaaaaatctatgtgagatactgttattttcctttgtgttacagattcttgcgctaatttctcccttagttattcaagtggtaatggataaggtcttaatccaccaagcgctatcaacacttgatgtattagtctttggcttaatcatcgccggcatcatcgaggtgattttacgtggattacgagaataccaatacgctcacaccgcaaaccgcattgatattaaactgggattaaaactagtccggcatctgttcgggctacctttactcttttttaaatcccgccaagtgggagcgattgttactcgggtgcgtgaactggacaccgttagagaattcctgaccggctcaatgttcaccttatctgtcgatgttctatttatgtttattttcatctacgtgatgagcctgttatccggcctactaacttgggtttttctcgcaaccttccctttttatgccattttggcgtggtgggtgacgcctcgtatggaaaaagcggttgaacaacaattcacccatgcagcaataaatacctcttttctgactgaaacggtctctggtgctgaaaccctgaaaagtctggcggtagagcccaaattcgttcgccgttgggatagccagactgagaagatggtagatactagttttgcagtacagcaactgggtaatcgctcaaaccatattgttatgctactgcaaaaagttaccggtgcggcaattctctggttaggcgcatcagaggttttatcactgcaaatgaccctcggtcagttgatcgccttcaatatgatggtcaaccacacttcccagccattagccaggttggtagaactgtggggacaattcatcagaacacgggtagccgtagataaattaggagatatgttaaacctgccaaccgagcaacaatccggccagcagcaggtagcactgcatggtgcagtttcgtttaacaatattgtctttcgctatcaacctgatattccgccaactatcaaaggactgacccttgatatcagagccggagaagccattggtatcgtaggtacttccggttctgggaaaagcacgctggcacgtttattactccgcctttattccccggaaaccggcgcaatcaccatagatggcattccattgcaaaacatagggatcgaaacactcagacaacaagttggtgtggttctgcaagaaaatttcttatttaataaaacagtatatgaaaatatcgctcagtcgaaacccgatgccagcctagaatcggtgattaaagtcgccaaactggcaggcgctcatgaatttattctcaggctgccgatgggatatgacacaaccattgcagaaggcgggcaatctttatctggtggtcagcgtcagcgactggctattgcccggactctcctcgctgaccccaaaatcctcattcttgatgaagcaaccagtgcgcttgatgacgagtcacaatcacgcattcaatcaaatatggcagaaattgcccaaggcagaacggttatcaccatcgcacaccgcctttcaactgtacgtcattgtgatcgcatcattgttcttaaacagggggaaattctcgaacaaggctctcatgaacagctacttaaccacggtagacagtaccggaagctctggcagttacaacaagaattaaaacaggagatgccttgtcatgattaa

SEQ ID NO: 7538 - DNA, 1356 bp, Photorhabdus luminescens
atgattaaagcgtttaagaataaaattaaaacctggttgcgcccttgtccgcagcactatgactttttaccgacacatttagcattgtcacaacgaccaccgtcaccttttgcccgctacactgcaatcacgctcagtatcggcattatcatggccttgctctgggcctatctgggtaagttggatgttcaggcaaccgcaaccggtcgcctgattgtctctggccgttctcagataattcaggcatacgaacagagccgggtgaccgctatccatgttcagaatgggcagcgggtagagaaagacgccccactgctgacactcaacacactcggtgttaaccaagatatcacccggttattaaagcagatcgaatatcaagcccacgaaaaaattcgttatcaagctttgacagaagagcaggaaccgacaaaacaggagctgtttcaggctttgccggtatctcaacaaacacaagttgctgacaactattcccgggagaaaagagaatacgaagcggttgtaacaaatctgaaagcagagatgaacgtcaatctctcttctcaacaatcacgaaaaagcgatatcaatgcgctcactaagctccgacaaaatatcagccagcgtttaaaagcacgtcaaaccttaagtcaaaaacaagtgatcagtaaagttgaatatcttgaacaggaaaaagagtttctggaaacagaacgcctgattgcccaacaaaatgcggagtttcatgttctgcaatcgcaatatattagcctggaagagcgcttaaacagcctgaaaacacaaaaagagcgcgaatggtttgataaaagaaaacaggccgaagttcaattggtcgttttagagcaagagctggcaaaagctcaggtacgggaacaacttgaagtcattcgctcccccgtcacaggaacagttcaacaactcagcgtccatacattaggcgcggtactgcaaccagcacaaaacttgatggtgatcgtccctgatgacaatgtgcagttggcggaagtgcaaattttaaacaaagacgccgggtttgtttattcggggcaacaagtcaccattaaggtcgatgctttcccttatacacgttatggcacgattgacggcgaactgttgagtatatccagagattcaaccaccgatgaacagctaggattggtctttcctgctcaagtgagccttaaacgtaatagcattgccatagacgatacccaggttgaaattaccccaggaatgtcaatcgtcgctgaaatcaaaaccgaccaacgccgcgttatcgattatctcttgagccctatcagagagtatcaatctgaagcattgagggagaaataa

SEQ ID NO: 7539 - DNA, 2151 bp, Photorhabdus luminescens
gtgaacctattaccttcttctgctactgactccagtaactacactcataatcaggcgctgaattgcatcgtctatgtggggaaacaatttcataagtcagctactgtcgatcaacttcaacacagcctgggttttgactccttatatctgagtgaactacagctgcgtgaagccgccaacgctattgggctacacagtaaaattgagcgattaactgtcaacacagggccaacattacccttaccggcattgattgagctggaacaacggtggtgggtactcattgaagtcgagaatgacaatattaccattctcgatcctgtgactgaacaaactcaatcgctttccctatctacatctacgggtaataaagagaatgtatataagattcttttaatcgcagatcaggaattaactaagaagcatgtcaaattcggcttgagctggttttatccctccattttccgccagaaaagtcagataagagatctgtttttgtttgccatggttctccagttatttgcactggccagtccgatcttgtttgaaaacatcatcgataaggtattagtaggacgaagtttatctagcctgcatgtattaggtatggctatgctcgctatcgcccttgccgaacccttgtatagctttatgcgcaacaccgtgtttgggcacatggcaagccagataaattccgagctctccgggcgactgtatcgtcatctggcaggattgccgctgcaatattttaagcaacggcaaacagggcagatcattgccagagtcagagagatgtctcaaatccgccagtttctgacaggttctaccctgatgctgttgctggatttaattttcgtcatcatgtttattggcatcatgttttattatgcctggatactaacctggattgttattggctcactttttgtttacttcatattctgggtagtcgccgggccggttattcgccgcaaagtagaagcagaatatgaaaccgatgcaaatgcaacaagctttctgactgaagccgtcactgggattgaaaccatcaaaaccaccgctactgaaaaccgtttcttacatcagtggcagcgtattctcagccaacagttgactaaaagcttcgcggcacagaaaagcggtttaatcgcaggacagggaatcgattttgtccagaaatttacctccgcgatcctcctatggtggggggtgaccgaagtcttacgcggtgaactgactccggggcaacttatcgccttcaatatgctggccggacacgtcacgcaacctatcctccggctggcacaggtttggcaggattttcagcatacgttaatcgcgttgaaacgtgtgggggatattcttgatgagccaatggaaaacagtaaacagggattggcttctgtacctgagctggaaggccaaattgaattcaaaaatattcgcttccgctaccatgacgatacaccggaagttctggcgaacctgtcgttattgataaaatcgggtcaatttattggtataactggaccgtccggttcaggtaaaagtactctcacccgtttgctacaaaggttatacgtacctcaacatggacaagttttgattgatggcatggatttagctattgctgatcccgtctctttacgccgcaatatgagtgttgtgctccaggaaagtatcctgttttctggcagcatcaccgataacattcggctgtgtaagcccaacgcaacagatgcagaagtctatcgtgccgctgagttagccggggccattgaatttattcaatcccttcctcacggttttgcgcatccagttggggagaaaggagtcaatctttcaggtggtcaaagacagagaatcgcattagcaagagcgctcttggtcaacccaaccatcctgatccttgatgaagctacctcagcattggactatgaatctgaagcggcaatcatggcaaatatggacgaaatatgccgtaaccgaacagtgatcagtattgctcacaggctcaatacaattcgccacgcggataaaatctgtgtgttagatcaggggcaaattatcgaatttggctcacatgaccaattgctccagcaaggcggcttatacgcgcatctgtggcatcaacaaattggcgaaaactaa

SEQ ID NO: 7540 - DNA, 807 bp, Photorhabdus luminescens
atgggtggtgttcggctaaaacccaataaactcataggagaaataaaacaaacagatattgtcctggtgggttcaattggggccccttattgcgatttcgatctttgtactcaagaaaccttagattggctccagatgatggaagaaaaaaatgttcttatcgtctccgtttgtacaggctcttttgtactggctaaagctaatttactcaataaccgcaaagccaccacacactggctatttaccaaattatttaaggacatgtttccgcaagtacagttacattcagaaataaaagtcaccagcgataacaatattttttgtacttctggtacctatgaatacaacgatgtcatgatgcatattattgaacagatatatggtcaaaataccagggaaacctgtagtcagctcatatttggtaatatggaaggcctcccctctcatactctcgcaagttttgtaccctatcgccaacattcagatacattaatccacaaactacaagactggatgcattctgccccatcagacagattatcggttggcaatttggccgataaaattcatctgtgtgaaaggcaaatgaagcggcgctttaagactgcaaccggccagacaccgattcaatatatccaacagattcgactatctctggcgaaatgccggttagaaaaatcgaataagaccatagaagaaatcagccatgaagttggttatgaagatactcgctatttcagagagttattcaagaaacttaatgggttaacaccaatagagtaccgtagaaaataccaacaccgctaa

SEQ ID NO: 7541 - DNA, 288 bp, Photorhabdus luminescens
atggcaaaagaacaaatggatcgcaccactctggatttgttcgcaaatgaacgcagaccggggcgcccaaaaaccaacccactttccagggatgaacaactcagagtcaacaagcgtaaccaacttcgccgtgataaggtgcgtggtctgcgtcgtgtggagctgaaaataaatgctgatgcagtagacgcacttaactttcttgcacagcaacgcaacatcagccgcagtgaactcattgagcaaattttgctggcccagttagcagaaagtaacaccacgacttga

SEQ ID NO: 7542 - DNA, 531 bp, Photorhabdus luminescens
atggcaattataggtatattttttggcagcgataccggcaacacggaaaatattgccaaaaagatccaaaaaattctgggttccgacattgcagaagttcatgatattgccaagagcagcaaagaagatatcgaacagttcgatattctattgctcggcatccccacctggtactacggtgaagcacagtgtgactgggatgatttcttccctactctggaagagatcgattttgaagggaagttggtcgctctttttggttgtggtgatcaggaagattacgcggaatatttctgcgatgctatgggaaccatccgtgacattattgaaccccgcggtgccattattgttggtcattggccaaccgagggctatcacttcgaagaatcaaaaggtctggctgatgatagccactttattgggcttgctattgatgaagaccgccaaccagaattaacagaagagcgtgttaatgcctggactaaacagatctacgaagagctgagtttgtcagaaattcttgcaggatag

SEQ ID NO: 7543 - DNA, 447 bp, Photorhabdus luminescens
atgaccgacaacaataaggcattaaaagatgctggacttaaagttacacttcctcgtctgaaaatattggaagtgttacaggagcctgaataccaccatgtcagtgcggaagatctctacaagaaactgattgataacggtgaagagattggacttgctactgtctaccgcgtgttgaatcagtttgatgatgccggtattgtcacccgtcataactttgagggtggcaaatcggtttttgaactcactcaacaacaccaccacgaccatttaatctgcctggactgtggtagagtcattgaattcagtgacaaatatatcgaaagacgccagaagaacattgctgagcgttatgggattaaactttcaaaccacagtctttatttatatggtcactgctctgccggtaattgccgcgaagatagtagtgcacatgacgagaagtaa

SEQ ID NO: 7544 - DNA, 282 bp, Photorhabdus luminescens
atgcggacgattgactacgcaagccaattcaagcgagattacaagagagaaaagaaaggtcggcatcgtgaagttcttgatgacgtactgatgctgatgattgaattattagcttctgatagtttgctagagccgaaatattgcgatcatgctctttctggtgattggaaggattttcgagattgtcatatcaagcctgacttgatactgatttatcagaaacccgatgcggacacattgtgccttgtccgtcttggctctcactcagagcttggcttatag

SEQ ID NO: 7545 - DNA, 264 bp, Photorhabdus luminescens
atggctacaaaccaattagtacaaacccgtattgatggagagattaagacagaggcagctgctgttctggctgctatgggtttgactgtatcagatgctgttcgcatgatgttaacgcgggtagcaagagaaaaagtgttaccttttgaaccgttagtaccaaatgagacaacaatagctgcaatgaaagaagctcgcaaaggttgcggtaaatcattctccactgtaaaagatttaatggctgatcttaatgcggacgattga

SEQ ID NO: 7546 - DNA, 2676 bp, Photorhabdus luminescens
atgaagaaatttaaattgcatacattagcagcactgactgcaactgttggacttatgggttctgcatatgcttcccaaacagcgcagcaagtggttgatgcactgagtcaattaaaagttaattataaagttgttgataatcaggcaggagatcacggcgttaactgtgcggtactgggggcagattgggctaaatgtaatcgagtggatattactttaaccaatggtaatcaggcgattgactctattgactgggcgatttatttccacagtattcgtcaggtcctgagcgtggataatgaacagtttaaaatcacgcgtattacgggcgatttacatagactggagccaaccgaaaaattcaccggtattaaagctaatgagcaggtaaaactgccgtttattggagaatactggcagatttacagcactgattttctacctcgctggtatgcaacgtcgggtgatgcgaagcctaaagtgcttgttagtacggatacagaagatctaagtcaattcttatctgctttcaccgatgatcagtggaaacgcacacagacagataacaatattttgatgacgcctgaaaatcgttatatgaagaatttgcaggtcaaaaaggttggatcagagaagttgcgtgggcaaattatcccgacaccaaaagaggttcagatttttcccgaggatgctgatttatctggcggggtgagactggaattgggtggtttaaatgacgaggcagttattcttgtcagaaaacgttttactgatcaaggcattaaattagaggatagtggttattcagttgcgacccagattatctcttcagagtttcctggcgattggcaggttaaaggggcttaccgtctgaatgtgacccagaatggggcacaaattgttgcttttgaccaatctggggtgttttacggtcttcaatctctgttgtcattaattcctgttgatggcgataggaagattgctactttgacggcaaaagatgcgccccgctttgaatatcgtggtgcactccttgatgtagggcgtaatttccacagtaaacaggctgttctgcgtttgcttgaccaaatggcaagttacaaactgaataaactccatattcatctgtctgatgatgaaggttggcgtttggaaattcctggattacctgagttgacggaagttggcagccagcggtgtcatgatttaagtgaaactcaatgtttattaccacaattgggttcaggccccgataacaacaacatggggagcggatatttcagccgtcaagattacattgatattctgaaatatgctaaagctcgttatatcgacgttattcctgaaattgatatgccagcccatgctcgtgccgcggttgtttctatggaagcccgctataaaaaattaattgctcaggggaatgtgaaaggggcgagtgaatatcgtttgctcgatccaacggataccaccagagcaacatcggttcagctctatgatcgccgcagttatttgaacccgtgtatggattcttcaaaacggtttgttgagaaagtcataggtgaaattgctgctatgcataaagtagcaggttcaccattggagacttggcattttgggggagatgaagcgaagaatatccgtttgggagacggattccaggataaaaatggtcctatcgtaccgggtaagggcatcattgataaaagtgcggaagataaaccgtgggctaagtctcagatttgtcagaagttgatagaacagggtgttgtgaaagacattgatcatcttgccagcgacttcgcaattgaagtgagcaaaattgtgaatgctaatggtatcgagaggatgcaggcatggcaggatggtttaaaacatgctagcagtgctaaagattttgccaccaaacgcgttggggtgaatttttgggacactctctacgatggcggctttgattcagtcaatgattgggcgaataagggctatgacgtggtgatatctagcccagattatatttatctggatatgccatatgaagttcatccacaagaacgtggctattattgggcggctcgttttaacgatgaagctaagatctttagttttgcgcccaataacataccgcaaaatgctgaaacttccgttgaccgtgatggtaatgcattcagtgcgaaaagtgataaaccgtggccgggtgcctatgggctttcaggtcaaggatggagtgaaacggttcggactgatgagcagatggaatatatgatttatccgcgcttgttgccgctagcggaacgggcatggcaccgggccggttgggagttggattatattccgggccaggtatataagcgtggagaaacgtataaagtcgatatagatgcgcttaatcgtgactggacccggttcgctaacctgatagggcaacgtgagcttagtaaactggataaagcgggcattgcttaccgtctaccggttccgggggctaaggtaaaacggggtattttgcgggctaatgttgctctgcctggattggtaatccagtattcgacggatggcggtcataactgggaagtttataacaaccataaacgcccaagagtgagaggtgatgtgttgatccgttctgtcagcccggacggtaaacgttacagtcgaattgataatgtaaaggcatga

SEQ ID NO: 7547 - DNA, 450 bp, Photorhabdus luminescens
gtgaaaaaaacgtttttctcatctggagactttggtaaagttcccggagaattaattgaagataagcctactcaattgattcatgaaaatgtattgaactctgaagtgagtcaagatttgaatttctcaaatgaaaggcgccataaagtggctatggttaatttacctagtaaagttctcagtatgactctgggagggttacaacctggacaatcgacccgtaaacacagacacagttatgaaactataatatatatcgttaatggggaggggtattcactcattggtgaacaacatatttcatggaaagccggtgatgcgatatatgttcctgtatgggcatggcatcaacatgtcaatagtagtgctattaatgaagtattctatattgcatgtgagaatgccccaatgttgcaaaacttaggtcttgctgttcgtgaagagctttga

SEQ ID NO: 7548 - DNA, 1668 bp, Photorhabdus luminescens
ttgacttcggaaaatatttctgtatcacctgttgccatcgttggtggtggacccgttggtctaatgttggctttatttttggatttatatggtgttcgttccgttatctttaatttggaagaagagacccgatggcagcctaaaggcagtacccatagtgcccgtattatggagcattttcgtcgtgtaggcatatctcagcctattcggtcattaggcgtgccaaaagagttccctttggacgtatcatattttaccaagtttaatggatgggagcttgcacggattacgttaccgtcggaaatggagaaaatgtctatgcgcgaaaatgcggcttcgacagatcccgttccagaacccataatacgtgcaaatcaaatgtatgttgaaaggtttctactacaacatgcaaagagtcgtccaaatattacaataagatatggctggcgcgttaaagattttgtccagtataaagatgaagtaaaactttatgcggagcatattgatggaaagtatgcagatgaagtttggcaagctgcatatatggttgggtgtgatggcggacagagctttgttcgatctaagcttggtatagtttacgaaggaaccgttgaagctaaggcaggttttctaacgggtggaatggtttccagttatatccgtgttcctggaattcaccagggattattacgagacaaaaaatcctggatatacaatattatttcacctagggaaaatatgttatttatctgcctggacggtaaagatgattttttatttgtgactcagagtaaggatgggaaagttatcgatgatttggaagtcgttcgcatagcgcaggcaggaataggttcagatgctgaggtattagtccttggcaatacgatatggaaaggcggtgttgctctcgttgctgataaatattctgagggtagggtatatttagcaggagattctattcacttatttgctcccaccggtggttttggtatgcatacagggatcgacgatgctagcaatttagcttggaaaattgttgcgtctataaatggctgggcaggtaatgcgttaatggattcttatgaaagcgagcgtcgtccaattgcatggagaaatactgccgctgcacgttcttatacacggcagacagcatcactatatgtgcctgcaaatttagaggatgcggattatgcgggtgatctggcgcgtgaaaagattaatattgagttaagtcattttctctgtcaatttacttctatcggtgtggaacttggtgcccgatatgatagttcttctcatattattaatagcgatcccgtaccggatgatgattggcttaattataaaccaagtagtgtacccggagggagattgccgcacttatggctcacacctatttctggcactaaagtatctctgttcgatattttaggctccgggtttagtttgcttcgggtaggatctcattttcccgatatatctgaattattagctcaggcatatcaacgtaaaattccggtcaagattattgatcttcccggtcatgatgcttggcaattatatcaaaccaggctccttttagtgcgtcctgaccaatatattgcttggagaggtgatagggttcctgacaacataagttcaattttggataaaattgtcggtaggtaa

SEQ ID NO: 7549 - DNA, 357 bp, Photorhabdus luminescens
gtgaatggaggtttttatgaaaatacggttattgcaattataaaaagattgattcttgctgaatctcccgatgtctctgagtttgaacgcatggagtggttctttaacattcacaaagatgtgttcccaccaactcactttcagttcaccggtatttttactaagaatttaggatacctcttttttagaattaagctacgacgtaagagttatacccaatggatttcaagatgcatcgcggcggcaagggagcgaatccccgggagcatagataactatgtgaccggggtgagggagtgcagccaacaaagaagcaacttgaaagataacgggtatattattgttatgacagtatga

SEQ ID NO: 7550 - DNA, 765 bp, Photorhabdus luminescens
atggaactcactatcaatactcaaaacgagcttaaagaagaggccggttattttttatctccattatggcaagatgttttctctaaagtgttattggaggagcttaattcgaatatatttttggtcgcttgccgttctggagaggcggaccagaatttattaagaaagtttatgatccagcaccattactattcacaatatttcacccgttatctgtgttcattgatgggaggtttagcagatcaaaaagattttatgctgctttctcataatctgttggaagagctaacaggaaccgatgcagcaaagatatctcatgcaaagttatataaaaaagcgatgacggctattaacgctgttcctaaaagtgacccgattcttaacagtactcaacaactgattgatgccatgtttcgccactgccgcagtgatgattctctaagagggcttgcggcactgtgtttaggtgctgaggcgatcgtacctttagtttatggcccaattttagatgccttgcaattaataaaggcacctgatgatgcattacatttctttagaatccatgttgaagaggatgaagatcatgcaattgcgatgagaaaaattattgatcgaatgattgaagagaaaccttaccgaaggggggatgttattgcggttggtgaagaaatggtgcgttttcgcattgggatgcttaatgaactgtatcaaagcaatatcaggacaaatacagatgtaacgatgcttttatccgagtgtgattga

SEQ ID NO: 7551 - DNA, 894 bp, Photorhabdus luminescens
atgaataatttgagtggattcatgatcttcatccatgtcgccgaagctcgtagttttgcaaccgcagcccggcaactcggactctctccttcgtccgttagcaaaagcatatcccgattagaggacaaattaggtgtccgcctgctccaacgtagcacccgtagtgtcagtttgacggcggaaggcacactgttccttgagcgctgtaaacgcatcctggacgagatttccactgcggaacatgaactattaagctctatctctgcccctcaaggccgcctgcgagtaagtttgccattgctcagtaacctgatgttacccgtattatctgcttttgtgacttgttacccacagatagagctggaactggattttagtgatcgattagttgatgttatcgatgaaggcttcgacgccgtggttcgcaccggggaactcaacgattcacgactcatgaataaacgtatagggtctagccgttttatctatgttggcgctccaagttactttgcacaacacggtaaaccatcacaccccagagagttactacaccacgcctgcttgatgcatcgttttcccactaccggccttttagagaaatggccgctatgcttaggaagatccgaaatagacatacatcttcaagcaaagataaccagcaatcatgtcgaaacactgctacacatggcgattcaaggccacggcatagcctgtttgcctgattttaccgttaaacaagcattagctagcggtacattgttaacaatcttggataagtgggcgggtacttcaagcaccttccgtgttctctggccatctaaccgttgggtactacctaaagtcagagcttttgtcgattttatggcagataatttattcccaaaagagaaatga

SEQ ID NO: 7552 - DNA, 1668 bp, Photorhabdus luminescens
atgagtgaggcagacgcccgcccgacaaactttattcgtcagataattgacgaagatttggcaactggtaaacatacatcggtacatactcgtttcccgcctgaacccaatggttatctgcatattggtcatgcaaaatctatctgtttgaacttcggtgttgcaaaggactatcaggggcagtgtaatctgcgctttgatgataccaatccagttaaggaagatgttgaatacgtcgattctattaaaaatgatgttcagtggttaggttttgagtggagcggtgatattcgctactcttctaattatttcgatacgctgtatcagtatgctattgaattgatcaacaaaggtctggcttatgttgatcaattgagtccagaagagatccgtgaatatcgtggtacgttaaaagagccgggcaaaaatagcccatatcgtgaccgcactattgaagaaaacttggtgttgttcgaaaaaatgcgtgccggtgaatttgacgaaggtaaagcttgtctgcgcgctaaaattgatatggcatccccttttattgtgatgcgtgatccggttttgtaccggattaaatttgcagagcatcatcagtgtggtaacaaatggtgcatctacccaatgtacgattttactcactgtatttctgatgcgcttgaaggtattacacattcgctgtgtacgctggagttccaggataaccgccgcctgtacgactgggtgctggaaaatatcaccattgattgtcgtccacgccaatatgaattctcgcgtttgaaccttgaatatacggttatgtctaagcgtaagctgaatctgctggtggcagataagattgttgaaggttgggatgacccacgtatgccaacgatctcaggcttgcgtcgtcgtggttatactgccgcgtctattcgtgaattctgtcgtcgtattggtgtcaccaagcaggataataatgtggaaatggcagcattggaatcttgtatccgtgatgatctgaacgaaaatgcgcctcgcgcaatggctgttcttgatccggtcagattagtgatcgaaaacatgccagaaggggagcagattttgagtatgcctaatcatccgaacaaaccggagatgggcagccgtgaagtgccatttagtcgtgagatctatattgaccgagcagatttccgtgaagaggcgaatcgtcaatataagcgtctggtattgggtaaagaagttcgtctgcgtaacgcttatatcattaaagcggagcgcgttgagaaagatgctgacgataatatcacgacaatctattgcagctacgatgatcaaacgttgaataaagatccagcggatggtcggaaagtgaaaggtgttattcattgggttagtgcggttcatgcggttgctgctgaattccgtctgtatgatcgtctgttctgcgtgccgaacccaggtgcggaggatgattttctggcgacaatcaacccagaatcactggtgatccgtcagggctttgttgagccaagtttagctgatgctaaatcagaacaaacttatcagtttgagcgtgaaggttatttctgtgctgatagttgtcattccagtgcagaaaatctggtatttaaccgtaccgctggcctgcgtgatacttgggcaaaaatttctcaggattaa

SEQ ID NO: 7553 - DNA, 1515 bp, Photorhabdus luminescens
atgggtatattcaattacttgcagcgattgggaaaagcattaatgcttcccattgccacgcttcccgtagcagcacttttgctacgtttcggccaacccgacgtatttaatattcctttcatcgccagcgctggcggtggtatttttgaaaacctcccgctactatttgcattaggtatcgcaataggcttagcaaaagataatgctggcgctgccgcactggcaggtgtcgtcggttttttagtactcactaaagccacgtcagtcatagactcgactatcaatatgtcttttttcgcaggtattatcgcaggtattgttgccggtcattgttataaccgtttttcaaatacacgtctgccagagtttctcgctttcttcgccggtaagcgattagtccctatcatgaccggcattatttgtctgttcattgcatggatatgtggctatgtatggccatatgtccagcacggtattgatactttcagccttttagtatcaaagagcggcatggccggatggtttacttatggtgtgcttaaccgctctctcattccatttggtttacactatatcctgcattctgttttctggtttagtctgggtgactgtctgaaaattacttatgacttagccagttctgtacataatatctgcctggcaccggatattgtccgttctctgaccatcggcgcagcggttccaggtattgatggctctactattacccaaatagccaccgatatgagccgcggcgacttgaaccgtttcttcgccggtgatccacatgccggaatctatatggcctgggcttatcctatctttatgggcggtttgcccggcgctgcattggcaatgtatcttgcagcaccaaaggaacgtcgtcctcagattggcgggatgctattatccgtcgctttaaccgcatttttaaccggtataactgaaccaatagaattctcattcctattcctggctccagctttatatgttctgcatgccatattggctggtgttagcatggttatcgtcaattcattgggtattctgcatggctttggattctctgccggattaattgaccttgtattgagctggggtctggcaaccaagccgtggttgttaatcccattaatcgccttattctttgtactgtattttgtttgcttcaccctcatgattcgtatttttaacttacgtacaccaggccgcgaaattggagaaacaactcaagcgacttccgcctcccaagacaacgaaacaattcaacattacattaccgctcttggtggtgcacaaaatattcatgccgtagatgcctgcattacccgtctccgtttaaccgttgaagacaacacacaattggatgaacaccggttaaaacaattaggtgcaaaaggcatcctgaaaataggtaagcagagtgttcaagtggtattgggaccccaagcagaaagtattgccgggcagatacgtactcagctatcctcagatagaccagacaaaagatcgtag

SEQ ID NO: 7554 - DNA, 813 bp, Photorhabdus luminescens
atgaggctgatccccctagcgaatgcaagtgacgttggtaaatggtccgcacactatatcgttagcaaaatcaatgcatttaaccccaccgccgagcacccttttattttggggttgccaaccggcagtacaccactggcaacttataaggaattaattgctctgcataaagcagggaaagtcagttttaaatatgtcgtgacattcaatatggacgaatatgtcggtatcaccgaaaatcatccacaaagctatcaccattttatgcaccagaatttccttgatcacattgatattccaaaggaaaatatcaatctgctcaatggtaatgcttctgatgtcgaaacagaatgtcaacgttatgaagacaaaattaaatcttacggtcagattcatctatttatggggggcgtcggtaatgacggtcatattgctttcaatgaacccgcatcatccctgacttcccgtacacgcattaaaacacttaccgtagaaacccgcacggctaactcccgcttcttcgataatgatattaatcaggtgcctaaatacgccctgaccgtaggtgtaggcacgttaatggatgcagaagaaattatgatcctcgcaacgggtctaaataaggcccaagccattcaggcagcaattgaaggcaatgttaaccatatgtggacaataagctgtctgcaaatgcatcctaaatccatcattgtctgtgacgaaccagcaacaatggaattgaaggtaaaaacagtcaaatacttccatcaactggaagcagatattatcggcgaattcgctagcaaaaaataa

SEQ ID NO: 7555 - DNA, 1161 bp, Photorhabdus luminescens
atgtatgctttaaccaactgcattatatataccggtcacaatagactagatgagcatgccgttatcattgcagacggcttaattaaacgaatttgcctaacacaagagttacccgaacatattgaaaaacgtgatctaaatggtgcaattctttgccccggctttattgatctgcaagtgaatggttgtggtggtgttcagttcaacgatcagttggaaaacatttcagaaaaaacgctggatatcatgcaaagaaccaatgaacgctctggctgcaccagctatttgccgactctgattaccagcacagacgaattgatgatggcctctgttgaggtaatgcgcacttatcttaaacataatcagcatcaggctttaggcttgcatctggaaggaccttatctcaacccagcaaagagaggcactcataatcccgagcttatccgtaagcccacatctgaaatgataaatttcctgtgcaataacgctgatgtcatcactaagttgaccctcgcaccggaaatggttgagcaaaagtatattcagcagttggtagaagccggtattattgtttctgccggtcattcaaatgccagttatgaagaggcccgacaaggattccaaaacggaattactatctcaacccacctttataatgccatgccagctatttcgggacgccaacccggcttgattggcgctatctttgatacacctgaaatctatgctggcatcatcgctgatggtttacacgtttcatggccaaatattcgtaatactaagcgtttgaaaaatgataaattaattctggtaacggatgcgaccatcccagcaggacttgatcccgccatcagtaaaatggcacatttcacctttgcgggtaagaccatatactatcgcaacggattatgtgttgatcaaaacggcgttttaagtggctcctctctcactatgatagatgccgttaaaaatagcgttgaacatgttggtattgcattggatgaagcactgaggatggcaactctttaccctgcccgcgcaattggtgttgataaatatcttggcactgttgaaaccgggaaaatcgctaacctctgtgttttcaatcacgaccttaaaatctgcacgaccatcgttaacggaaaagaaactgaactttga

SEQ ID NO: 7556 - DNA, 1224 bp, Photorhabdus luminescens
atgagttataacaacacacaaaaacaaattggtaatattgaccttgtaaaacaacttaacggggccgtggtatatcggttgattgatcaacaagggccaatctctcgcattcaaattgctgagcaaagtcaacttgcgccagccagtgtgactaaaattactcgtcagttacttgaacgcggcttgattaaagaagtcgatcaacaagcctctaccggaggccgccgtgccatttccatcgttacagaaaatcgtcacttccatactgttggtgtccgccttggtcgccatgatgctactcttgctctttatgatatgagtggcaaggcattggttgaagaacattatccactgcctgaagcgactcagcaaaaagttgaaaaccaacttatcaacgcaatagaaaattttatccagcaaaatcaacacagaatccgcgaactgatcgccatctcagttatcctgcccggattagttgacccagataccggcatcgtccgttatatgcctcatatcaaagtaaccaattggactctggtcgataacctgaaaaaacatttcaacattagctgttttgttggtcatgatatccgcagcctggcattagctgaacactatttcggtgccacccgtgattgtgaagattcaatactggtacgtatccatcggggtaccggtgccggggtaattatcaatagccagatacttctcaataatagaggaaacttaggtgaaattggtcatattcaaattgatccactcggtgaacgttgtcactgtggcaattttggctgcctggaaactatcgccgctaactcagcgatagaagcgcgagttcagcatcaattaaagcaaggttttccaagccagctaacattaaataattgcaatatcagagctatctgccaagctgctaatcaaaatgatcctctagcatctgaagtcataaaaagtgtcggccattacctcggcaaagctatctctatcgcgattaatttatttaatccacagaaagttgttctggcgggagaaattactgaagctcagaaagtactcttacccgctattcaaagttgtatcaactctcaggtcctgaaagaatttcgtcaagatctgccgatcgttatttctgaattagtccactgttctgctattggcgccttcgctctgactaaacgtgctatgcttaatggtgttctgttacaacacttactcgaaaggtaa

SEQ ID NO: 7557 - DNA, 165 bp, Photorhabdus luminescens
ctggtgccttaccgcttggcgataccccaactgaaagtggtcactgtacaacatgttgtcagaattgtgttatcagaattatggctggggtaccaggattcgaacctgggtatgccaggatcaaaacctggtgccttaccgcttggcgataccccatctgaataa

SEQ ID NO: 7558 - DNA, 1182 bp, Photorhabdus luminescens
atgaataattcacaacagatttttgatgtagtggtggtcggtgctggcatgatcggcgctgcaacagcattggggttggcacaggaaggttggacagttgctttattggatcatcaaccaccacaatcttatgatgcacagagtcagcctgatgtgcgtgtatcagcaatcagttgtgcttctgtagatttgctcaaacaacttggcgcatgggatgcggtattacagatgcgcagtgcgccgtatcgtacattagagacttgggaacagaatgattctaatttggtgtttgatgctcaaagtttagggctgcctgagttgggctatatggttgaaaaccgtatcttgcaactggctctgtggcagcagtttgaaaaatatcccaatttgactttgctatgcccggcagtattgcaagcaatgcagtggcagaaagtgggttggttagtgactctggctgatggaacggagatggctgctcgtttgattgtcggggctgatggtgctcgttctcaggttcggcaaatggcaggaattggcagtcgtggctggcagtacagacagtcttgtatgttgatcacggtaaaaacagaacagccccagcaggatattacttggcagcagttttttccttctggcccgagagcgtttcttccactgtttgatcaatgggcttcgctggtgtggtacgacaaaccggcacgcatacgacaattacaggcaatgtcaatggctcaacttgaacaggagattttccaggcatttcctatacggttaggtaaagtgactcccgttgccgccggttcatttcctttgactcgtcatcatgctaacagttatgtgcgtgaaggattagtattgttgggggatgcagctcataccattaatccgctggccgggcaaggcgtaaatcttggttatcgggatgtgaatactctgcttgatgttttggtgaaggcgagagaattaacagagcagtgggattcattggaagtattgatgcgttatcagcgtcgtagaatgccggataaccgaatgatgcaagctggaatggatctattttacaccgtgttcagtaatgaattgccagggctgaaagttgctcgtaatctggcgctgatggcagctcaacgggctggcgtaatgaaaaaaacggtgcttaagtatgcgttaggattgtaa

SEQ ID NO: 7559 - DNA, 1431 bp, Photorhabdus luminescens
atgtcgacgataaaaaaactgtatattaaaacttggggctgtcagatgaatgaatatgattcatctaaaatggccgacctgctggaaagtactcacggttatcagttaaccgatgtcgccgaagaagcagacattttgctattgaatacctgttcaatccgcgaaaaagcacaggaaaaggttttccatcaattaggccgctggaaaaacctaaaagatactaatccagatctcatcattggagtcggtggctgtgtagcctctcaggaaggcgatttcatccggcaacgcgctcaatgtgtagatatcattttcgggccgcaaacattgcatcgtttacctgaaatgatcaaccaggtgaaaggtacccgcagcccggttgttgatatcagcttcccggaaatcgagaaatttgaccgtctaccggagccgcgtgctgaaggtccatctgcattcgtttctattatggaaggttgcaacaaatactgtactttctgtgtcgtaccttatacccgcggagaagaagttagccgcccatgtgatgatgttctgtttgaaatcgctcaacttgccgctcaaggcgtacgcgaagtcaaccttctcggtcagaatgtgaacgcctatcgtggtgccacttatgatggtgatatctgctctttcgctgagttaattcgtttggtagcggctatagatggtattgatcgtattcgctttacgactagccacccaattgaatttacagacgatattattgccgtttacgaagatacaccggaattggttagcttcctgcatttaccggtgcaaagtggctcggaccgtattctaacgttgatgaaacgcgcacatacagcccttgagtataaaagcattattcgcaaactgcgtaaagcacgtcctgatatcttgataagctctgacttcattatcggattccctggtgaaacccaagatgacttcgagaaaaccatgaaactgatcgctgatgtcaatttcgacatgagctacagcttcatctattctgctcgtccgggaacgccagcagccgatctgcctgatgacgttagtgaagaagagaaaaaacagcgcctttacctgttacaacaacgtatcaaccaacaagctatgagctacagccgtgctatgttgggcagtgtacaacgtattctggttgaaggaacttcccgtaagaatgtgatggaactttctggccgtaccgaaaacaatcgggttgtcaactttgaaggccaacctgatatgattggcaaattcgttgatgttgaaattgttgatgtctacgccaactcactacgcggtaaagttatccgtaccgaagatcaaatggatcttcgtatacacgaatcacctgagtccgttatagcccgtacccgtaaagaagacgaaatcggggtcggcacttatcagccctaa

SEQ ID NO: 7560 - DNA, 1050 bp, Photorhabdus luminescens
gtgactcaacaaattcattcacaaatagcaacccaggaaattttcctcgaacccgccgacaatcagcgcctaatgagcctgtgtggtccgtttgatgacaatttgaagcagcttgaacgccggttaggtattgaaattagccgtcgtgataaccgttttaaactgatgggcaaaccgctgtgtgttagcgcagccaccaatatcctacagcatttatatgtggaaacttcccctgtccgtggcgtgatccctgatgtcaagccagaacaaattcatctggcaattaccgagagccgggttctggaacaaaccgccgagagcatacccgaatacggtaaatccgttaatattcgcaccaaacgcggcatggtaaaaccacgcacgcccaatcaggcacagtatattgccaatattcttagccacgatattacgtttgggattggccctgccggcacaggaaaaacttacctggccgttgctgctgcggttgatgcactggaacgacaagagattcgccgtatcctgctaacccgtccggctgtcgaagcaggcgaaaaattgggtttcctaccgggtgacctgagccaaaaagtggatccgtacttgcgcccactctacgacgctttgtttgaaatgctcggttttgaaaaagttgaaaagctgatcgaacgtaacgttattgaagttgccccattagcttatatgcgaggacgaaccctgaacgacgcttttattattctggatgagagccagaatacaaccatcgaacagatgaagatgttcctgactcgtatcggcttcaactccaaagcagttgttaccggtgacgttacgcagattgacctgcctcgtgggcaaaaatccggcctacgccatgccactgaagttctatcaggcgtcggtgagctgagtttcaattttttccacagtgatgatgttgtccgtcacccagtggttgccaaagtcgttattgcctatgaagagtgggaagcaaccgagcaaaaacgcaaacaaacactcagtgaacaacgcaagcaggaagcacaatga

SEQ ID NO: 7561 - DNA, 468 bp, Photorhabdus luminescens
atgagttcagtcatacttgatttacaaattgcctgtgagcattcacaaggtcttcctaaagaaaccctattccagcactggctggatggggttttaccgcaatttcaatctgaaagtgaagtcactatccgtattgttgatgaggcagaaagtcacgatttaaatctgacctaccgtggtaaaaataagccaacaaatgtgttatctttcccatttgaggcaccaccagagattgatttacccctgcttggcgatttaattatctgtcgtcaggtcgttgaaaaagaagcggaggaacaacaaaaaacaatagaagaacattgggcgcatatggtggtccacggatgcctacatctgctgggctatgatcatatcgaagatgatgaagctgaagaaatggaatctttggaaacagaaattatgcaaaagttaggttatgctgacccctatcttgcagaaaaagagtaa

SEQ ID NO: 7562 - DNA, 882 bp, Photorhabdus luminescens
atgagcgacgaccatccttcaagtaatgacaaccctagccctaagaaagggtttttcactcttcttcttaaccaactttttcacggtgagccaaaaagccgtgatgaactggtggaactgatccgtgactctgaacaaaacgatctgattgatcctgatacccgcgatatgctcgaaggggtaatggatatttccgatcagcgtgttcgggatatcatgatcccccgttctcaaatcgttaccttaaaacgtaatcaaaccctggacgaatgtctggatgtgattatcgattcggctcactctcgtttccctgtgatcagtgaagataaagatcatattgaagggattttaatggcaaaagacctattgccatttatgcgcaccgattccccaccattcagcatagataaggttctgcgtcaggctgtcgttgtacctgaaagtaaacgggttgaccgcatgctgaaagaattccgttctcaacgttatcatatggcaattgtcattgatgagtttggtggtgtatcgggcctagtcactatcgaagatattcttgaattgatcgtcggtgaaattgaagacgaatacgatgaagaagaagatgtcgatattcgtgccttgagccgtcatacctatacggtacgagcactgactcagattgaagactttaatgaagcctttagcacccaattcagtgatgaagaagtggatactattggtggtctggttatgcaggcattcggtcatttacccgccagaggagagtccgttgatatcaacggctatctctttaaagttgctatggccgacagccgaagaattattcaagtttatgttacgataccggacgatgcgccaatacctaaccttgaagaagaataa

SEQ ID NO: 7563 - DNA, 1530 bp, Photorhabdus luminescens
atgaacaaagcttcattattaaattgccagcggctacgcgccttactggcactgttttttggagccagtggaacactggctttttcaccttttgacttctggcctgccgcgattatctccctgtttggactacaacttctgactttaaacagaacaccccgacaagcggcatttattgctttttgttggggattcggtctgttcggcagtggtacaaactgggtgtatgtcagtattgctaatttcggtggcatgccaaccacagtcaatattctgctggtcatattacttgccgcctatctctcgctctatcctgctttattcgctgccttactcaatcgtttcttcgcaaaaacgaacgggttgaggctggctgtagcagcacctgcattatggcaactcaccgaattcctgcgaggctggattctaaccggtttcccctggctacaattcggctacagtcaattagatggtccaatgaaagccattgcaccaattttgggtgttgaggccatcactttcctgttaatggctctcagcgggttattcgttctggccgtcatacatcggaaaatagtcgctggtattatcgctgtcgccattctgctattaccatggccaatacgccattatcagtggtacagcctgctatctgaaaaaactgttgatgtcgcgctgattcagggaaatattccacaatccctgaaatgggaccctaaaatgctcagcgaaactatggacatctacatgggcaacagcctgccatacatcggcaaaatgccgataatcatctggccggagtctgctattccttcattggaaagttatcaacgccactttctaacaaaattggatgaactgttacgcaatcaacataccagcctcattaccggtattgtcgatgaaagagccgttggcgaccgtgataagatctataacagtgtgattgtcctcggcgataaaataccttatcaatatccggcagctattcgctacgataaatatcatctggtaccattcggtgaatttgttccgctagaatccctactccggcctctggcaccattcttcaacttacccatgtcttcattcagccgtggcaactacattcaaccacagctttctgttgcaggatataacctaaccaccgctatttgttatgaaattatactgggtgaacaagttcgggcgaatttcaaaccggataccgaattcttactcactgtttccaatgatgcttggtttggtggttcaattggcccttggcaacatttccaaatggcgcgcatgcgttcccttgaattaggacgcccgttactacgtggtaccaataacggcattacagctgttatccgcccggacggagaagtgcaagcagcactcccacaatttacccgtaatgtcttggtagctaaagtgacacctgcaaccgggataacgccctatgcacgctggggtaactggccgttatggataattaccgtatcattttctctgtttgccttaacgtataaccgccgtaaatcttaa

SEQ ID NO: 7564 - DNA, 894 bp, Photorhabdus luminescens
atgcgtatgcgtaatctagtattaaccatgatgttacttggcatggcgggggctgctcaagccgaagaattaacgggaacactgaaaaaggttaaagatgatggtgtgatcattgtgggacatcgtgaatcctccgtaccttttgcttactacgataaccatcaaaaagtcgtcggctactctcaggattattctaatctgattgttgaagcagtgaagaagaaactggacatgccaaatctgcaagtaaaattgatacccgtgacttcgcaaaatcgtatcccattgctacaaaatggcacttatgatttcgaatgcggttccacttccaataaccttgaacgtcagaaacaagtcactttctctaacagcatctttattattacaacacgtttgctgactaaaaaaggttccggtataaaagatttcccagatttggcgggtaaaaatgtcgttgtctcagcaggtacgacttctgaaatcttgctgaataaactcaacgatgagaaaagcatgaaaatgcgcatcatcagtgcaaaagatcatggtgactcattccgtactctggaatctggccgggcaatcgcctttatggtggatgatgcactactagcaggtgaacgcgccaaagcgaaaaaacctgatcaatgggaaattgttggtacacctcagtctagagaagcctatggttgtatatcgcgcaaagacgatcttcaattcaagaagctgatcgatgagaccattgttcaggcgcaaacctctggagtggcagagaaatcatttgagcgctggttcaaacacccgattccacccaagaacctgaatttgaatttctctttgtctgatgaaatgaaagcactatttaaatcgccaaatgataaggcgcttgactag

SEQ ID NO: 7565 - DNA, 741 bp, Photorhabdus luminescens
atgtcaatcgattggaattggggcatctttttgcaagctgcccctttcggcaatacgacttatctaggctggttgatagctggatttcaggtgacgattgccttgtctatctgcgcctggattatcgctttcattgtcggctcactgttcggcatcttacgcactgttcccaataaaatattatctgggataggtacctgttatgttgagctctttcgtaacgtaccactgatagttcaattttttatctggtatctggttgtacctgaactactaccagaaaaaatcggtctgtggtttaaaactgagctggaccctaatatccaattttttctctcatccactgcctgtttaggtcttttcactgctgctcggatgtgtgagcaggttcgtgccgccatacaatcactaccacgtggtcaaaaagcggcagggctggcaatggggctaaccttgccgcaaacctatcgctatgtcctattacccaatgcctatcgagtaatcattccacccatgacatcagaaatgatgaatctggtgaaaaactccgccattgcctccactattggtctggtagatatggcagcacaagcaggtaagttacttgattactcagcacatgcttatgaaacatttacggcgattacgctagcttatatcggaatcaatctggtgattatgcttgccatgcacttgcttgagaaaaaagtgcgtttaccgggtaatattggaggtcaataa

SEQ ID NO: 7566 - DNA, 675 bp, Photorhabdus luminescens
atgtacgagtttgactggagttcgattatccccagtatcccgtttctgctacaaggcttagtcattacagcaaaaatcacgattattgctgttgttgtcggtattctctggggaaccgtactggctgttatgcgcctctcttcggtaaaagcactgagctggtttgccactttatatgtcaatctgttccgttctgtaccactggttatggtactgttatggttctatctgattgtgcctagcctagtgcagaacgttctagggatttctccgaaaacagatattcgtttaatttcagctatggttgcatttgcctttttcgaagctgcttattattcagaaattatccgggcaggaattcagagtatttcccgcgggcaatcttcggcagcactggcattgggtatgacaccaatgcaaagtatgagactggttatcctgcctcaggcattccgtgcgatgaccccgctgttactgacacagggtatcgtactgtttcaagacacctcattggtgtatgtgctcagcctagcggactttttccgtactgcggcaaatatcggtgagcgtgatggcactcaggtcgaaatgatcctatttgctggtttggtttattttattattagtattgccgcatctatgctggttaactatttgaagaaaaggactgtttga

SEQ ID NO: 7567 - DNA, 726 bp, Photorhabdus luminescens
atgatctccctgaaaaatgtatccaagtggtatggccaatttcaggttctctccgactgctcaactgaagttaaaaaaggtgaagtcgttgtggtctgtggcccgtctggctcaggcaaatccaccctgataaaaacggtcaatggcctggaatccatccaacagggtgaaattctggttaatgacattaaagttaatgataaaaacaccaatctggcacaactacgctctaaagtcggcatggtgttccagcattttgagctgttcccccatctatccatcattgaaaatttaactctagcgcagattaaagtgcttaatcgtgataaaaaagcagcggaagaaaaggggctgaaattacttgaacgcgttgggcttgccagtcaagcgaataaattcccgtctcaactttccggtggtcaacaacaacgtgtagcaatcgcccgagccctttgtatggacccgattgccatgctatttgacgaacctacctccgcactcgaccctgaaatgatcaatgaagtgctcgatgtcatggttaaactggcagatgaagggatgaccatgatggttgttactcacgaaatgggctttgcccgtaaagtagccaaccgggttatctttatggatgaaggcagaattgttgaagatagcaaaaaagaagatttctttgcgaatccaaaatcagatcgcgccaaagaatttctagctaaaattcttcactaa

SEQ ID NO: 7568 - DNA, 2583 bp, Photorhabdus luminescens
atgcaagaacaataccgtccagaagatatagagccgcaagttcagcttcactggcaagagaagcaaactttcaaagtgacagaagacaacagcaaagaaaaatattactgcctgtccatgctaccttacccttctggtcgactacacatgggccatgtacgtaactacactattggcgatgttatctcccgttatcaacgtatgcttggaaaaaatgtcctgcaacctatcggttgggatgcatttggcctgcccgcagaaggtgccgcagtaaaaaacaatactgcacctgctccgtggacctacgccaacatcgaatatatgaaaggtcaattgaaaacactgggcttcggttacgactgggatcgtgaagtcacaacctgtaccccggaatattaccattgggaacagtggtttttcaccaaattgtatgaaaagggcttggtttataaaaaaacctcctcagttaactggtgtccccacgatctgactgttctggctaatgaacaagtggtcgatggctgctgctggcgttgtgatagcaaagttgaacgtaaagaaattccacaatggtttatcaaaatcactgattatgccgaagagttgttaagcgatctggagacgctggaagagtggccggagcaggtcaaaaccatgcagcgcaattggattggccgttctgaaggggtagaaatcacttttgatgtggctgatagtcaggagaaactgaccgtctataccactcgtcctgatacgttcctcggcgccacttatgttgcgattgccgccggtcatcctctggcaaaacaagcagcagaaaataaccctgaactggttgctttcattgatgagtgccgtaataccaaagttgcagaagcagatatggcaacaatggagaaaaaaggcatggcaaccggtatgtttgctattcattcattgaccaaagagaaagtggcaatctgggttgcaaacttcgtcctgatggaatacggcaccggtgcagtcatggcagtgcctggccacgatcaacgcgactgggaatttgcgacaaaatataacctgccaataaaagccgttattctggacaatgaaggtaatgaaccgaacgtccatgaagcaccggtaacagataagaatatcctgtttaattccggtgaatttagcggtctgaatcacgaagccggttttaatgccatcgctaataaactggtggaaatgggcgtaggtaagcgtaaagtcaactatcgtctgcgcgactggggtgtttcccgtcaacgctactggggtgctcctattccaatggcaacactggaaaatggcacagttgttccggttccagcagatcaactgcctgttattctgccagaagatgtcaaaatggatggcatcaccagcccaattaaagctgatcctgagtgggcaaaaaccactatcaacggccagcccgcactacgtgagaccgataccttcgatacctttatggaatcttcctggtactacgctcgctacacctgcccagattatgacaagggcctgctcgatccagcagcggctaactattggctgccagttgaccaatacatcggtggtatcgaacatgccatcatgcatctgatgtatttccgtttcttccacaaactgatgcgtgacgcaagcttggtcaattccaatgaacctgccaaacgtctgttatgtcagggcatggttctagccgatgctttttattatatcggcaaaaatggtgaaaaaatttgggtttccccggctgatactatcgttgaacgtgatgataaaggccgtatcgttaaagcgacggataaagaaggccatgagctggtttataccggcatgagcaaaatgtctaaatccaaaaacaacggtattgacccacaattgatggtagaaaaatatggtgctgataccgttcgcctgtttatgatgttcgcggcaccaccagagctgacgctagaatggcaagaatccagcgttgaaggagcaaatcgctttttgaaacgtgtgtggcgcttggtttatgaacatagcagtaaaggggcaactcaaccactggatatcacaaacctgacagtggaacaaaaagatctattccgtgacctgcacaaaaccatcgctaaagttacagatgatgttggtcgccgtcaggcattcaatactgctatcgctgcggtaatggaattgatgaataaactgacccgcgcaccacaggaaactgagcaagatcgcgctctgatgcaagaggcactgttggcggttgtccgtatgttgtcaccaataactcctcatgcttgctttattatgtggcaagctctgggtggtgaaggtggtattgatacggctgattggccacaagctaatgagcaggcaatggttgacgataccaagctagtcgtcattcaagttaacggtaaagtgcgtggtcgtgttactgtgccagccgatgcgactaaagaatatgttcatgatctggcagcacaagagtatggtgtggcgaaataccttgaaggcgtcactattcgcaaagtcatttatgtaccaggcaaactgctgaatctggtcgtcggctga

SEQ ID NO: 7569 - DNA, 549 bp, Photorhabdus luminescens
gtgcgacatcgtattttaacgttgttgctggggttggcggtgctagtcaccgctggctgcggttttcatctgcgcggcaccacccaggtgccagcagaactcaaaaagctgcaaataacaagcagtgacccatatgggccactggcccgttccgttcgccaacagcttcgtctgaataacgtcactatccttgaggatggtagcgctgatgttcctgttttgaagttaattgactcttctgaaaataaagatactgtctctgttttccaagatggtaaggcagctgaacgccaattgacactgaatgtcaatgctcaagttattatgccagacggtagcgtatatccgctgcgatccagggttgaccgctcttttttcgacaacccattagaggccctggcgaaagatgctgaaaacgagataatcaatcaagaaatgcgtgaacaagctgctcgccggttagttcgccagttattgaccgttcacaacgcagaaaagcagaaagccagagagaaacaggtgggacagcaagctgcgcaagcacaatga

SEQ ID NO: 7570 - DNA, 1041 bp, Photorhabdus luminescens
atgatcaaactctatcccgaacaactgatttcgcagctcaatgaggggctgcgaaactgttatctgatatggggtaatgaacccctactattacaggaaagccaggatcatattcgcaaggctgctgaaaaaaacgccttcactgaacacttcacctatacgctggataatcacaccgagtgggatgagatattcaatatttgtcagtcattaagtctgtttgctagccgtcaaacactcactttattactgccggaaaatggccctaacacaaccatagccgaacaactggtgaaactggcagaactacttcacccagatatactgctaatactacgtggtttgaaattgaccaaggctcaggagaacagtcactggttcaaaatactaggaaaaaatggtgtttatgtcagttgtcagaccccggaacagaaccgtctgccgcagtgggttgcacaacgggccaaagctatgaaattggtgctggaagaacaagccaatcaactactgtgttattgttatgaaggaaatttactggcgttagctcaggcacttgagcgtctttccctgctatacccagacggtaaactaaccttacatcgtgtcgaaaatgcggtaaatgacgcagctcactttacaccttatcactgggtagactcgctattatcaggtaaagcaaaacgagcctggcatattctaaaacagttaaaacaggaagattgcgaagctgttattctattacgtaccgtacagcgtgaattactgttgctactcacgctgaaacgtcaaagtaccacaaccccgatgaaaacactgttagatcagcatcgggtatggcaaaaccgccgttcattactgacaagcgcactgcaacgtctcactcaacatgatttgcagagagcaattcatttacttgtacagatggaacgccagatcaaacaggattacggccagtctatttggtcagatttagaaactctttccatgctgttatgtggaaaaaccttacctgagagcttttttaatgcctcatgccattga

SEQ ID NO: 7571 - DNA, 678 bp, Photorhabdus luminescens
atgcctcatgccattgattctacttgcccgaaacaacccgttattaaagcattatttggtggaacattcgatcccatccattacgggcacttgcagccagttgaaaccctggcatatcaaactggcctgaatcaagtgattttactaccaaatcacgtcccaccacaccgcccacaaccggaagccactgcacaacagcggcttgaaatggtacaactggcagtacaggatagcccactgtttaccgtcgataagcgtgaactggagcgtactatcccctcttacacaattgatacgctagagtcattccgtcaggaacttggtaacaaacaaccactagcatttataatcggccaggatgctttgttatcactgcacacttggcatcgttggcaagagctactgagtttctgccatttgctagtttgtgctcgtcctggttatcaaactcagttttccacaactgaaatgcaacaatggcttacaaaacatcaaatctacgatccaagccaacttggcagtaaacctaacggttatatctatctggcagatacacctctgctgtcgatctcagcaaccgacatccgtcaacgccaccagcaagggttaagttgtgacgatttactccccctttcagtacaaaagtatatagattcacaggggttatatcgccaatag

SEQ ID NO: 7572 - DNA, 318 bp, Photorhabdus luminescens
ttgcaaggtaaagaactccaacagtttgttattgataagcttgaaaactccaaagcacaggatattgtttcccttgatgtccaagggaaatcaagtattaccgattgcatgatcgtctgtaccggaacttccagccgccatctgatgtctgtcgcagataatctggttgatgactgtcgtgcgagcggcctgatcccactcggcgttgaaggacaaggcgtatctgactggattgtcgtagacctcggtgaagttatcgtacatgtcatgcaagaagagagccgccgcatgtacgaactcgaaaagctctggagctga

SEQ ID NO: 7573 - DNA, 471 bp, Photorhabdus luminescens
ttgaagctgcaattaatcgctgtaggtacaaaaatgccggactggatacaggccggctttacagattatttgcgtcgttttcccaaagacatgccatttgatctgatagaaattccggccggcaaacggggcaaaaatgcggatattaaacgcattctggaaaaagaaggcgaacaaatgctggccgctgtcagcaaaggcagccgtattgtcaccctggacattccgggttcccgttgggaaacgcctcaattggcgcaacagcttgaacattggaaacgggatggtagagatgtcagtttgttgataggtggacccgaaggtctcgctccggcatgtaaagctgccgcagagcaaagctggtcactgtcaccgctgaccttaccccatcctctggtccgagttttagttgcggaaagcctgtaccgggcatggagtattacgaccaatcatccctatcatcgggaataa

SEQ ID NO: 7574 - DNA, 1896 bp, Photorhabdus luminescens
atgaagaataaacgtaccccttttcgtgattatacggctgaatcagccctatttgctcgccgcgcattggtggcgtttattatcatcttggtactgacgggtatcctgatggccaatctttaccatttacaaatcacccgccacgaagactatcaaacccgttcaaacgaaaaccgtattaaactggttccaattgcaccaagtcgcggtatcatttatgaccgaaacggcacgccattggcacttaatcgaactatctatcagttggaaattatacctgaaaaggtagaacaccttgagcaaacgctgaatgatttacgcaatgttatcgatctgactgacgaagatattgccaactttgaaaaagagcgtaaacgctcgcgccgctttacctctattccattgaaaacttcacttgatcatattcaagtagcacgctttgccgttaaccaatatcgtttccctggttttgaaataaaaggttaccaacgccgcttctacccttatggttcagcactgacacatatcatcggctatgttgctaaaattaatgataaagatgtagaacgattggataaagaaggtattttacctaattacgccgctacccatgatatcggcaaactgggtattgaacgctattatgaaactgttttacacggcaaaacgggttatgaagaagtcgaagtgaataaccgaggccgggtgatacgccaattacatgaacaaccaccacaggccggacaggatatttacctaactatcgatctcgaattgcagatttacattgagaaactcctgacaaccagccgtgctgcggtcgttgtcagtgatccacgtaatggggaaattctggcgctggtatctaacccaagctatgatccaaacctattcgtaaacggtatctccaataagaactaccaagagctattaaacaatcctgataggccacttattaatcgtgctactcaaggaatctatcctccagcttcgacagtgaaaccttttattaccgtcgcagcactaagtacaggcgttatcaataaaaataccaccatttttgatccgggttggtggcaattaccgggttcagaaaaacgctaccgtgactggaaacgttgggggcacggtagtctcaatgcacatagagccattgtagaatccgcggatactttcttctatcaagtggcctatgatatgggaattgatcgtctatctgagtggatgaccaagtttggctatggcgaatatactggaatcgacctagccgaagaacgcaccggtatcatgcctacccgcgaatggaaacaaagaaaatataaaaaaccttggtatcaaggagataccattcctgtgggtatcggccagggatattggacagcaacccccattcaaatggtaaaagcactgacaaccttaattaacgacggtaatgtaaaaacaccacatcttctgctaagcaagaagctgaaaggtgagatgatcccttatcaacaaacagaaaatattcagatcggtgatatccattcaggatattgggaattagccaaaagtggcatgtacggtgttgctaacctaccaaacggtaccggccacaagagctttatcagcacgccttataaagccgcggtcaaatcgggaacagcacaggtctacagttatgaaacctacaatgccagtaaaattgctgagcatttacgggatcataagctgatgaccgctttcgccccttatgaaaatccgacagtagccctttccattattttagagaatggtggtgcaggtccagcagtgggaacccttgttcgccaaatcctcgaccatgtactattaggggataacaacataacattgccgaatgctgtccctacacctcccggaacagaaagtgactga

SEQ ID NO: 7575 - DNA, 1113 bp, Photorhabdus luminescens
atgacagaaaaccaaaaaagggttcctctctggaccagattacatatcgacctaccgttactcctgtgcattttggcattgctgatatacagcgcttttgttatgtggagtgccagcggccaagatatggggatgatggagcgcaaaattggtcaaattggtgcaggactggttgtcatgctcatcatggcgcaaattccaccaagagtttatgaaagctgggcaccccatctctatattgtttgtgttattttactgatttttgtcgatgctttcgggcaaataagtaaaggtgcccaacgctggctggatttagggatcatccgcttccaaccttcagagattgccaagatagccgtacccctgatgatcgcacgctttatgaaccgcgacttatgccccccatcactgaaaaataccactatcgctctgatgctcatttgtctgcctactttactggttgccgctcagccagacttagggacttcaattctgatcgcggcttctggtctgtttgtcctgttcctttcgggcatgagttggcggttgatcggtatcgcagctctactgttagcctgttttatccccatcttgtggttcttcttgatgcatggctatcagcgcgatcgcgtcatgatgctacttgatccagaaagcgatccactaggtaagggttaccatattattcaatcaaaaatcgcgattggctccggtggtttatcaggtaaaggctggctattaggaacacaatctcaattggagtttctgccagaacgtcatacagatttcatatttgccgtactatcggaagaacttggtttgattggcgtactactgttattaacattatatatgttattaattacgcgtgggttggttatcgcaaccagagcacagaacacttttggtcgggttatggttggcggcctaatgttaattctatttgtttatatcttcgtcaatattggcatggtgagtggtatcctgcctgtagtcggcgttcctttgccatttgtcagttatggcggctctgcgttaatcgtcttaatggcgggtttcggcattatcatgtcgattcacacacacagaaaattgttgtccaaaagtttatag

SEQ ID NO: 7576 - DNA, 999 bp, Photorhabdus luminescens
atgcgtcaacactggcttatactcagcatgattgcagccctgctatctggctgtactactcctgacaaacaaaaatctgccccgttacccgcagtaccaacgcaggatgttctgggtgcagaacctcgttatgagccttatcatcctagcgccaatgatgattatcagatgaacggacatacttatcacattgtgcaagccccctctcagtttagtgagacaggttatgctagttggtacggtgaagaatccagcggcaaaatgaccgcaattggtgaacgttttaatccttatgcgctgacagccgcccatcctaccctgccaattccaagttatgtccgtgtgaccaacttgagcaatggccgcatgatgattgtcagagtcaatgaccgtggtccttataaaccagggcgaattatcgatctatcgaaggcttccgctgaacggttaaacctgactcaaagtaccaaagttaaggttgattttatcgaggttgcccaggacggttctgcatccggtcccggtaccattggcagccagatagttaaacagagttatgctctaccgggtagaccaacgctgacaaccagtccattaggaacaccaacaatggagaatatccctgatcagactagcagccagcccttaacaaatcagccgatgaaactgacgatacaaccggaagcgactgaacaactccccgcaatgaagctgcaaccacctaagtctgttacaaacagtacttcaatagtcacaacaccaacagccgcctcagcaaatggttttatggttcaggttggtgctgttagcagtgagcaacgcgcaaaagagtggcaacaaacactagcgcaacgctttaatgttcaaggtcgcgtaactcaatatagtaacgtttatcgtgtacagttagggccattcaacaatcgccagcaagctgccgatttacaacaaaaactggctgaccagatacagcaatcttcttttatcgtcagtccctga

SEQ ID NO: 7577 - DNA, 1170 bp, Photorhabdus luminescens
ttgggtattgcgctggcaataagtgcttctgcctttgccaatgggaatgatgccaacctgaaaacgatgatcccaggtgtgcctcagattgatgcggaagcttatatccttatcgactataactcaggtaaagtgctggctgagatgaatgcagatgcacaccgtgatcctgccagtctgacaaaaatgatgaccagttatgttattggtcaagcaatcaaatcaggcaaaatccacccaagtgatatggtcactgttggcactgacgcatgggcaaccggtaatccggtatttaaaggctcttccctgatgtttctcaagccaggcgatcaggtctcggtttctatgttatcccgcggtataaacttgcaatccggtaacgatgcctgtgttgcaatggcagattatgttgccggtagccaagagtctttcgttaatttaatgaatggttatgtgaaatcgcttggattaaagaatacgaatttcaaaaccgttcatggcttggatgcagaaggccaatacagctctgcccgtgacatggcattgattggtcaagcgctgatccgtgatgttcctgaagagtacaccatctataaagagaaagagtttacctacaacaatatccgccagacaaaccgtaatggcttattgtgggataagagcctgaatgtcgatggtattaaaaccggccacactagcgcagcgggctataacctagtcgcttctgcaacggaaggcgatatgcgcctgatttctgcggtattaggcggccacacttataaaggccgtgaaacagaaagtaagaaactgctgacctggggtttccgtttctttgaaactgttgctcctctgaaagcaagcaaagaattcgcttctgaaccagtctggtttggagataacgatagggttcagttaggtgttgataaagatgtttatctaactattccccgtggtcgtctgaaagatctgaaagccagctatgtcatgaataatagtgaattacatgcaccactggcgaaaaatcaagtcgtaggtactatcaactttcaacttgatggcaagactattgaacagcagcctttagtcgtgatgaatgaaataaaagaaggcagcatcttcggccgctttatcgattacatcaaactactatttcatcattggtttggctaa

SEQ ID NO: 7578 - DNA, 264 bp, Photorhabdus luminescens
atgaaaaccaaattaaatgaactgcttgagttcccttgttcattcacttacaaagtgatgggcttagcggagcctgagctagtcaatcaggtcgttgaagtggttcaacgtcatgcgccgggcgattactctccacaagtgaagccaagcagcaaaggtaactaccactcagtgtccattactatcaatgcgactcatattgaacaagtagaaacgctatatgaagagttaggtaaccttgaattggtacgggtagtcttgtaa

SEQ ID NO: 7579 - DNA, 666 bp, Photorhabdus luminescens
ctgaccaaatcttatagctatcaaatgaagtttcaattgcaacataaaacgattttcttacgtcaattaggaatacagccctacgagccgatttctgatgcaatgcacttgtttactgagcagcgagatactaatacacctgatgaaatctggctggtacagcatccaaaagtctttactcaaggacaagcaggtaaagctgagcatttgctgtccctcggtgatattccggttattcaatccgatcgtggtggacaagtcacctatcatggccctggtcagcaggttatgtacgtcatgattgacattaaacgcgccagaattggtgtacggcaactggttacggcgatagaggatactgtcattaaaacccttgctcactttggtgtgaaagcctatgcccgcccggacgcccctggtgtctacgtcaatgaagcaaaaatttgctctcttggattacggatacgtaaaggttgttctttccacgggttagccctcaatatcgcaatggatttagaacccttccagcgtattaacccttgtggctatgccggcatgaaaatgattcaactcagtgacttagttcctggaattactgttgaacaagtacaacctgttttggtagagaaattttgccagcagctaggatttaaactgaacagttaa

SEQ ID NO: 7580 - DNA, 966 bp, Photorhabdus luminescens
atgagtaaaccaattcagatggaacgcggagttaagtaccgcgacgcagacaaaatggcgctgatccctgtcaaaacagtgatgaccgaacgtacagaaatcttgcgtaaacctgagtggatgaaaatcaaacttcctgcggattccagccgcattcagggcatcaaatctgccatgcgcaaaaatggcctgcattccgtttgtgaagaagcatcttgccctaacctggcagaatgcttcaatcacggtacagcaacctttatgatccttggcgcaatttgcacccgccgttgccctttctgtgatgttgcgcacggccgcccaatggcacctgacaccaacgaaccggtaaaactggcacaaaccattaaagatatggcactgcgctacgttgtcatcacctccgttgaccgtgatgatctacgtgacggtggtgctcagcactttgctgactgcatctctgctattcgtgaaaaaaatccatccattaagattgaaaccttagttcctgacttccgtggacgtatggatcgtgcacttgaaatactgacagcgacaccgcccgatgtctttaaccataacctggaaaacgtaccccgggtttaccgtcaggtgcgccctggtgcaaactatgagtggtcactaaaattacttgaaaagtttaaagaagcccatcctgatattccaaccaaatcgggtctaatggtcggtcttggtgaaaccaacgaagaaattcttgatgttatgcgtgatctgcgccgccacggtgtgactatgctgactctgggacaatacctacaacctagtcgtcatcatttaccggtacagcgctacgtcagcccacaggaatttgatgaaatgaaagaagaagcgttagctatggggttcacccatgctgcctgtggtccatttgtccgttcttcttatcatgctgacttgcaagccaaaggtgaagaggtcaaataa

SEQ ID NO: 7581 - DNA, 375 bp, Photorhabdus luminescens
atgattaatattattctggctatatttatcggaggtggcttaggcagcgtattacgctggtttatcagcctccgtcttaataatatttcttctaatatcgcaattggcacccttaccgttaactgtattggtgcattaattatcgggctaggattagcctattttaataaatctacccatcttgatccggcttggaaattgatgttgaccaccggtttttgcggaggtttaacaaccttttccacattctctgttgaagttgtttatttgttactggacgggaaactaggatgggcactgggaacagttttgcttaatctttttggatcattactgatgaccatgttagctttcgtattgatgcatgaactttaa

SEQ ID NO: 7582 - DNA, 213 bp, Photorhabdus luminescens
ttgatgtcaaaaattaaaggtaacgttaagtggtttaatgaatctaaaggattcgggtttatcactccagaagatggtagcaaagacgtattcgtgcatttctctgctattcagattaccggatttaaaactttggcagaaggtcaaaaagtagagtttgaaatcactgacggcgctaaaggtccatctgctgtaaacgttgtcgctatctga

SEQ ID NO: 7583 - DNA, 462 bp, Photorhabdus luminescens
atgtatcatcactattttgatacacccaaaggatttcctaaaccgtatattcatatcactgcggatgataagggagtgaccagtctatattttgttgatgaaaaaacagcgcctgaagtgaaaaatgatattactaagcagtgcgtgaaagagttacggggatattttgcgggtaagcgtactgagttttctgttccactcaacccggcaggaactgaattccagcagcgtgtatggttacagttatgtaagatcccatttggagaagtgtggagttataagcaactttcattagcattaggttcagttaattattgtcgtgcggtaggaatggctaattctcgtaatccgatctcattaattgtgccttgtcatcgtgttattggacatgatggtaaattggtgggatataccggcggcctgaatattaaaagctggctattagaacatgaaaaaacctag

SEQ ID NO: 7584 - DNA, 231 bp, Photorhabdus luminescens
atgagcattaccatttatagcaaaccggactgcgtacaatgcagcgcaacctatcaggtgctaagccgaagaaatattccttatcagattatcgatttaaccgaaaacccgcaggctttagcgactatccgtgctatgggctatcagcaaattcctgtggttgttgcaggtacacagcattggtcaggatttcgtccagataaaatcaacgcattaatcgagaatgtatag

SEQ ID NO: 7585 - DNA, 423 bp, Photorhabdus luminescens
atgaatataaatccgctgatctatttctccagttcatcgagtaatagtcatagatttgttcagaaactggagataccagcctttcgtattccaataaatcaatcagacagcccattaaatataacttctccttacattttactgacccccagttacggtggcggcagtactaaaggcgctgttccaccacaagtgatccgatttctcaatatcgccgaaaaccgggcattcatccggggagtcatcgcggccgggaataccaactttggcgaagcttacggcatcgctgggcggataatttcagagaaatgccggataccgctcctataccgttttgaactgttgggtactgaagaagatgtacaacgggtacgccaaggtattcaaagattctggcaacatgactcattagagaatatgtaa

SEQ ID NO: 7586 - DNA, 2130 bp, Photorhabdus luminescens
atgacttttcaaattaatgcacaacaagattatcatgctttaaatgccttgctcaatctgtacgatagtgaagggaatattcaatttgacaaagacaagctggctattcattgttattttcgccagcatgtaaatccaaacacactatttttccatagcctaaaagagaaactggatttcctccaacaagagggatattacgaaataaacgtgctagagcaatacgattttactgttattaaaaagctctttcagcaagcctatagcaaaaaattccgctttcaaacctttctgggcgcattcaaatattacaccagttatactctgaaaaccttcgataataaacgttatctagaacgctatgaagatcgggtatgcatggtagcactgaccctagcccaaggcgatcagatgctggcttgtcgtctagtggatgagatgatcagtggccgttttcaaccagcaacgccaacttttcttaattgcggtaagaaacagcgaggagaattggtttcctgtttcctgctacgcattgaagataatatggaatccatcggacgttcagttaattcagccttacagctttcaaaacgtggcggtggggtcgcattcttactcagtaatctacgggaaacgggtgcaccgataaaaatgattcaaaatcaatcatcaggtgttatcccagtgatgaaaatgctggaagatgcgttttcatacgctaatcaactcggtgcacgccaaggtgcaggtgccgtttatctccatgctcatcaccccgatattcttcgttttctggatacaaaacgggaaaatgccgacgaaaaaatccgtataaaaacgctctctattggcgttgttattcctgatatcacttttaagctggctaaacataatgaagatatgtatctattctccccatatgatattcagcgggtttatggtgtgccaatgtccgaaattagcatgacagaaaaatatgctgaaatggtaaataaccaacaaattcggaaatcaaaaatcaatgctcgtgaatttttcatggcattagctgagctccaatttgaatctggttatccttatattatgtatgaagacacagtgaataatgctaacccgattaaaggtcggattaatatgagtaatttatgttccgaaattttacaggttaacagcgccagcgaatatgaagaggatttaagttaccaccatattgggaaagatattagttgtaatctgggatcaatgaatattgctcatacaatggattcacctgattttaccctctctattgaaacggctgtccgcgctttaaccgcggtatcagatatgagccatatccgttcagttccttctatcgaaaaaggaaatcaggattctcatgctattggtttagggcaaatgaatcttcacggctatctggcaagggaaaaaattcattatggttctgaagagggaatagatttcaccaatatctatttctatatcgttacttatcacgctctgcgtacttccaatcagatcgccattgaacgtaatagctactttaaaggctttaaagattctcgttatgccaatggtgaatttttcaataaatatacagaaataacatggcaacctcagacaaaaaaagtttctcaattgtttgaacaagcaggaataaaaattcctaatcaacaagactggcttgaattaaaagcctcaattatggctcatggtatttacaatcaaaatctccaagctattgctcctacaggttctatttcatatatcaacaattcaacctcaagcattcacccgattgtatcccgtattgagatccgtaaagatggtaaaacaggtcgggtatattatccagcgccatttatgacgaataataatcttgaatattaccaagatgcttacgaaataggaccggaaaagattattgatacttatgctatagccactcaacacgtcgaccaaggattatccctgacacttttcttcaaagacgatgccactacccgtgatattaacaaagcgcaaatttatgcctggcgtaaaagaattaaaacactttattacatccgtctgaaacaaacggctctggaaggcactgaagtacaagattgtgtttcatgctcactataa

SEQ ID NO: 7587 - DNA, 960 bp, Photorhabdus luminescens
atgatcagtaatcctatatgtgcaattaactggaaccgaattgaagatgacaaagatctagaagtttggaaccgactgacaactaatttttggttaccggaaaaaattccattatccaatgatattacttcatggaatacactgacgacagaagaaaaaaagctgactatccgggtattcaccgggctgacactactggacacaattcagaacactgttggtgctccagcgttaatggaagatgccctgacaccccacgaagaagcagttatgtccaacattagtttcatggaagctgttcatgcacgttcttatagctccattttttcaacattatgcctaacaactgatgtagatgacgcctatcgctggagtgaaaagagtttttcattacagaataaagccaaaattatactaaattattatagttatcatcatccattaaagaaaaaaatcgccagtgtttttctagaatcatttttattctattcaggtttctatttacctatgtattggtcaagtcgaggaatattaacaaatacagccgatttaatccgacttattatccgagatgaagccattcacggttattatattggatataaatttcaacaatcattaaaaaaacattcaacactagagcaaaaagagattaaagaattcactttttcattattattagaattatacgaaaatgaaatcaaatatacagaagaactttatgatattgttggctggactgaagatattaaaaaattcttgcattataatgccaataaagcattaatgaatcttggatatgaaaccttatttccgccagaaataacaaatgtcagccctacaatcctctctgcattatcaccgaatgccaatgaaaatcatgatttcttttctggttcaggttcatcatatgttatcggtaaagcagtgaatactgaggatgaggattggaatttttaa

SEQ ID NO: 7588 - DNA, 1200 bp, Photorhabdus luminescens
atggcaattaaacttgaagttaaaaacctctataagatatttggcgaccattcagaatatgctttcaagttactgaattcgggtttgagcaaagatcagatatttgaaaagacaggtatggttgttggtatacaaaatgccaatctgactattgaagaaggcgaaatatttgtcatcatgggattatctggctccggcaaatccacaatggtacgccttctcaatcgtctgataaaaccgactcgcggccaagtattaattgatggtgaagatatttctgagatttcaacagcagcgttaagagaaattcgccgtaacaaaatcagtatggttttccaatcatttgcactgatgccacatttaaacatactggaaaacagcgcctttggtatggaacttgccggaatcaccaaacaagaacgcaataaaaaagcattggatgcactgaaacaggtaaacctggaaaattatgcacaatcttatccagatgagctctcaggcgggatgcgccaacgtgtagggcttgccagagcattagctaataacccagatattttgctaatggacgaagcattttctgcccttgatccattaattcgtacagaaatgcaagatgaactgctaagcctgcaaggcaatcagccacggactatcgtctttatctctcatgatttggatgaggcaatgcgtatcggagaccggattgccattatgcaagacggtgttgttgtgcaggtcgggacacctgatgaaatcttgaataatccagcgaataactatgtgaaaactttctttcgtggcgtggatatcagccatgtattcagtgctaaagacattgcccgtcgccgtcctgactctctgcttcatattgcacccggttttggtcctctttctgcattgaaagtccttgatgacgaaaacagaaactatggttacctgatcgaacgtggacaaaaattcgccggtatcgtttccgtaaattcattggaaaaagcattacgggaaaaaaaacctatcgaacacgccatattggcggaaccaacctccgttgccgcagatatgcccctcaatgagctgattgctgttgtagcacaatcaccttgtgcagttccggtggttggaaataatgacaaatatatcggcgttatttccaaagggatgctattgcaggcattagataaggagacaccaaatgagtaa

SEQ ID NO: 7589 - DNA, 1086 bp, Photorhabdus luminescens
atgagtaatcaaaacgaacatcaaactcagcctgtacagaattcagaggataccccgtccatcgctgccgataataccgacccctggagcagtggaaccagtgctgacaatgcaacgggttctgactggctggatgcccccgcaactgcggtacagcctgaacattttaatatcatggacccattccagcacccacttatccctttagactcatgggtaacccaggctattgattggattgtgctaaattttcgtcctgcatttcagggaatccgcgtccccattgattttgttctcagtggctttgaacaatgtctgacgtcaatacctgctcccattgccatcctattttttgccctgattgcctggcagttatcaggcattggtatgggtattactgctctaatttctctggtaattattggtgaaattggtgcgtggcacgaatcgatggtcactttatcactggctctgacatcgctattgttctgcattatcgttgggttaccactcggtatatggctggcacacagcaagagagccgcgaaaattatccaacctctgcttgatgccatgcaaaccacaccagcattcgtctatctggttccgattgtcatgctgtttggcatcggtaacgtgcctggagttatcgtcaccattatctttgctctacccccaattgtccgtctgacaattttaggcatcaaacaggttccagcagatctgatagaagcagccgaatctttcggcgccagccctcgtcagatgctgtttaaagttcaattaccactggctatgccaaccattatggccggtgtcaaccaaaccctgatgctggccctatcaatggtcgttattgcatcaatgattgccgttggtggtttaggccaaatggttttgcgaggtattgggcgtctcgatatggggcttgctacagtaggtggggtcgggattgttattcttgcgattctccttgaccgcctaacacagtcttttggctacagcaaccgggctaaaggcgtaaatcgctggtatgccactggcccaattggattagttacccgtttatttagccaaaaagcataa

SEQ ID NO: 7590 - DNA, 999 bp, Photorhabdus luminescens
atgcgcaaaatagttatctgggctatatccctgtcatcactgataagttctcaattattcgctgtcgaattaccgggtaaaggtatcagtgtacaacccatacaaagcacccttagcgaagaaacattccagacgctgatcgtcagtaaagcattggaaaaacttggttatgatatcaaacccatcaaagaagtggactacaacgtcgcctattcctctattgcttctggtgacgcaacctttatggccgtaagttgggaaccactgcacaacacccaatatcaggcagcaggtggtaatgccaaattttaccgtgttggtaactacgtagaaaatgcagcacaaggctacttgatcgataaaaaaacagcggaaaaatacaacattactaatattgctcaattaaaagatccgaaaatagccaaattatttgataccaacggtaacggcaaagctgatttaactggctgtaatcccggttggggctgtgaaatcgccattaatcatcaccttaaagcctatggtttaaacaatagcgttgaacacaatcaaggtaactatgcagccatgatggcagatactattacccgctataaagaaggcaaacccatcttatattacacatggacgccttattgggttagtgacgtgctgaaaccaggtaaagatgttgtctggctgcaagttcctttctccgctatgcctaatgatgagaaaatagagacgaaattaccaaatggcgctaattatggttttccaccaagtattatgcatattgctgccaataaaaaatgggcagaagacaacccaaccgccgctaagttattttctatcatgagaatgccccttgcggatatcaatgcccaaaacttgcggatgcataatggtgaggcatcaccagcgaatattgaacgtcacgccaacggttggattaaggctcatcagaaattatttgatagttgggttaaaactgctgttgaagccgccggaaaaaattaa

SEQ ID NO: 7591 - DNA, 1191 bp, Photorhabdus luminescens
atggaagaaaatatttcccgtacgccattaagcccagcgttgattgcactaatcgccattgccacaggtctggttgtcgccagcaactattatgcacagccgctactcgatactattgcgttacaatttaatctgaccgtcaacgaagccgggtttattgtaaccacagctcaattgagctatgccgttggcctaacattccttgtgccattaggtgatatgttcgaacgacgcagtttaattgtctcaatgacaatattagccactattggattactgattaccgccacgtcacagaacatctggcaaatgttactgggaacggcaatgacgggcttattttcggtggtcgctcaaatactggtcccgctggccgcaacacttgctcttccccatcaacgaggaaaagctgtcggtacaattatgagcggtttactgcttggaatattactagcaagaaccatctcaggaacaatggcaactcttggtggctggcgaactgttttttgggttgccagtgtcttattggtgattctttctctgacgttgtggcgctacctgccccgttacaaacaagtaaccaatctcagttatttccaattacttggctctattgtaaaccttatcactacaagcccgcttctaagagtacgcgccatactgggtgcactgacatttgccaacttcagcctgctatggacatcaatggcattcctgctttcagcacctccttttaactattctgaaggagtcatcggcttatttggattagtcggtgctgccggtgcattgatggcaacccaaaccgggcgactcgttgataaaggaaaaggccctctgaccaccagcatttctctggtgctattacttctttcatggataccgatcggtttagtcaaagaatcactaattggctttataattggtgtttttctccttgatattgcgattcaaggagttcacgttacaaatcaaagtacaatataccgcatcatgccagaagccagaaaccgactcaccgccgcttacatgactagctattttatcggtggagctcttggctctctggtttcaggctatgcttacaaacactcaggttggtatggcgttgccaccgcgggtatagctatctgtataatcagcctaatcgtgtggtttttaggcaaaaagtacgaaccaaagacgttgtaa

SEQ ID NO: 7592 - DNA, 759 bp, Photorhabdus luminescens
atgcctgtttctgatacatcatcccccttaacgagtaaaaaatcttcttttactgaaggaataatagatagtttacccattgttatcggttatattcccgtcgcctttgcttttggtctcaatgccgtcaaacttggcttcaacccaatggaagccattttcttttcatgcatcatctacgccggtgcaagccagttcgtcatcacagctttactgagtgcggggacatcattatggatttctgccctaacaattatggcaatggatgtccgccatattctttatggtccatctttaaggcaccgtatcaaagataagctaacggagaaaaaaaccgttatctgggctttcggcctgacagatgaagtttttgccgccgcgactgcaaaactcattaaaaaccaccggagctggagtgaaaactggatggttgctattgcaatctgttcttggctggcctggggcgcaggtaccgcagccggtgcatttcttggtaacggttatttggaatcctatcccgctatagaagctgccatgattttcatgttaccagcactatttctcagttttcttcttgcttcttgtagaaaacaaaatagttattgtgttgcaaccgcactaaccggagcacttttagggattacatttttctcaattccagttgctattctggcaggtattgtcggtggttgtatcgcggcactgttacaaccgcaaaacaattgcaatgactcttcagaacaaaaggaaacaccatga

SEQ ID NO: 7593 - DNA, 339 bp, Photorhabdus luminescens
atgattgatagcaagattttgctgattggactatttgttgggttagctaacttttcatttcgctatctgccactacgatttgggaaagcacgccaatctgccggcagaaaagctggaaaaacaagcattatccttgacagtattggtattgcatccatttgttctttactcatcgtatcaggtgtacctgatgtgatgagagaaagtcaaaaactacttcctaccctcataggttgtctgaccatctgtttagtcttttacaaaacaaagcaaattatactcgcaacactatttggcgcactgctttttggactaacattcaaaatatttatgaattag

SEQ ID NO: 7594 - DNA, 528 bp, Photorhabdus luminescens
atggaaagttcgtttacgcctaccgaagaattactgaatattcgtgcagcacagcaagccaaattaaataaagatatcccttatcaagagatcctgttgactaggttatcaatgcacgtccaaagtaaattgcttgaaaaccgtaacaatatgctgaaagctcaaggtatcaatgaaactttgttcatggccctgatgatccttgatactaaagaaagccacagcatccaaccatcagaattaagtgccgcattaggttcttcccgtactaacgccacgcgtattgctgatgaattagaaaagcaggagtggattgagagaaaggaaagtcataacgatcgccgttgccttcatcttcatctgacagaacaaggtacaaaatttttaaatagtttgcttccacctcaacatgagtgcctgagaagactttggtcatgtcttgaccaggaggaacaaaaacagttagaaaagttaatgagaaaattactggtcagacttgatacaatgggcgattgtatcaaaaaatag

SEQ ID NO: 7595 - DNA, 1185 bp, Photorhabdus luminescens
atgagcgaaaatgaggcaatagaagtacaagcggcacaagatccaaccagtagtaaaaaaaggcaacgcagtcgtgccttagtgctactaacccttatctttaccctgctcggtgttgcctactttttctattggtttctcattttacgccaccatcaagaaacagataacgcctacgttacaggtaatcaagttcagatcatgtcacaagttgctggcagcgtaattacagttaactttgataatactgactttgtgaaaagcggcagtatattggtgcaactcgatccccgtgatgcagaattagcattagaaaaagcaaaaacaacattagccaacagcgttcgccagactcatcaacagatagttaacagcaaacaatatcaggctaacatcgctctacgcagatccgaattaactaaagttcaaaatgatcttagccgtcgtgaaatacttagcgttcaaaaagtcattggtaaagaagagttacaacatgcacaggaagctgtcgccagtgcccgagctgctctagatattgcaattgaacaatacaacgctaatcaagcaattgtcttggatacacccctagagaaacaacctgccattgaacaagctgcaacggaagtccgtaatgcctggctggcattacaacgcacgaaaatagtcagcccaatcgatggttatgtctcacgccgtagtgtacaagttggtgcacaaatcaataaaaatactccactgatggcgatagtttcggcaaacgatatgtggatcgaagctaacttcaaggagacacaaatttctggtatgcgtattggtcaaccagtggaaatcaccagcgatttctatggtggaagcaaagtatttagcggcaaaatcactggccttgatatgggtaccggcagcgccttctctttattacctgctcagaacgccagtggtaattggattaaggttgtacaacgtttacccgtccgtattgagcttaatcctggacaactagaaaaatacccattacgcatcggtctctcgactaaagtcagagtagatactacgagccctgatgggcccgttctgtctgataaaacacgcactaaatcagcttatcacaccactgctctgacaatagatatgtcgcctgccaataaaatagttaacaacattactaatagtaatgctggaaaataa

SEQ ID NO: 7596 - DNA, 1542 bp, Photorhabdus luminescens
gtgatgagacagccgcttacaggtgccaaacttgcatggatgaccatagcgctatccttagcaacgttcatgcaagtgttagattctaccattgctaacgtagcgatacccacgatttcaggtaacttaggatcatcaagttctcaagggatctgggtaattacctctttcggggttgccaatgcgatttctatcccaattactggatggctggcgaaacgcatcggcgaggttaagttattcatctggtcaaccgcgctattttccatcgcttcttggttatgcggtatttccaacagtcttggtatgctaatcttcttccgagttattcaaggattagttgcaggtcctcttattcccctttcacaaagtctactcctgaacaattatccaccagccaaaggaaatatggcgctggcattatggtcaatcacgattatcatcgcgccaattttcggccctattctgggtggctacatcagtgataactaccattggggatggattttctttatcaacgttcctgttggtatagcgattattttgattgctatgcaaacgctgaaagggcgtgaaacccagacagagatcaagcctatcgacacaataggactcatgttattagtggtcggcgttggttgtttacaaatcatgctagatcaggggaaagagctggactggtttaattctacagaaattatcgtcttgacagttattgcaatcatctcattaacatttctggtggtatgggaactgaccgataataacccgattattgacctatcactgttcaaagagcgcaattttaccattggttgcttctgtttgagcttagcttatatgctctatttcggcaccattgtgttattacctcagttattacaggaagtgttcggttatacagcaacctggtcaggtcttgcatcagcaccagtaggattgttgccactaataatttcgccactgattggtaaatttggcaataaagcagatatgcgctacatagtgacattcagttttgttgtctatgccatctgttattactggcgtgcatatacattcgaaccaggcatggattttgccgcggtcgcatggcctcagtttatccaagggtttgctattgcctgtttctttatgccactcacaaccattaccctttccggcttgccagcagagcgggtggcatctgcatccagtttatcgaattttattcgaacactggcgggttcaataggaacatcactaacgacaaccatgtggacccaacgcgagtcaatgcatcattcccattttactgaacatatcaatccttatagtcccgatactcaacggatctatcaacaattatcggaattaggcatgaataaccagcaaatttctgcttatctagcaaaagaagttacccatcaagggctcataatctcagcgaatgaaattttttggctttccgccggagtattcctgattttgattatgctcgtctggctagccaggccaccatttacccaaggaagtaaagaaggcatgagcgcagcccactaa

SEQ ID NO: 7597 - DNA, 1017 bp, Photorhabdus luminescens
atgaacgattcatacagtggtaaaaatggcaaagtcaaagtgatgtatgtccgcagtgagggcggtaatgacagccgtaataataacaaacgtccatctggtaagggacgtgatcagggtcagcgtcgtcgggacaatgagcgaacatcccgttctccgcgtgccaatgagcgtgaaagatcgccttggaaaacagtgtcacgccctgagagtgattctgtaacgccaatgcatggtggtatcagtgggaaaagccagattgatcctgaacagctccgtcgtcagcgaatggaagaaactcggatttatggcgaaaatgcttgtcaggcgatgtttaaaaaccgttctgaagcgatagttcgtgcatggttcgttgagtcagtgacaccacgtttccgcaatgcgctgaaatggatggctgctaatcgtaaagcctatcatgttgtggatgaggctgaactgacaaaagtgtcaggtactgaacatcatggtggtgtttgttttctgattaagaaacgcaacggtttggatgcagagacctacttgaaagatgctccagtaaaagattgtgttttggctcttgaagatgtgggtaatcctcataaccttggcgggattatgcgaagttgtgcacatttcggtgtgcaaggggtgattttgcaggatgtggccttgctggagtcgggcgcggctattcgtacagcagaaggtggtgctgagcatattaaaggtattgatgctgatagcttggtcactacgctgaataactttcgtaaagcgggttacaccattgttacgacatccagccataaaggtagtaccgctttagctaaagctgaattaccggaaaaaatggttctggtacttggtcaagaacgcgatggtttgagtgacagtgcttgggaacatggtgatatgagtttgttcgtcggtgggtcgggtttggttgaaagcctgaacgtttctgttgcaacgggcattatgctggctgaatggtggcgacagaataaagcttga

SEQ ID NO: 7598 - DNA, 243 bp, Photorhabdus luminescens
ctgctttcggcgagacatgccgtacttgctatggagggcacagtctggctacctgttgaaacagcccccaccgaagatattcaagctacagcttggtactattttgcaacaaactggcaatttaattacttctcagcaactgcatccgatagcgtaaatcacagcaacaatttgcgaaatccgctacagttatcgactaaccccacgaataaggagcctcctgatgagccagcgcggacttga

SEQ ID NO: 7599 - DNA, 2643 bp, Photorhabdus luminescens
atgagccagcgcggacttgaagctttattacgccctaaatccattgcggtaattggtgcctcagaaaaaccagaacgagcgggttcagttatgatgcgtaacttgcttgcaggaggctttgccggaccaatactaccgattacacccaatagccgttctgttcaaggggttttagcttacccttcaatagataaattaccgattacaccagacttggctgttatttgtactcatcaccgccgtaatttgcaatgtttagaacaactggggcagttgggttgcaaaacggtgattatcctttcttcaccaacgtcccaattcgctgaactaaagcagtgctgccagcactatagtatccgactacttgggccaaacagtttaggtgtattagccccctggcaagggctgaatgccagcttttctccggttccaatactcaaagggaaattggcctttatttctcaatcggcggcagtctcaaatacgattcttgattgggcaaaacaccggggagtcggattttcctactttatagcattaggtgacagtgtagatatcgatatcgatcatctgcttgattttctggctcgtgacagtaaaaccagcgctatcctgctctatttagagcatattcatgatgcccgtcgctttctttcagcatctagaagtgcttcccgcaataaacctattttggtggttaaaagcggccgtactaagcgagcacagaaattacttggtgaacaacaaaatttggatgcggcttatgatgcagcaattcagcgagcagggttattacgcgtacaagatacacatgaaatgttttctgctgtagaaacgttaagccatatgtcacctttacggggagaacggctatttatcgttagcaatggtgcttctccagccgcaatggcgctggatgcgttattccgccgtaacggcaagctcgcaatattaggtgaagagacaacgaaagcattaaaaatacaactcccagaaactatctctctgcataacccgctagatttaaaagatgactccacggtggaacgttatatcgctgcgttaaaaccgttactagatagccacgaccatgatgctctgttacttattcactctcctagcgcaattgctccctgtattcaaactgcaaccaaagtcattgaaacaatccgtaaacacccacggggaaaatggctaactatctttaccaattggtgcggagaatactcttcacaagaagcccgccgtctgttcagtgaagcaggtattccaacttatcgcacccctgaaggcgcgattactgctttcatgcacatggttgaatatcgccgcaatcagaaacaattaacagaaacccccgcactaccagcaaacatcacagctaacacagcacgtgcccatcagtgcatacaacaggctctggaacagggaaattctcggctggatacccatgaagttcaacctattctggaagcttatggtctcaatacattgccaacatggattgctcataacagtgatgaagcagtcaatattgcccaacagatcggttatcctgttgcgttgaaattacgctcgccagatatcccgcataaatcagaagttcagggagtcatgctctatttgcgaaatgcaaatgaggtcaaggcttctgctcaagcgattatcgaacgcgtcaatcagaatttcccacacgcaagaattcaaggattgttagttcaaagcatggcaaaccgcgctggtgcacaagagctacgaattgcagtcgagcaagatgaagtatttggcccactgattatgttaggtgaaggcggtattgaatggtcacaggaaacacaagcagccgttgcgctgccacctcttaatatggcgttagcgcgatatctggttattcaggcgattaaaagtagaaaaattaagctcaggggagctcctcaatcattagacgtactagcactcagccgactgttagttcaagtatcgaatctgttacttgattgcccgcaaattgtacgactggatattcatccattactggcttctggcgatgaattcacattattagatgtttcaatggaattatcttcgatagacggtgatccacgaactagattagctatccgtccatatccaagcgaactagaagaatctataaaactcaaaggaggtgcagaatgcctgctacgtccgattctgccagaagatgaaccgctgctgaaagatttcatcggccaggttacgaaagaagatctctattaccgctactttagtgaaatcagcgaattcacacacgacgatctggccaatatgacgcagattgattacgaccgtgaaatggcatttgttgccgtacgacatcctaaaacgaccccagaaattatcggggtgactcgtgccatagctgacccagataatgtcgaagcagaattcgctgtgctagtgcgttctgacttaaaagggatcacccttggatatcaacttatgataaaactgattaactatacacgggaacatggcataagccgcctcaacgctatcaccatgccagaaaaccgtacgatgataaaactggctaaaaaactgggatttaccatagatgttcaatttgaggatagcattgtaaacttatccctcgaactctaa

SEQ ID NO: 7600 - DNA, 1359 bp, Photorhabdus luminescens
gtgatgttgtctaaattcaaacaagctaaacatcaacaacaccttgcacaactgcctaagctacctcagtcagttgctgatgttaaaacactttatcaacctgaagtgttccgcagcaccctgctggaaaaaattgctaacgctgaaaaacatatttatatcatctccctctatctggaaaatgatgacgcagggaaagatatccttaatgcactttatacagctaaacaacaacgcccagacttggacattaaagtgctcgttgactggcatcgagcacaacgtggacgaattggtgctgctgcaatagtaacgaatgccgattggtattgttctatggcagaagcttatcctgatgtgaaaattccagtactaggtgtacctgtaaatacccgcgaagcactgggtgttttacatttaaaaggttttatctttgacgatactgtagtttatagcggagcaagcattaatgatgtttatctccaccaacatgataaatatcgctatgatcgctaccacttgcttcacaatgcagaacttgcagaagcaatgaaacactttattgataatcacattatcgctacaggagccgtgcagaaactggattgtaaaaaccgtcctcgtattcctgaaattaaaaatttgatccgtcaattacgtttttctctgcggcacactacctataaaataaacaatcaggcaacgaatgatgaactatctgtcactccacttgccggtctgggaaagaaaaatctactaaataaaaccattagtcatctgatcgccagcacagaacaaaagctgattatttgcactccgtattttaatcttccagccatcattgtccggcggatcgttcatctacttcgtaaaggtaaacatgtggaaattattgttggtgataaaactgccaacgatttttatattccaccggaagaaccctttaaaattatcggtgcattaccctatttatatgaaattaatctgcgccgtttcatcagtagactacagcgttatgttgacaacaatcaactgactatcaggttatggaaagatggtgataatagctaccacctaaaaggtgtgtgggtggacaatcaatggcaattgattacaggaaataatcttaatcctcgtgcctggggactggatttagaaaatgccattcttattcacgatcctcataaagaaatgcaggagcaacgtacaaaagaactgcactgtatccgtactcatactacggttgtcagtgattatcaggaattggacagcatccagctttacccagtcaaagtacgtaaacttatccgccgtttacgtcgcatccgggtagacaaactgattagtcgtattctgtaa

SEQ ID NO: 7601 - DNA, 156 bp, Photorhabdus luminescens
gtggtacgcgagctgggtttagaacgtcgtgagacagttcggtccctatctgccgtgggcgcaggaagattgaaaggggctgctcctagtacgagaggaccggagtggacgcaccgctggtgtacgggttgtcatgccaatggcatagcccggtag

SEQ ID NO: 7602 - DNA, 33 bp, Photorhabdus luminescens
gtgtcactgccgcagcttcggtgcatggtttag

SEQ ID NO: 7603 - DNA, 2574 bp, Photorhabdus luminescens
atgcgtctggatcgtcttactaataaattccagcttgctctcgctgacgcccagtcctttgcacttgggcatgataatcagttcatcgaaccaattcacttaatgagttcactgttaaaacaagagggtggctctattcgcccattattaacgtcaattggaatcgatgcgggccgtttcagcaatcagcttgagctggctttagaacgcttgccgcgggtacagggtattggtggtgatgtacaaccatccaatgacttagttcgtcatttaaatctgtgtgacaaactggcacaaaaagccggggataattttatctcctctgaattatttgttctggcagcattggaagaacgtggcacattaagtgacatattgaaagctgttggcgcaacaaaagaaaaaatcactaaggcaatagaacaaatgcgtggtggtgaaaaagttgatgatcagggagcggaagatcaacgccaagccctgaaaaaatacactattgatctcactgaacgtgctgaacaaggcaaacttgatccggtgattggccgtgatgaagaaattcgccgcaccattcaggtattacaacgccgtaccaaaaataacccggttttaattggtgaacccggggttggtaaaactgccattgtggaagggcttgctcaacgaatcattaatggtgaagttcctgaggggttgaaaaataagcgagtcctttccttggatatgggcgcgctgttagcaggggctaaatatcgtggtgaattcgaagagcgtttgaaaggtgtgttgaatgaccttgctaaacaggaaggcaatgtcattctgtttattgacgaattgcatactatggttggtgccggtaaggctgatggggcaatggatgctggtaacatgttaaaacccgccttggcccgtggtgaacttcactgtgttggtgcaacaacactggatgaatatcgtcaatatattgaaaaagatgcagcgctggaacgccgtttccaaaaagtctatgttgcagaaccttccgtagaggacactatcgctattttgcgcggtctgaaagagcgttatgagttacatcatcatgtacaaattaccgaccctgcaattgtcgcggcagcaacattatctcatcgttatatctcggaccgtatgttgccggataaagctatcgacttgatcgatgaagcgggtgccagtttacgtatgcaaatggattcaaaaccggaagcgctggaccgtttggaacgccgggttatccaattgaagttggaacagcaggcgctgaaaaaagagtctgatgatgccagtaaaaaacggcttgaaatgcttaatgaagagctgctcgtaaaagaacgcgaatactctgaactagaagaagagtggaaagctgaaaaagcagcacttacgggtactcagcacataaaagcggaattggaaaatgcccgtatcagtttagaacaggcacgccgcagtggtgatttagcgaagatgtctgaaattcagtatggaaaaatacctggattggaaaaacaacttgccgcagccacacaagctgaaagtaagcatatgaaactgcttcgtaacaaagttaccgatgcggaaattgcagacattcttgctcgttggacgggtattcctgttgccagaatgcttgagagtgaaaaagataaactgttgcgcatggagcaagagctgcataaacgtgtcattggtcaggatgaggcagtcaatgcaatatctaatgcgattcgccgtagccgtgctggattggctgatccaaaccggccgattggctcattcctgttccttggtccaaccggtgttggtaaaactgagttgtgtaaggcgttagcgaatttcctgtttgacagcgatgatgcaatggtgcgtatcgatatgtctgaatttatggaaaaacatgccgtatcacggttggtaggagcaccgccgggatatgttggttatgaagaaggtggttatctaacagaagcggttcgtcgtcgaccttattccgttattttgcttgatgaagtggaaaaagcgcactcggatgtattcaatatcttattacaggtgctggatgatggtcgattgactgatgggcaaggtcgtactgtcgatttccgtaacacggttgtcatcatgacttctaatctcgggtcggacatgatccaagagcgttttggtagtctaaattatgatgaaatgaaagatatagtgatgggaattgttagccataatttcagacctgaatttattaaccgtattgatgaagctgttgtattccatccattagggcgtcggcatttgtcagcgattgcagatatccaattgcaacgtttatacaagcgactggaagaacgtggttatcaggttacgattactcagcaagcgttggaaatattggcagaagccgggttcgatcctgtttacggagcacggccattgaagcgagctatccagcaggaaatcgaaaacccactagctcaaaagatactttccggccaactattgccaggaaaaccagttactctggatgtggaaaatagccatatcgtagcaaagcaataa

SEQ ID NO: 7604 - DNA, 732 bp, Photorhabdus luminescens
atgacttcgcttatttttccaaactggccacaaccgacgacaataaaagcctgtagttctacccgcttagggggaataagtttatcaccttacgatagcctgaatctgggtaagcatgtgggtgataaaccggatgttgttgaacaaaacaggcatattctagcgaaaatggcggaactgcctcagcaacccgtctggctagaacaagttcatggtacgcgtgttgtgagactcaatggtcagccactggaagataatagagctgatgctgtttatacccatattcctgggcaggtttgtgctgtgatgacagcagattgcctgcctgtactattttgcagttcggctggtgatgaggttgcggctgcccatgcggggtggcgaggtttatgcgccggcgtactggaaaacacgattgctcaatttaacgctaaacctcatcagatccaagcttggttagggccggcaattggtgcggaaaaatttgaagtgggcaatgaagttttgcacgcgttcactatccagcatgctgatttgagtcgagcttttataccttttggcgaaaagtatttagcggatatctatttgttggcaaagttaaaattgcaatctgttggtgtgaaagcgatttttggcggggatgaatgtactgtcagtaataaagagaaatttttctcttatcgtcgtgatgggatcaccggacgtatggcaactttaatctggctgatataa

SEQ ID NO: 7605 - DNA, 978 bp, Photorhabdus luminescens
atggcacaacaaatacgacttaatacaacagtcgccgaatctcagctcggtcaacgtttagatcaggctttggctgaattgttccctgattattcaagatcacgcataaaagattggatcttggatgacagagttcaggttaatggcaaattaatcaataagccaaaagaaaaagtgttgggaggtgaagaaattgccattgatgccatcattgaagaagatgcgcgttgggaacctcagaatattgcgttaaatattgtctatgaagatgatgacattctagtcataaataaatcgcgtgatttggttgtccatccgggagcaggaaacccagatggtacggtattgaatgcactgttatatcattatcctgaaatcgccgatgtccctcgggcaggcattgttcaccgtcttgataaagatacgacagggctgatggttattgctaaaacggttcccgctcaaacgcgtttagtcgaatcactccaactacgcgaaattacccgtgaatatgaagcggtggcgacaggtcgtatgacagcgggtggaatggttgaagagccaatttctcgtcatccaacaaaacgaacacatatggcagtgcatccaatgggcaaaccggctattacccattatcgggtaatggaacattttagggcacatactcgtctgcggctgagactggaaaccggtagaacgcaccagatacgtgttcacatggcccatattagtcacccgttggtgggcgatcctttatatggtggtcgtcctcgtcctttgaaaggggcttctgatgagtttcgcgaggtaatgcgtaactttgatcgtcaggcattgcacgccacgatgctgcgtctttatcatccgataaccggcattgaaatggaatggcatgcggaattacctgacgatatggtgatgctgattaaggcattaaaagcagatgcagaagcatttaaagacgaaatggattggtaa

SEQ ID NO: 7606 - DNA, 735 bp, Photorhabdus luminescens
gtgatgatacgcataaaatatctggtggcggcagccacattgagcctggcactttccgggtgcgctggtaataagaatgctgtccccgacagcccacctgcggaaatttactctaagggtcaggaaaagctgcaaaaaggtagctatcccgatgcgatcaagcaattggaaaccctcgataatcgctatccatttggcccctattcgcagcaagtacaactcgatctgatttatgcttattataaatcctctgacctgccaatggctctcgcttctattgaccgtttcatacgcctgaatccaactcaccccaacatcgattatgttctgtatatgcgtggattaacttcacaagcattggataacagtccattgcaaagtttcttcggcattgaccactcagatcgtgatcctgaacacgccagggtagcattcaaggattttagtcaattagtacgctatcatcctaacagcctgtatactgccgatgctattaagcgtttaatgtttatcaaagagcgcctggcaaaatatgaactttctgttgtggaatattataacaaacgtggtgcctatgtcgcggtggtaaatcgaattgaacaaatgttacgtgattaccctgatacacagtcaactctcgaagcgctgccttacatgaaaagcgcttatacacatttaggtttaatcgctcaggcagataaagtagcaaaactcattgctgctaatccggtataa

SEQ ID NO: 7607 - DNA, 363 bp, Photorhabdus luminescens
atgatagtgaatattaccagcaaacaaatggagattaccccggcaattcgcaaccacgtcgaaaaacggttaaacaaactaaataaatggcgagtaaatctaataaatcctcatattattctatcaaaagggcctcaaatttttagggctgatgcaaccataagtacaccaaatggtatgttagttgccggtgcaaagcatgaagatatgtatattgctatcaatgaattattaacaaaactggagcgccaattgaataaagtacagcataagggagaagcacgccgtactgacaacagtgttaaagaatcaaaccttaatctagaaacaccactagaaacagaaccagaaatatcacaataa

SEQ ID NO: 7608 - DNA, 1158 bp, Photorhabdus luminescens
atggatcaaaataatttgctgaaaatacgggaaaaagtcagcgaacttgatttaaagttactgattttattagcagagcgtcgccaattagcttttgatattgcccaaactaagttacaggataatcgccctatcagagacaaggatcgcgaacgagaactactagatgttctgattaaaaaaggaaaaagctacgggcttgatggcttttatatttctcgtctctttcagatgatcattgaagattccgtcctcactcaacaagcattattgcagcaacacctaaatcaaacaccccaagattcagcacgtattgcattcctcggtcctagaggttcctactctcatatcgcagcccgccaatatgccgcccgccatttcaatcaattaattgaatgtagctgccataagttccaggatatcttctccttggttgaaacaggccaagcggattacggaatgttacccattgaaaataccagctcgggttccatcaatgatgtttatgacttattgcaacataccaatttgtcaattgtgggagaaataaccattcctattaaccattgcctactcgttgcaacagacacaacgctatcggagatcaaaacggtttacagtcaccctcaaccattccaacaatgtagccaatatattaatcaattcccgcattggaaaattaaatattgcgaaagcactgccgcagcgatgcaaaaagtcgccgaacagaattcaccagaaattgcagcgttagggagtgaagcgggcggtgcactttatcagttacaggttctggaacagaatctcgcaaatcaatcacataatattactcgttttattattgttgcccgtcagcctatcgaagttgcagaacaagtaccggccaaaacgacatttattatggcaaccggacagcaggcaggagcactggtagatgcgctaatggtgctgaaaaaacataatattattatgagtaaactggaatcccgcccgatcaacggaaatccgtgggaagagatgttttatattgatgtccaagctaatattcgttcaattaatatgcaacacgttctgaaagcattggcgaaaatcactcattcattaaaggtattgggatgttaccctacagaaagcgtggtaccggttaacccctcctga

SEQ ID NO: 7609 - DNA, 447 bp, Photorhabdus luminescens
atgacaacattaaccatagaacaagaatatgagattgtatcaaaacatttatcaagaatgtccgtgttaagaagatttgctcaaacaaaagatgttgaatggttagaagatgtttacaaagcattagagatagtcgttcaagacagcaaagaaaccttcagattaatgagtttagaagcggaacaaaaagaacaaaaacgtttagaaatattaaggctgattgaagaaaccggccttaatcttaaaaccattaacatacctattaccctctctgattttaaacctaaaaaatcaaatgcaggaaaaggaaagacgagaaaacctaagtatcagtttaacgagaatggagaagttaaatactggtcaggaaacggaaaaaaaccatcaggtttacaaaaactactcaatgaaggtcattcattaaatgaatttttaattaaaaaataa

SEQ ID NO: 7610 - DNA, 1122 bp, Photorhabdus luminescens
atggcggctgaattatctcaattgcgggataagattgatgaagtggataaagctttgctgggcttgctggcaaagcgtctggaattggttgcagagattggtgaggtaaaaagtcagaatgggctgtcaatttatgcacctgacagagaaatggcgatgcttgcttcacgtcggcaggaggccgaagagtttggtgttccaccggatttaattgaggatattctgcgccgcattatgcgggagtcttataccagtgagaataacaaagggtttaaaacgctttgccctcaattggggccgatagtcattgttggtggcttgggcaaaatggggaaactatttggccgtttgttaactttgtctggttatgaagtcagaaatctggaaccacaagattggcctaacgcggaacaaattctggcgggagtggggatggtgattatcagtgtacctattcatttgacagaagaagttattcgccgtttaccgccattacctgaccattgcattttggtggacttagcgtccgttaaacagcagccattacaggctatgcttgatgtgcataaaggtccagtgttgggattacatcctatgtttgggccggatgtcggtagtttggtaaaacaagttgttgtttactgtgacggacgtcaagaggaagcttatcaatggtttttagaacagttgttaatttggggggcttgcttgcatcaaatgagccctgaacagcatgataaaaacatgagctttattcaggcgttgcgccatttcacgacatttgcttatgggcaacatctcgcacaggaaggggcggatttacaacaactgttatcaatatcttcacctatttaccgtttggaattgatcatggtcgggcgcttatttgcgcaagatccccagctctacgcggatattattatgtcatcaccagagaatattgatcttatacgccgttatcatcaaagttttggacaagcgttagagatattggaaagccaggacaaacgggcttttgtcagcagttttgaagatgttagtgaatggtttggtgattatgcacctcgttttatgagggaaagcagggtattgcttcaacaagcgaatgatagtcgccaataa

SEQ ID NO: 7611 - DNA, 1095 bp, Photorhabdus luminescens
atgttcatgcaaagagatgcacttaataacgttcacatcagtggtgagcaaattcttatcaccccaaaagaattaaagcaacaatacccactgagtgatgatgatctgcatgttattgcaaatgcacgtaaaacaattgcggatattattcagcgccgtgatccccgtttgctggtagtgtgtggtccttgctctattcatgacgtggatgcggcgctggattatgctcaccgtttggccgctctttctgctgaattgagtgatagcttgtacattgtcatgcgtgtctattttgaaaagcctcgaacaacagtgggttggaaaggtcttattaatgatccatacatggatggttcatttgatgtggaagctggcctgcatattgcccgccgcttactacttagtttagtgaaaatgggattgcctcttgcaacagaagctttagatccgaatagcccacaatatttgggggatttattcagttggtctgcaattggtgcgagaaccacagaatcccagacacaccgggaaatggcttcaggtttatctatgccggttggtttcaaaaatgggactgacggtagcttgaacacggcaattaatgcgatgtgtgcagccgctatgccacatcgttttgtgggaataaaccagtcggggcaggtgtgtttattacaaacgcaaggaaacccgaatggacatattatcttgcgtggtggtaagacccctaattacagtgttcaacatgtaatggaatgtgaacagcaaatgatgcaggctggattattgccatccttgatgattgattgtagtcatggtaactctaataaggattttcgtcgccaaagtttggttgtagattctgttgcggatcagatcatttcaggtaatcaatctattactggcattatgttggagagccatattaatgaaggtaaccaatcttctgagcaaccgcgtagtgaaatgaaatatggtgtatcagtcactgacgcgtgtattagttggcagacgacagaagcagttctaagaaaattacatcagcaaattagcatgcaattgtcgcaaagaatggcagtattgaaaaaagcgggataa

SEQ ID NO: 7612 - DNA, 807 bp, Photorhabdus luminescens
ttgaaaacttttcaaatacataacaaaaaaatggcttaccgagatgaaggtgaaggtttcccgttattattgggacatagctatttgtttgattctactatgtgggcacctcagatcgaggcgttaagtaaacaataccgggtgattgctcctgatctctgggggcatggaaactcggaagagttaccggaacaacatagcactttggctgatttagctcgggattacctggcgttgatggatcaacttggcattgaagaattcgctatcattggcttatctgctggtggtatgtggggaattgagttggtcgatatggcaccggacagagttaaagcactggttttgatggatacctttgtcggattagaacctgaagtgacttatacaaaatacgttgccatgttggatgcgatagagcaggttggtgcaattcctcaatctattttgcaacagcagatagtgccagccttctttagccagcaaccggctcagcatttggttgatgaattaactcagcgtctggtcgccattcctgcggaaatattgcgcaatagtattgttccgttaggtagaataatatttgggcgtgaagatagaactcatttgttggaaaaattagatattccgtcacttgttattactggtgaacaagatacgcctcgcccgcctctggagggttatttgatggctgaaatattgcactgtgatcatattattatccaggatgcagggcatatttctacattggagcaaccctataaagttaatcaggaattaattgcttttttacagcaagctttgtaa

SEQ ID NO: 7613 - DNA, 354 bp, Photorhabdus luminescens
atgagcaacattattaaacaactagaacaagagcagatgaagcaagacgtaccttcattccgtccgggtgattccgtggaagttaaggtatgggtcgtagaaggtgctaagaaacgtctgcaggcattcgagggcgtggttatcgctatccgtaaccgcggtctgcactctgcattcactgttcgcaaagtttctaacggcgaaggtgttgagcgtgtattccagactcactccccagtcgtagacagcattaacgttaaacgtcgtggtgctgttcgtagagctaaattgtactatctgcgtgagcgttctggtaaagctgctcgtattaaagagcgtctgaacagtaaataa

SEQ ID NO: 7614 - DNA, 753 bp, Photorhabdus luminescens
atgtggattggggttattagcctgtttcctgaaatgttccgcgcaataaccgattatggggtaactggccgggcagtgaaaaatggcctgttaagtattgaatgctggaatccacgggattttacctatgaccggcatcgtaccgttgacgatcggccttatggcggtggtccaggcatgttgatgatggttcagcctttacgggaagccattcatgcagcaaaaactgcggcaggcgaaggtgcaaaagtgatttatctttcacctcaggggcgcaaactcaaccaacaaggggtttgtgagctggcaacaaatgaaaaactgattttgatttgtggccgctatgaagggatagatgagcgggtgatccaaaccgagattgacgaagagtggtctatcggtgattacgtgctcagcggtggtgaaatccctgcaatgacgatgattgactcagtttctcggttcattccgggcgttctggggcatcaggcatcagcggaggaggactcttttgctgatggattgctggattgtccgcactatactcgcccggaggtattagatggtatggaagttccacccgtattgctgtctggaaatcatgctgaaattaatcgctggcggatgaaacaatcgcttggccggacctggcttagaagacctgaacttctggaaaacctagctctgactgacgagcaaaggatattgctaacagagttccaacgggaacatctaactgaagcaactaattaa

SEQ ID NO: 7615 - DNA, 558 bp, Photorhabdus luminescens
gtggtaactatgagcaagcaaacctgtattgaacttcctgtaaacccaattgtattgggaaaactgggttcaacgtatggtattcgtggttggctcagagttttttcttccaccgaacatgccgaagacatttttgcgtatcaaccgtggtttattcaacgagcgggtcggtggcaacacatcgaactggaagcctggaaacaccacaatcaggatatgatcatcaaaattaaaggtattgatgatctggatgctgcgaattcactgactaattgcgaaattattgtagattcagaacaactgccagagctggatacgggtgattactactggaaagacttaataggctgccaggtaatcagcaccgcaggttataacttggggactgtcaatgacatgatggaaaccggttctaacgacgtaatggtagttaaagcaaacctgaaagatgcattcggtgtcaaggaacggctaattccgtttcttgatgggcaggttatcaagaaagtcgatctcgctactaaaactattgaagtagattgggatcctggtttttaa

SEQ ID NO: 7616 - DNA, 249 bp, Photorhabdus luminescens
atggtaacaattcgtttagctcgtggcggcgccaaaaagcgtccgttttaccaagtagtcgtgaccgatagccgcagcccgcgtgatggtcgctttatcgagcgtgttggcttcttcaaccctattgcaacagggaaagcagaagcattacgtttagatctggaccgtattgaacattggattggtctgggtgcaactgtgtctgatcgtgtttctacactgatcaaagacgccaaaaaagtagcttaa

SEQ ID NO: 7617 - DNA, 1362 bp, Photorhabdus luminescens
atgtttgataatttaaccgacagactatcgcgcacattgcgcaatatcagtggccgtgggcgactgaccgaagataatattaaagagacactgcgtgaagttcgcatggctttacttgaagctgacgtcgcattgcctgtagtgcgtgattttatttcatgtgttaaagagagcgcggtaggccacgaggttaataaaagcctgactcccggccaagagtttgtcaaaattgttcagaatgaactcgttaaggcgatgggtgaagttaacagtgaactgaatctttctactcagccgcctgctgtcgtattaatggcaggtctacaaggtgcaggtaaaacgaccagcgttgccaagctaggcagctttctgaaaggaaaacagaagaaaaaagttttggtggtatctgctgacgtctatcgtccagcggctatcaaacagcttgaaaccttggcgcaggcagttggtattgatttctacccttctgatgctcaggaaaaacccgttgatatcgtgactcaagcggtacagcacgccaaattgaaattctatgatgtgcttttggtggatacggcgggtcgtctgcatgttgacgaagctatgatggatgaaatcaagcaggttcataaagccatcaatccagtagaaaccctatttgttgttgatgcaatgacggggcaggatgcggctaataccgcgaaagctttcaatgaagcattgccactgacgggtgtcgtgttaacgaaagtcgatggtgatgcccgtggcggtgctgcgctatccatccgtcatattaccggtaagccgattaaatttctgggtgttggtgaaaaaacggatgcactggagccattccatccggatcgtattgcctctcgcatccttggaatgggtgatgttctctccctgattgaagagattgaaagtaaagtcgatcgcactcaggccgaaaaattggcttctaaattaaaaaaaggtgacggcttcgatttaaatgattttctagatcagctaaagcagatgcgtaacatggggggaatggccagcatgttaagcaaaatgccggggatgtctcaagtgccagatgcagtgaaatcccagatggatgataaaattctggtgaaaatggaagcgattatcaattccatgacgcgtaaagagcgacaaaaaccagaaataatcaaaggttctcgtaaacgtcgtattgccagtggttcgggcactcaggttcaggatgttaaccgcttgcttaaacaattcgatgaaatgcagcgcatgatgaaaaagatgaaaaaaggcggtctggcaaaaatgatgcgtggtatgaaaggcatgatgccacccggatttatgggccgttaa

SEQ ID NO: 7618 - DNA, 792 bp, Photorhabdus luminescens
atgccagtattttctataatttcttcattcgcttatttattcagcctggtactgattattcccggcttgctgcggaaaccgaaaggataccgcaggctggcactactttccgcgattgtcgctttaatttgccatgcgattgcacttaaacaccagatattccacgtcagcagcgggcaaaacctcactcttctaaacctaggttctattgtcagtttactgacttgtatcataatgacaattgttgcttctcacggccgtgcctggttcctgctacccattgtttacagtttttccatgataaatttggtcttagcgagtcttatgcccggtgaatttatcacccatctggagaccagctttgaattatctatccatattgggttggcacttcttggttatgcaactttacttatcgctgcattatatgcattacagcttgggtggttggatcatcagcttaaaaataaaaagctcacttttacgccagatatgcctcccttaatgttcattgaacgcaaaatgtttcatatcacccagcttggcgtaatattgctaacgctgacgctctgcaccggcatcctctatatggataatattttcagtagcgaaaacatccataaagcaattttgtctattatcgcatggtttgtttacattgttttactatggggccactaccatgatggatggcgcggtaaacgcgttatctggtttaatctgatcggcgcatttaccctgacactcgcctatttcggtaatcgattattacaggaaatcatggtttactag

SEQ ID NO: 7619 - DNA, 1293 bp, Photorhabdus luminescens
ttggagcatgtctcaacaagcacattactgattattttaatcatcatggtcattgtctcagcttatttctccgcttccgagacaggtatgatgacaatgaatcgttatcgcttacgtcatctggcaaagcaagggaatcactctgcccgcagagttgaagcattacttcgtcatcctgagcagctcatcagcctgattcttatcggtaacaatctggttaatattcttgcctcagcactcgcgactattattggtatgcgtctttatggcgatgccggagttgctatcgcaaccggtattctgacctttattgtgctgatattttctgaagttatgccaaaaacgatagccgccctctatcctgaaaaagtcgcttttccgagtagttttttgctccgcccgttacagaaaatcatgctgccgttagtctgggtgctaaataaaattactttattgttaatgcgttgccttggtatcaaacaacctactggctccagtcacgcaatgagtaaagatgaacttcgcactattgtgcatgaatcaaatgccaagctatcacagcaacatcaggatatgctgatttcaattttagatctggaaaaagtcacaatcggcgacattatggttccccgtaatgaaattgttggcattgatattaatgatgactggaaatccatcattcggcaattaactcattctcctcatggccggatcgtgctttaccgtgattcacttgatgatgccattggtatgcttcgtgtgcgtgaagcttaccgattgatgacagaaaaaaaagagttcaccaaaagaaacctgatcaaagcagcagataaaatctactatgtccccgtcagcacgccacttaatatccagttagtgaatttccaacgtaataaggagaaggccgggctcatcgttgatgaatatggtgatattcaaggtctggtcactgttgaagatatcctcgaagagattgtcggtgattttacaacatcaatgtctccttctctggcagaagaagtttcaccacaaagcgatgggactattttggttgacgggacagccaatatccgcgaattaaataaagccttcaactgggcattgcctgttgatggaccacgaacggttaatggtatggtgcttgaagagttgggagaaatacccgcacttaatgtacaagtgcaaatcggcaaatataattttgaagtactttcagtgaacgataatgtcattaaacaagttcgcgtcactcccatcagcctattttctgatcaaaaagcacaagtcatttaa

SEQ ID NO: 7620 - DNA, 516 bp, Photorhabdus luminescens
atgcctttactggatagttttactgttgaccatactcgaatgaatgcgccagccgtaagagttgctaagactatgaaaacgcctcatggcgacaccatcacagttttcgacttacgtttctgcatacccaataaacaggttatgcctgaaaagggtattcatacacttgaacatttgtttgctggttttatgcgcaatcacctcaatggtgagggcgttgaaattattgatatatcgccaatgggatgtcgaacaggtttttatatgagcttgattggcgaaccggcagaagtacgtgttgcagacgcatggaaagcggctatggctgatgtcttgaaagtgaaagatcagagccagatcccggaactaaatatttatcaatgcggtacttatcacatgcattcactgacagaggctcaggatattgcacatcatattcttgattcagacgtcctcgttaataagaatgatgagttagcattgccagaagaaaaactgaccgaattgaaagtgtag

SEQ ID NO: 7621 - DNA, 1560 bp, Photorhabdus luminescens
ttgatcccggacgtatcaagggctttatcatggctagaggcgcatccgacaattttaaagggaattcgtcgcggtgttgaacgtgaaacattacgtattacttcagatggtagtttagccataacagaacatcctaaaacacttggtgcagcgcttacgcataaatggattactactgactttgctgagtcattgttggaattcataacaccagctggtgatgatataaaatatacgatttcttttcttagcgatattcatcgtcacacggcgcgtgtgctggacaaagaaaaaatgtggccattaagtatgccatgctttattgatgcggaagagaacattactctggctcaatatggtgcatcgaatgttggtcgctataagactttataccgcgaagggttgaaaaatcgttatggcgcgttgatgcagaccatatccggggttcattataatttttcattgccaattgagttttggcgtgcttgggttggtgttgaagatgcagagagtggtaaagaacagatctctaatggctatttccgtttgatccgtaactattatcgctttggatgggtgatcccatacttgtttggtgcttctccggcaatttgttcctcgttcttacgtggaagagagacttcttttctttttgaacggacagaagatggaacttgttatctgccttatgcgacttcactaagaatgagtaacttggggtacaccaataaatcacagagcgatctgaatattacgtttaataacttacatacctatattgacgggctgaaaaaagcgattcacaagccatctgacgagtttgctaaattgggcactaagcaaggtgataaacatattcagctcaataccaacgtcttacaaattgaaaatgagttgtatgcgccaatccgacctaagcgtgtcactagagggaatgaatcgccttctgacgctttgttgcgtgggggagtggaatatatcgaagttcgttcattagatattaatccatttgccgcgattggtgtcaatgaaacacaaattcgttttcttgacctattcttaatatggtgtgtgcttgccgaagcgccggaaatgggcagtgatgaattagattgttgccgtaagaactggaatagagtgatccttgaagggcgtaaacctgggcaaatgattggtcttggttgtggaagtgtggaagagccgttagcaaaagttggcaaaaagttatttagtgacttgaaacgggttgctgcaatattggatagttgttctggcacgcagtatcaaaaggtttgcgaagaattaattgctacgtttgatgattcatcactgactttatcagctcgcgtgctggaaaaaatgaagagtcagggcattggtggctttggactggaactagcagatgaataccatcagcaactgatcagtgaaaaatatgaggttattagcgacgaacagtttgctatagaacgcagggcctctgtagagcgacaagacgcgttggaacgtgaggatacgatgagttttgatgagtatctgaaacaacagacaggatgctag

SEQ ID NO: 7622 - DNA, 186 bp, Photorhabdus luminescens
atgcttattctgactcgtcgagttggtgaaacgctcatgataggcgatgaggtaacagttacagtactaggggttaaaggtaaccaagttcgtattggtgtaaatgctcctaaagaagtttctgttcaccgtgaagaaatttatcagcggattcaggccgaaaaatctcagccaacaacttattga

SEQ ID NO: 7623 - DNA, 2631 bp, Photorhabdus luminescens
atgagcaaaagcactgctgagatccgtcaagcgtttctcgacttttttcatactaaagggcatcaagtcgtaccaagtagttctttggtgccaaataatgacccaacactgctgtttaccaacgcagggatgaaccagtttaaggatgtctttcttggacaggacaaaagatcttactcccgagcaacaactgctcagcgctgtgttcgtgctggtggtaaacataatgatttagaaaatgtaggttacaccgcacgtcatcatactttctttgagatgctaggtaattttagttttggtgactatttcaaacatgatgctattagttatgcttgggaacttctgactggcaaagattggtttaatttgcctaaagaaaaattatgggtgactgtctatcagacagatgatgaagcctatgatatttggaagaacgacgtcggaataccagcagaaagaattatccgcattggtgataacaaaggtgcaccttatgcatcggataacttctggcaaatgggtgataccggtccttgtggcccttgcactgaaattttttatgatcatggtgagcatatctggggtgggccgccaggaagcccggaggaagatggtgacagatatattgaaatctggaatatcgtctttatgcagttcaatcgtcatgccgatggcacgatggagccgttgccaaaaccatccgtagatacggggatggggctggagcgtatcactgctgtattgcagcacgtcaattctaattatgagattgatctgttccgtgatttgattacagttgttgctaatgtcactggtgctacagatgatctgagtaataaatctctgcgggttattgctgatcacattcgttcatgtgcatttttgatttgtgatggtgttgttccttctaatgaaaaccgtggttatgttctgcgtcgtattatccgccgagctatccgtcacggtaacatgttgggggctaaagataccttcttctataaactggttgcgccattgctagaagtgatgggcgcggcgggagaagagcttaaacgccagcaagcagttgttgagcagatcttgaaaacagaagaagagcagtttgctcgtacgctggaacgtggtcttcaattattagacgatgaactcgcaaaactgtccggtgatattctggatggcgaaacggctttccgtttgtatgatacctatggtttccctgtggatttaaccgctgatgtttgccgtgagcgtaatattagcgttgatgaagcgggatttgcagtggcaatggaaaatcagcgtcgtcgagcccgtgaatcaagtggtttcggtaccgattataatgaattgatcaaagttgatgaacgcagcgatttctctggttacgatcataacgaacagcaggcaacagtgactgctatcttccgtgatggtgaatcagtcaatcaaattcaggcgggcgaagaagcgattgttatactggataagaccgctttttatgctgaatctggtggacaagttggtgactcgggtattctgagtaataccaattgtgctttttgtgttattgatacacaaaaatatggtcaggctattggtcatattggtaagcttgagaaaggtaccttaagtgtaaaccataacatcaatgcggttattgatattgaacgtcgtgatgcaattcgtttgaatcactcagcaacccatctgttacatgctgcgttacgtcaaattttgggtgagcacgtatcacagaaaggctctctggttaacgataaataccttcgctttgatttttctcactttgaagcgatgaaaccagaacagatccgtctggttgaggatttggttaatgccgaagttcgtcaaaattcacctgttgttactgaattgatggatctggagacagcaaaagtcaaaggtgcgatggcactgtttggtgaaaaatacgaagagcaagttcgtgtactatcaatgggggatttttccactgaattatgtggaggaactcatgcaaatcgtactggtgatattggcttgtttcgtattattgctgaatctggaacggctgcgggtatccgtaggatcgaagcaattacaggtaaaaaagcggtggaatctgtacatcaacaggttgatttacttcaagatattgctcaattagtgaaaagtgatatccatagcttgagtgaaaaagtacggatgacgctggatagagccaaagcgttggaaaaagagcttcaacagcttaaagatcaacaggctgcacaagagagctcttctttagcaagtaaagcgaaagaagtgaagggtgtgaagttgctggtcagtcagttaagcaatacagagcctaagatgttgagaacgatggttgatgatcttaaaaatcaactaggttcagcaattattgtgctttccactataagtgatgataaagtcagcttaattgttggtgtcacaaaggatctgactgctaaaataagagcaggtgagttaatttcttctgtagctcagcaaatcggtggtaaaggcggtggtcgctctgatatggcccaagcaggtggttctgatattgaagcgttgccttctgctttggatagcgtggaagagtgggtagcatcgcggctataa

SEQ ID NO: 7624 - DNA, 1068 bp, Photorhabdus luminescens
atggctattgatgaaaataaacaaaaagcactagcagcggcactcggccaaattgaaaaacagtttggtaaaggttccatcatgcgtttgggcgaagaccgttcaatggacgttgaaactatctccacgggttcattatcactggatattgcattaggtgctggtggtctgccgatggggcgtattgttgaaatctatggcccggaatcttcgggtaagacaacgctgacattacaggttattgctgcggcacaacgtgaaggtaaaacctgtgcgtttattgatgctgaacacgctcttgatcccatctatgctaagaagttgggtgttgatattgataacttgttgtgttctcaacccgatacgggggaacaggctcttgagatctgtgatgcgttgactcgctccggcgctgttgatgtcattatcgtagactccgttgccgctttaacgccaaaagccgaaatagaaggagaaattggtgattctcatatggggctggccgctcgaatgatgagtcaggcaatgcgtaaactggccggtaacttgaaaagttctaatacgttgttgatctttatcaaccagattcgtatgaaaattggtgtcatgtttggtaaccctgaaactaccaccggtggtaacgcgctgaaattctatgcttctgttcgtctggatattcgccgcattggttctgtgaaaaatggtgaagaggtcgttggtagcgagacccgtgttaaggtggtaaaaaacaaagtggcagcgccatttaagcaagcagaattccagattatgtatggtgaaggcattaacacttatggtgaattaatcgatttaggtgtgaagcataaactggtggaaaaagcaggcgcatggtacagctataatggcgataaaattggtcaaggcaaagcgaatgctaccatctatctgaaagagcatcctgaagttgctactgagctggataaaaaattacgtgaaatgctgttgcacaatgccggcgaattcaatagtgctgcttctgattatgaagacaatgaaaatgaagagatgaataacgaagaattctaa

SEQ ID NO: 7625 - DNA, 543 bp, Photorhabdus luminescens
atgagtgaaaaaattctgactcagcttagtattgagctaggagagaaactgagacagcaaacactgtcggtgacctgtgccgaatcttgcaccggtggctggttggcgaaaacaatttcagatattgccggtagctctgcttattttgaccgaagctttgtgacatacagtaataaagctaagcatcagatgctcggtgtgtcagaggccgttttacagcaatatggggctgtcagtgaacaggttgtgagagaaatggcgacaggagcactgaaagccgcacaggcagatctggcggtttcggttagtggcattgccgggcctgatggtggcagcgaagaaaaacctgttggcacagtgtggtttgggtttgcctatctaacggtaaatggggtagaagttgtgtcccgccgttgttgttttaacggtgatcgaaatgaagtacgccttcaagctgtcatttattctctgaaaacactgttatcagagattatataccttattggatttcaagatgcttcaaagaggcaacttgaaagataa

SEQ ID NO: 7626 - DNA, 1197 bp, Photorhabdus luminescens
gtgaatgcatcctccgttgttcaaccgctattgacccgtggcatgaaagccgtattggtgtcgcagtttttttcggcttttgccgataatgcactgttgtttgcgatcttggcacagttgaaagcccagttttatcctgactggagccagccaatattacagatagtgtttgtcttggcatatatcctattggcaccttttgtggggcaaattgccgatcgtttcccgaaagatcgtgtgatgttgtttgctaatagcttcaagttgttgggcgcgtttactatttgcctgggatatgatccatttctgggttatgccttggtgggcgtgggagcagcatcatattcaccggctaaatatggcattttggttgaactgaccgatggtgatcgtttagtaaaggcgaatggtttgatggaggcttcaacaataattgccattcttacgggctctgtcgttggtggttttttgtctgattggaacttggcaatcgcactgctggtttgtgcgttgatgtacggtattgctgttgtcgctaatttctttatcccccgattatcggcggtgcgtcgggataagggctggaatctgaaaaagatgctgacagactttgcttcagcttgttgcattctttggcataacaaaggcgctcgattttctttaattggtacgagtttgttctggggagcgggtataacactgagattcctattggtcttatgggtacctgttgttctgggaatttctgacaatagcacgccgacaatacttaatgtgatggttgctgtcggcattattatcggtgcgggtgctgctgcccgttttatcacccttaaaacagttcaccgttgtatgcctgccggtgttttaatcggcgtgatggtggtcattttcgctgtccagcacagtatttgggcttcctacgtcttattaatcattctcggtatttttggcggtttgtttattgtcccgctgaatgcattattgcaggaaagcggcaggcaaacgattggggtcggttatgcaatcgcagtacagaatttgggtgagaatatcgccatgttattgatgcttggcctctactcattggttattaaaataggcgtcccggttgttacaacagggataggctttggtactctgttggcgttgacaatcacgagtttgtggatttggaaccggtttcaaagaaattga

SEQ ID NO: 7627 - DNA, 1920 bp, Photorhabdus luminescens
atgttgtttaaatttctaaggcttgtttttcgtttgatgtttcgtttaacagtagaaggagatattaaacaatttaaccacccaaaatgccttatcacgcctaatcatgtctcttttcttgatggtgttttgctaacactttttttgccggttaagccagtatttgctgtctattccaacattgcaaatcgtggctttatgaaactggtaagtcgctatgttgaaatagttcccttagacccaataaatccaatggctgtcaggatactggttaaggaaatagaaaaagggcggccaatagttgtttttcctgagggaagaattactgtgactggttctttgatgaaaatctatgatggggcagcttttattgcggcgatatctgaagccgttgtggttcctgttcgttttgaagggttagaaagaaccctattcagccgattaaagggtattttcaaacttcacctttttccgaaggtgacaatgaaaatcctgcctgcgacacaattgctgatgccgaatgcgtctagttcggagcaacgacgtcgtttagccggtgagcgtttgcatgaaataatgatgaatgcccgaatggcgacccgaccgcaagaaacaatatttgaatctttactggttgcacgaaaacaatttggtcgttttaagccctgtattgaagatgtttcttttaaagaagacagttataacagtctgcttaaaaaagtactggcggccagtcgtattttgcagcgttttacctgccagggggaacggattggttttcttttacctaatgccactattatggtagctgcgatattcggggcatctttgagaggaagaataccggctttactaaactatacaaccgacagtcatggattgaagaatgcgctagcggttgccagtattaaaactatcgtgacttcccggcaatttctgaaaaaggagcgattaacacatttatccgagcaggttaccgaggttaactgggtttatcttgaggatttggaaagtacagtgactttgctggataaattatggatcttgtggcacctcttttttccgaagcaagcgatggtggcacaaaaacccgatgatgatgctttggtgctatttacgtccggttcagatgctgtatcaaaaggtgtcgttcacagtcacgctagtttgttagccaatgtggaacagataaaaaccattactgatttcaatccacttgaccgttttatgtcttctctaccgctatttcatgcatttgggttgactgttggcttattcactccattgttgtctggtagccgaatattcctctacccaaatccattgcattatcgggtagtaccagaactggtatatgaatgtaactgtaccgtattattgggtacatccagtttcctggagaattatgcctattctgctcatccgtatgattttgcacgtcttcgttgtgttatagccggtattgaaaagctcgctgaaaatactaaacagatttggcaagacaaattcggtattcgcattttagaaggatatggcatgacagaatgtgcgcctgtcattgcattgaatgtgccgatgatggctaaggtcggtacggttgggcggattttgccggcaatggaattccgtttgattccgatagcaggaattaagcaggggggacgtttgcagctacgtggcccgaatatgatgaaaggatatctgagaatggaagatccaaatcatttggaaccaccagcggtaaaagatgaacatgggaatattcagtttgattggctcgatactggtgacattgtttcaattgatgaacagggattctgtactattctcggtcgggggaaacgttttgctaaacagggagaacttgacggtggtaaagccgattttgttactttgtgtaaaatagcggaagctgaatag

SEQ ID NO: 7628 - DNA, 525 bp, Photorhabdus luminescens
gtgaaccaaatattgtttattgtaggtgcacgtggggcaggaaaaacgacggttggaaaattattagccaatgaattatcgtacacatttattgacactgatcaccatatccaacaaaccagtaatatgaccattgcggatattgttaaccagcaaggatggcaacaatttcggcaattagaaagccaagctttacaacaagttactcaaattaatcgcgttatttctactggaggaggtatcattctttccgctgaaaatcgccaatatatgcgacaaaatggcacggtgatttatcttcaagcttcagcgagcattttggctgagcgattaatgcagcaaccagaaagtacccaacgtcctagtttgacgggaaaatctattgttgaagaaatggaagaagtgcttgccgccagagaaaatctctattgtgaatgtgcgaaccatattattaatgcgcacctttcaccggaaaaaattacaacttatgtgaaagagattatgttctctggaatagtttcctga

SEQ ID NO: 7629 - DNA, 1254 bp, Photorhabdus luminescens
atgttagaacaaatgggaaaggctgccagggaagctgcatggcaactggcacagctaagtacaaaacagaaaaatcaggcattaattcgcattgcagatttactggagcaggaaagtgcaatcattcttgaagctaatcagcttgatatgattcaggcccgtgaacagggcatgagcgaagcattgttggatcgtctattattgacgccggaacgtttgaccgcgatagctcacgatgttcgtcaggtatgcggtttatctgacccggtaggggaagtcattgatggcagtttgcttgacagtggcttgaggttggagcgtcgccgtgtaccgctgggtgtggtcggggtgatttatgaagcacgccctaatgtcaccatcgatgttgcatctctgtgtttgaaaaccggtaatgcggttattttgcgtgggggtaaagagactcacaacactaatcaagcgacagtgaaagtcattcagcaggcacttgaacagagtggattaccggccgccgccgtgcaggcgatagataaaccggaccgtgagttagttattcagctactgaaattggatcgctatgtggatatgttgattccacgtggtggtgcagggttgcataagttgtgccgtgagcaatcgaccattccagtgattaccggcggaattggcgtctgtcatacctttgtcgatgaaagtgctgattttgataaggcattaactgtcatcactaacgctaaagtgcaacgcccaagtgcctgtaatgctttggaaacattgctggtacatcagaagattgcggctgattttctgcctgcactgagcaagtacatggaagagcaaggcgttactctgcatgcgagtaaatcagcaatggtgtttttgaaagatggagctgctaaggtcgtggatgttacagaagcagattaccgtgatgagtggttatctctggatatgaatgtggaaattgtcagtgatatggagcaggcaattgatcatattcgtacctatggtacgtcccattctgatgctattttgactcaatctttgcacaatgctgactattttgttcgtcaggttgattctgctgcggtttatgtgaatgctagcactcgctttactgatggtggccagtttggcttgggagcggaagttgctgttagcacgcaaaagctgcattctcgtggtccaatgggattagatgcgttgactacgtataaatggattggttatggagaggatttagtccgtaagtaa

SEQ ID NO: 7630 - DNA, 1107 bp, Photorhabdus luminescens
atgatgaatagcagccaaacattggttgtgaaactggggacgagtgtactgacaggcggctctcgtcgcctgaatcgagctcatattgtagaactggtaaggcaatgtgctcagcaacatgaaaaaggtcatcgcattattattgtgacttccggtgctattgcggcagggagggaacatttgggctatccggatctacctgcaacaattgcatccaagcaattgctggcggcggtcggccaaagtcggttgattcagttatgggagcagtttttttctatttatggtatccatgttgggcaaatgttattgacccgggcggatttagaagatcgcgaacgttttttaaatgccagagatactttacaggctttgcttgataatcgcattgtgcctgtcattaatgagaatgatgcggttgcgacggcggaaataaaagtgggtgataatgataatttatctgcactagcggcaattctggggggcgccgataaattgctattgctgacggatattgaagggctgtataccgctgatccgcgtaacaatccagacgcaaaacttatcccggaagtttatgacatcagcgatgaattacgtatggttgccggtgatagcatttcgggtttagggacgggaggcatggcaactaaacttcaggcggcggggattgctggtcgcgcggggattgatgtcattattgccgcgggtaataaacccgatgtcatctctgatgtcattgaaggtaatccggtaggtactcgttttcatgggttggaaagcccgatggaaaatcgcaagcgttggatttttggcgcacctccggcgggtgaaattattgtagatcatggcgctgaaacagcaatctgcgaaaaaggcagctctttattaccgaaagggattaaaaatattaaaggtgatttctcccgtggagaggttatctgtattcgtagtctgtctggtaaagatttggcgcatggtgtttgccgttataacagtgatgctctacgtttaattgcaggccaccattcacaacagataagccaaatcctcggttatgaatatggtgctgttgcggttcatcgtgatgacatgatcgtgagttaa

SEQ ID NO: 7631 - DNA, 1248 bp, Photorhabdus luminescens
atggcaaatcggaacctttcagaatcactttttaagccaagacaaaaacatcaggaaacttccacgttggtaaagcaccgcgatcctcggttaattgcgggtaattacagtacgttagatggtaatagtcatggtagctggtatcgtatgattaaccggctgatgtggatttggcgagaaattgatccgtttgaaatagaagaagtgttgtgccggattgccatgacaaacgcacagcgcagtgatgataatttactggatactgtgattgggtatcgtaaaggtaactgggtttttgagtggtcacatcaggcgatgttgtggcaacagagagcgttgcaggcagagcagatcccagaagcgagcaatttctggttgaaagcggctaatttgtatagcatcgctggttatccccatcttaagggggatgagttgtctcagcaggctgtcattttagccaataaagcttatgaaaatgcggctcgttgttctggctatcagttgaggaaaatagagttcaaactcaaggaagggggttgtgtgaccggtttccttcatctgcctcagcaactgcaaagaccttctccaactattttggtttgtggcagtttggataatttgcaaagcgattattatcggctgttccgtgattatctggcaccacttggatttgcgatgttaactgtggatatgccctcgattggttactcttcacgtctgaggatgacacaggatacctgtattctccatcaacaaatcatccatcaactggatgaaattccctggattgaccacaccaggattggtctatttggttttcgctttggtgccaatattgccgtccggttggcctatttggaatctaaacgtattaagggcgttgcgactcttggcgctatcgttcatgagtggctcagcagtgttgaacgtcaacaaaattcaccttcgatgtatcttgatatgtttgctagcagactgggtatttataatgtggatgaaaaggcgtttcgtctcgaactcggttgttactcccttaaaaaacaaggtttgttaggtcggcgttgttccgttcctatgttagcgggttattggcagaatgatattttcagcccgaaagaggaatctaagctgatagcaatgtcatcaatggatagtcaattactggctattccgacaacacctgtttataacagtttcaataaggcgttacgggagattagtcaatggttgagaaataaagtctgttga

SEQ ID NO: 7632 - DNA, 462 bp, Photorhabdus luminescens
atgagcgaaaaatatgtcgtaacttgggatatgttgcaaatacatgcccgtaaattggcacaacgtttacttcctgtcgaacagtggaaaggcatcattgccgtgagtcgcggtggtcttgtccctggggcgcttttggcgcgtgaattgggtattcgtcatgtagatacagtctgtatttccagctatgaccataataatcaacgtgagctgaaagttctgaaaaaagcagaaggcgatggtgaaggtttcatcgttgtggatgatctggttgatactggaggcactgctcaggccatccgtgaaatatatcccaaagcccattttgtgactatttttgcaaagccggcaggccaaccgttggttgatgattatattgttgatattcctcaagatacttggatcgagcaaccttgggatatgggtgtagtattcgttccacccatttgtgaaggtagataa

SEQ ID NO: 7633 - DNA, 1461 bp, Photorhabdus luminescens
gtgtcagaactatcacaattatcccctcaacctctatgggacatctttgccaaaatctgctctattcctcacccttcttaccatgaagaagcgctggcaacccacattgttcaatgggcgcaagaaaaagagttgcacgttgaacgtgatcaagtcggcaatattctgatcagaaagccagccagtaaagggttggaaaatcgtaaagcggttgttttgcaagcacatcttgatatggtgccgcaaaaaaacaacgatacagtgcacgatttcactaaagatccgatcagcccttatgttgatggtgaatgggttactgcccaaggtacaacactgggggccgataatggtattggcctggcatcagcattggcggtactggctgatgacaatgtaaaacatggcccgctagaagttttattgaccatgacggaagaagccggaatggatggcgcttttggcctgcaaccgggctggcttcaagctgatatcttgatcaataccgattcagaagaagaaggggaaatctacatgggttgtgctggaggtatcgattttaccaccactttagcattgacccgtgaagctgtgccggctcactataaaacactaaaactggtcattaaaggtctaaaaggcgggcattccggttgtgatattcatttaggactgggtaatgccaacaaactattggctcgcttccttgtcgcccatactcaggaattggggctaaaactgctcgacttccaaggcggtacgctgcgtaatgccattcctcgtgaaggccatgttattgttgctattcctgccgataaagcagcacagcttacccaactgaaagataactacttggatatactgaaaaatgagtatgccatcgttgagaaaaacctgactgtattactggaagaggttgaaaccgatattcaggcattaactgatgattgccaaaaccgttttatctcactgctaaacagtacccccaatggtgttatccgtatgagtgatgtcatcaaaggtgtagtagaaacctcgctaaacgtgggcgttgttgcaatggaacaagataaagtgaatatcatttgcttaatccgttcgcttatcgacagcggcaagtcctatatcatcggtatgctctcttcgctcgctaaactgtcaaatgccgagatttccgctaaaggtgattaccccggctggcagccagatgcaagttctcctgtaatgcacttagtaagtgaaacttatcaacagttattcgataagacacctaatattatggtaatccatgcagggctggaatgtggcctattcaagaaaccttatcctgatatggatatggtatctatcgggccaaccattacgggcgctcactctcctgacgaacaagtgcacatcaaaagtgtcgggcaatattggcaactgctgactgcaattttgaaagccattcctgaaaaggcttaa

SEQ ID NO: 7634 - DNA, 1056 bp, Photorhabdus luminescens
atgcgaaagattattcatattgatatggactgtttctacgcagcgattgaaatgcgtgatgatccgtcacttcgtcatattcccattgctgtgggcggcaatgcagacaggcgaggtgttattagtaccgctaattatcctgcccgtcgttttggagtacgtagtgcaatgtctactgcaatggcgctgaaactctgccctcagcttaaagttcttccggggcgtatggcactgtatagggaggtttcccggcatatccatcagatattgtctcgttatactgagtggatagagcctctgtcattggatgaagcttatttgaatgttactgatagccatcattgttatggatctgccacgcttatcgcacaggagatccgtcaatccatttttgatgaattacaattgacggcatcagccggtattgcaccggtgaaatttttggcaaaaatcgcttctgatattaataaaccgaatgggcagtatgtcattcctcctgatcgagtggctgattttattaaggttttacctttgcgaaaaattccgggggttggcaaagtcatggtgcaacggctggctaatatggggctggaaacctgttctgatgtacaaaaatatgacgtcattgttttggtgaaacagttggggaaatttggtcaggtactttgggatcgttgtcacggtattgatgaacggttggtgaatccagatcgtttgcgaaaatcaattggtgtggagcggacacttgcgagagatattcatcaatgggaacagtgcactgaactgatagaaagtttatatctggaattagaaaaacggttgagtaacgttaaacctgatctgcggattgcccgtcaggggattaaactgaaatttgatgattttcaactcaccactcaggagcatgttcatccattattggataagcaggatttactgcaattggcccagaaaacatggacatctcgccgggaagggcgtggcgttcgtttggttggtttgcacgtgacgttgcaggacccagaaattgagcggcaactcttgcttgaatggtaa

SEQ ID NO: 7635 - DNA, 2301 bp, Photorhabdus luminescens
atgaaaaatagcgggaaaccacaaaaaacctcagctacagcgactacacagccaattaatcgcactcttcattatgctttatcaagcataattatgctgagtacgggcctgccaggttatctggctgcacaggaaaatagagagcaaaaatcaaaagaaaaaccggaaaaatcagagaaagtcattacactttctacactttctgttattggtggattgaataacagcgtcagtgccggaagctcggtattgaaaaaagaggatattgaacgtacccaggcagataatattgccgaactgcttgatcaacttcccggcgtttccatgtcaggatcgcctcgtccaggcggccaaactctgaatatctggggaatgggtgataccgaagacgttaaagtcaccttagatgatgcaccgaaaggcttcgagaaatatctccaaggctctatctttattgaacccgaattaatcaagcgagtcgatgtcgataaaggcccacataatctacttgatggtaatggcggatttggcggaacggttaaagttgtgaccaaagatgccagtgatttattacggcccggagaagattttggcggattgctgaaatacagttatcacaccaatgatcgccaaaatatttatagcagcgcagtctatggccgaacaatagagggctttgctgacggtctgctatatatgagcaaacgagatggcggcaatattaaacgaccggatggcacccgttttgcgttctctaaaagtgatcaggcatcctatttactgaaaacgaatttttacctgaacgatgctaatacattgacactttccgctatccgctctgattctgatggctggcagccgtgggcagcaaaacgtgatgagatagctgttccgtcagaagccgacattgaaaaatatggttggaatgaagcctggcgccggaagttagtttatcgtgatcaaacagaccaaaattacacagctaaatggaatattgcaccagaagacaatccgttacttaacctgacagcaacctatgcctattcgaaaacagaacagcatgataaacgctctgaaaaagcccacagcggttttcttggttcattaggaaatgaaagctggatcgactatgtagataacttagcagatataaataacaaaagtgcttttataaccggaccaatagagcacacattattagttggagttcgttggcataaaaatcaacggaatacccttatccatgataaaagtaaagacaaaaaacctgaatataattatggctattttcagccaacctatatgccttcaggcgagcaaaaaacgaatagtttctatttgcaggatgcaatggttatcggcgatgttactttgacacccggtgttcgctatgaccatatcaccaatattggcaaacccaatatcgcggcaatctacaataataattcaccaaatatagggcacgattaccgcagtgttacttatactggctggtctcctcattttggtatcatgtggaaagcaacacaaaacctgtcactattttcagatatcagccggacatggcgcgctccgttggtggatgaacagtatgaaatgcaatatgcccgggcaagtgttactgccaccagccgtaacttggatgtagaaagaataacgggtttacgcttcggtgcgattctgaatttcaataacctactggcagaccaagataatttgcaaatccgtacaactttattccgtaatagaggcaaggatgaaatatttacccgtcgcggaatagtatgtaaatcaccggattgcggaaaacctttatccaactaccgtaatttaccgggatataccattcaaggattggaaatcgagactttctacgacagcaattccttgttcggcaaactttcttattcgactatccgtggtcagagagatgcttcacctcgcgatccttggggtaataaaacctggattgcggaaattccacccacctccgcccgcgccatgttaggggtaaaaatccctcaatggcagatggcaataggctggaccggagattttatccgtaaacaggacagatcgccgaaagatggagatcccatggcaacactctggtcaatacccaaaagcaaaggttatgcactgcatggcgtattcgccagttggcaacccaatttctggcaaggtcttgaagcacgtgtcacggtaaataacttgtttaatcgtgattatcgcccatacctcggtgaatcggtttccggggttggacgtaacattaaattcagtatttcccagaagttttga

SEQ ID NO: 7636 - DNA, 198 bp, Photorhabdus luminescens
atgcaactgggtaaaaaaatactgggacatggatttgataaatatttgaacgccccgagcataggacggattggaatggcattttatgaagcagaaaatgagccacctcgtgtagctgattattttgaaagtgtgtttaaaaacatcaatgatttgcggcaacgctgttcaccttatccgctgtcattctggagttaa

SEQ ID NO: 7637 - DNA, 636 bp, Photorhabdus luminescens
ttgtataactattggggggaatttctaggactggcggtgattcattttctggcagtagtagcaccggggccagatttcgcggttaccatacgacaaagtgtgaggtttggtcgctgggctgggatgtgtacggcagtgggtatcggagcgggaatatcagtacatgtcatctatacactagtgggggttagtgcattaatgcataccactccgtggttaatggaattagcaaaacttgttggcggaacttacatcatatggctcggtatcaaatttatcaggagtaagcctaccgatttggctgtcttagagaatgagggaattgttcaagcttcacagagtagatggaaagcatttctgatggggtttatgacaaacgcccttaatcctaaggcgacgttgttctttttggccgttttcacgactgtggtgagtagcaatacacctatcctgatacaaatgttttatggggtttggatgtgtgtggtcaatgcggtatggtttgtattggtcagtgttattttttctaatacattgattcgtaataaatttatacggaaagggtattggttcgagcgggtgatgggactggtgctgatcggatttgctgttcggttattatttatgtctgtttga

SEQ ID NO: 7638 - DNA, 501 bp, Photorhabdus luminescens
atgcctaaaattaatagttctgcgcaacaattttactttgaacatcatgactggttatataactggctacgccgtaaagtcccttgcccttgccatgcggaggatctcacgcaggatactttcctgaacgttctatcaaattcaaatttgtcagacatccgccagccacggtcttttctagcaaccgtggcccgttgcctggttgccaactattaccgtcgaaaaaagaacgaggagagctatttggaatatataaactcgacaccagaaatgaccatgccctctgctgaaagcagaatcgctacatttgaacagcttgaaaaacttgagatcactcttgataaattgccagttcaagtaaaaagcgcttttttactggcacagctacaaggactacgttatagcgaaatagctgatcaacttcaggtttcttccagctcagtaaaacagtatttgcaacgagcacataacaaatgtaaaaaaattcaaattctcacttaa

SEQ ID NO: 7639 - DNA, 897 bp, Photorhabdus luminescens
ttggatattatggagaaaacgatgcgacacggaattaccgctgcaatcctactttgttgctctgccagcactttcgcaacaccaccacaaattatcgctcatcgtgccggtacaggtgatgcacctgaaaatactgagtacgcaatttctaactccttagagaataaagcagatgctatttggatcactgtccagctttcaaaggatggtattcccgtactctatcgtccaacagacctaaatagcttgaccaataaaagtggactcgtttctgcttataaagcaagtcagttggctaaatttgatgctggttacaaatttggctctgatggtcatcatccattccgtaataaagggttaggtattccaacattagaacaagtcttaaaaaaatacccagatacttttttctatattgatctgaaatcaccggatgcggatccagcacaacaagccaaagcactagaaaaagtactgaccaaacaaaaatcgcttgcccgtacccgtttctattccactaacgaaacttaccttaacgcattacccgcaacaattcagcgttttgaaagccgggataaaacccgcaccatgctggcaaatatcacaatggctcatcaatgtgatatccctgcaaataccgacaccactcgctggtatggtttggaaatgcgccgtaacgtagaagttgttgagaaatatactcttggtgaggcacgttccaaatcagtattatcatgggataaggaagcgatggcgtgtttccgtgctaatggtggcgctaacatcattctctttggcattaaaactgaggaagatttcaaacaagctaaagagcttggtgccgatggtgtactggtggattctcccaagctgttcagtacctttaaaacaaaataa

SEQ ID NO: 7640 - DNA, 1932 bp, Photorhabdus luminescens
atgacaggtatagtaactgactttatctcggactgggtagtttacgaagactcgattcgcccgctggtatttgaacacacgtcacaggcattaattgtgctagatccacatcaaaaccagtttattgatgtgaatattagcgccacccaattattacaatatgaacgtcatgaaattattcaaaaaacggtgacttccatttttggtcatttcagacaactgccatatcttatggcatttaccgaagaagctttggtaaaaggtcgggcctggaacaatgagttgtatatctttgatagaaacggtgaaaaaatccaattggatattactgctgtttcattgtcttataaaaataaaaccttgctgatatggtcgctggtggatgtcaaagatttagcattgcgccaactcaataaaaatgccgataaagccattcgtataggtttaaaagaatcgcaagccttacaagagctgtttattgactctgacacaggcaagcatttattactgagttcagtcggtgacggtatttacagtattaacaaacaaggcttgtgtacctttattaaccctgtcggggctaaaatgttggggctgcaacctgaagatgtattgagtgacaatatccataacgttcatcaccatacccatgaaaatggcgaaccctatcctgaagaagagtgcccgatttacgcggcggtacatgacggtattgtgcacgaaggggtgcaggaaattttttggcgtcgtgacggtagttgctttccggtggaatttaccagtaccccagtgattcgtgacagtgaaattattggcgcggtagtggtgttccgtgatattaccgatcggctgaataccgaaaaacaactgacccatgcccttgaagaactacaagatttaaaaagtcgactggaacagcaaaatgaatatctgcaagaagaaattttacatgaaaatcaatatgatgaaattattggcagaagtgcatccattttacagattattgagaaaatcaaggtggtcgctccaaccgatgccaatgtgatgatttatggtgaatcaggtacaggcaaggagctgattgctcgtgctattcaccaatccagtcaccgtaaacagcaaccacttattcgagtcaattgtgccgccattccttcggaactgtttgaaagtgaatttttcggacatgttaaaggtgcatttaccggggctgtgcgtgaccgtgccggacgttttgaattggcagaccaaggcacactgtttttagatgaaattggtgaaattcctatcgagctacaaagtaaattgctgcgtgtattgcaggaaggaacctttgagcgagtcggcgaagaaaaaacgcgacatgtggatgtgcggattattgccgccaccaaccgcaatttaaaagaagaagttaaacacaaacgttttcgtgaagacctctatttccgtttaaatgtattcccgatttattcaccggctttacgtgaccgtaaagaagatattccacttttagttacgcattttactaagttgatttgtgacaagcgtaaaattaattatctcccattttcacaaaggcatattttagaattacagcaatatgattggcctggtaatattcgtgaattacaaaatgtcattgaacgcgcactcattatagcgaaacaaggcacggtttcgtttaaatatttgctagaacaagatcaacagcaaaatgaaacgacgcatcagaatattcacaataaacttcaacacattgaagttgtgctgaccatgcagcaactgaaggacttggaaattaaaaatttctctcttgccgttaaacaatgcaaaggtaaaatttttggtgatgatggcgcagcaaaattgttgggaatgaacccaacgacattgatctcacgcttaaagaaattaggagttgattattaa

SEQ ID NO: 7641 - DNA, 483 bp, Photorhabdus luminescens
atgccaaagattgatatcgagcaatataaagacggcgattttcttgttgattacgaagaaaaagtgtttgaggacgtcaaagccctgccaggtgaaaaagcattggtgactttccataccgttgcatttgaaggatcagccggcttggtcaatgtgttacaggcaaaacgtctgttgcgcaaaggctttgaaaccaaaattttgctttacggcccaggcgtgcagttgggtgtacaacggggttttccaactttaggggcagaagcttttccaggtcatttagccgtcaacaatcagttgaaagcctttatggaagaaggtggcgaagtctatgcctgccgttttgcattacaagcattttatggtcaaaccgaaaaagcgcttattccgggaattcggccaattaatccattggatgtgatggatttaagactgctgatgcgtcgcgacaatgccttagtcattgatacctggactgcctaa

SEQ ID NO: 7642 - DNA, 1008 bp, Photorhabdus luminescens
atgaaccgaatcattaaagccgccgcagtacaatgtagcccagtgctttatagtcaagccgcaacagtaaaaaaaatctgtggcattattttagagcttggaaaacagggagtgcaattcgcagtctttcctgaaaccgtcgtgccttattacccttatttctcctttgtacaaccgccatttgctatgggtaaagagcatttaaagctattaaatgaatcggtggttgtaccttccgaagcaactttagcgattggtcaagcctgtcttgaagccaacatggtggtatcgattggcactaatgaacgtgcgggcagtacgatttataacgcgcaactgttatttaatgccgacggttcaatcattcagcatcgccgcaaaattaccccaacttaccatgaacgcatggtgtggggacaaggtgatggcagtggtttacgtgccattaattctgcggtagggcgtattggttcgctggcctgttgggaacattacaacccgttggcacgttttgccttaatggcagatggtgagcaaattcatgccgccatgtttcccggttcattggtagggcaagtctttgccgatcaaatccgcgcaaccattcaacaccatgctttagagtctggctgctttgtgatcaacgccaccgcatggctgcatcccgaacagcaacggcagattatgcaggatactggctgtgatatcggtccaatttcaggcggatgttttgccgccatcgtttctcccgaaggcaagctcctggctgaaccgatcacacaaggtgaaggttattgtattgccgatctggactttagcctgattgataaacgcaaacgcatgatggattcgattggacattacagccgacctgaattactcagcttaatgattgatcgccgtccaacacacgtattacacgaactgaaagtcgaaacatcagttcaaagtcatcccgaaaagctctcaacatttaatgaagaacatgtcgaaaccatattgatgtaa

SEQ ID NO: 7643 - DNA, 1098 bp, Photorhabdus luminescens
atgtctgcaatacaacgattaaccgatttgcaactattaaccgatttacaatgtaatggtctgaaatgggaaggcaattttggcttgtctcgtaaaggtggcgcagggccaagcgatcataaagcgctgagccttgacgggcagaccatgatgattcctgtgctgaaccttgcagtacaagattctccctacaccgccaagcctgaaccgcactctgacaaggtgattgtctttaaaaaccggattcctgtggcgaccttaactgcacctgcacgaccccgtttttatgatttaaaaaccgccgaaggcattgcctaccaacaaattgccaccttacatagccgtgatgtgctggcgacaacggtgttacagcattgcattcgtatgaaggacaaagcaactgcctgccaattttgctcgattgatcagtctttaaaagagggtcgaaccttgatccgtaaacgcccggaacaattggctgaggtcgcgaaagccgccgttgagctggatggcgttaagcaaatggtgatcaccacaggtacgccaaacacaggagatcgtggtgccaagattttatatgactcagttaaagcgattaaggcgcaagtcgatttgccaatacaggtacagtgcgaaccacctgatgattttgcctggttccaacgtttaaaagatgcaggagcggtgtcgattggcatgcaccttgaggcggtaagcgaacgtgtacggcagaaaatgatgccgggtaaagccgaagtctcgttggaaaaatattttgcggcgtttgaggcagccgttgcggtgttcggccgaggacaggtcagtacctacattttggccggtttgggcgataccgaactggaaatcgtggagatgagcgccaaactgactgaaatgggggtgtatccatttgtggtaccgtttgtgccgattcgaggtacaccattagagcatcaccctaaacctgatcaagcttttatgcagtcgctctatccgaaaatcggacaacaactcaaacaacatggtttgaactcggaaaatactcaagccggctgtgccaaatgtggcgcttgctcttcgctaaaagcgtatgaataa

SEQ ID NO: 7644 - DNA, 564 bp, Photorhabdus luminescens
atgaaactttctcactatccttggctgcttgagccaaatgaagggcggaaacaatttgttagcgatgacattgccatcaaaattgtgtcggaagattgggagcgtcgccaatattatcgtttgcgtgaaatgacctttcgcgatgaacagaaaatcttgcaagaagatcgtgacgaatacgatgttaaagcattaggcattgttgccattgagaaaatgttgggtgcgcatgatcgagtgattggcgcagtacggattttcccggatggcgaacagacatggtatggcgggcgtttatgcgtagaacctttatatcgacgtcgccatatcattggtaaagcgttaatcaataccgcggtatcgaccgccaagcacttaggatgccgtacttttttagccaccgtgcaaagtcaaaatgaacactatttccaaaggttgtgttgggatagtttgcgtcagttaaccattgccaacattccacatgtgctgatgcaggcacagattgaaaactatccattaccgcatgtcccaatgcaagcctatatgcaaaaggagacgcagtga

SEQ ID NO: 7645 - DNA, 1053 bp, Photorhabdus luminescens
atgaaactcaatcaattactcgaaatgttaaaacatacacctgcaatgcagtccaagcaggcgattgctcacaatgtttcaattgacacaacttgccatatggattcattggatagcttatatgcctatcccggagatgacacggcggcagtgtcgctaaatggtcaatatgtattgcacgcctgtgaaggcatgttaccaagctttgtgaccaatcatccttactttgccggatggtcagcagtcatggcgaatattagtgatattgccgcaatgggtggtcgggcattgtcggtggtgaacagtttttggcataccagtagcgaacatgcccagttgttaatgcaaggtatgcaggatgcttgtcgtgcttatggtgtgctattggtcggtggacataccaatattggggtggtttatcagcctactttatccgttgcgattcaaggcatagcacgaaaactactctcggtgttgcatgtcaaaccacaacaaaaaattctgattgctttaaatctgaaaggacaattccaccccaataccccttattggaaatgctttgagcgagtgtctgaccgcattttacagtcacaaattgccttgttgccgcaattggcggaggcaaatctggttcatgccgcccgcgatattagcaacgccggtatcttaggcagtttattgatgctgctcgaagccacagcatcgggggcacatatcaatttagataccattcctaaacctgagaatgtggactggtttaaatggctccaaatcttccccagttttggttttttactgacggccgatacaaatgaatgtgaagaaattattaagctgtttcaccgtcagggtattgcctgcgcggtgattggtgaaaccaatgccagtggtgtggttgccgtgcagcaacagcagcaatacggaatattttgggattttaaccaccaaatgtttaccggtttttgttatgccgatgcgttaaaaaagttacaggctaaatccgtacagattaaacctaaaagtcagcaggagtcgatgttatgcccagtgtga

SEQ ID NO: 7646 - DNA, 291 bp, Photorhabdus luminescens
atgcccagtgtgaattttactgtgaaatggcctaatggggagctgattcaatattactcaccctcaacggtgatttatgaatatctgtccattggtcagcattacccaagtatgcagttcttgcatcaagttgaaaatggtctgcatgccgcatcggaaagggtacgggcacgttatggctttttctgtagttcagccgtggacaatctggcgataatcaaacgccaagccaaattcttcgggttaagtccggaagatcaaattgaaattatcgaaatgacgaatcaatga

SEQ ID NO: 7647 - DNA, 1338 bp, Photorhabdus luminescens
atgttaagtatccaaaatcaaatgttacagccaaattatgatgtggtgattattggtggcggtcaggctggtctatgtatcagtcactatttgcaaaaagcgggtattgaccatgtggtattggaaaaagaatccgagttgacccatagctggtgccataaacgttggaataatttcactttggtgacaccaaactggcagtgtctattgcctgaacacccttatcaggggaacgaccctgacggctttatgaaaaagcacgaaattgtggcatatcttgacgaatttattgaaaaaactaatcctcccgccattttaaatattcaggtagaacatgtgaaaaaagtggcagcgcatgagtttgtcattgaaaccaatcacggtacaaccacagccaaacagcttgtcgttgcagcaggcgggtatcacaccccgatttatccaaaattaagtgataccttgcctaaccatgtgaaagtgatgcattcggaagagtatttaaatgtagagcaactgcctaaaggtgcggtgctggtggtcgggtcaggacaatccggtgcacagattgccgaagatttacatctggcaggcaaaaaagtctatttatcgacaggcaatgcaccacgttgtgctcgcttctatcgcggcaaagatgtggtgaaatggctgtttgatatggggtattacgaaacgactgtcaaacatcatcgttatagtgaagaggtacgtaacagtactaaccactatgtcacagggcgtgacggcgggcgtgatattgacctgcgtaaatttgccttagaaggtatgcaactgttcggacattttgatgactttaaagagggtcaattctggtttaaaccaaatttatcagaaaacctggaccttgccgatgctacttataatcgtattaatgcctcgattgatgagtatttagagaaaaacaatattgcaaccgatgaacctgcatcggtatatcaaccggtttggcagcctgagcaggaaatcacacacattgatttagcaaaagaaaatatgacttccgtgatttggtgtattggttttaaaccagactattcatggcttgatttagatatttttcaaaccaatggttatcccaaacatgaccgtggtattactatcgatccgaatgtcacatttattggtttgccgtggttatatacatggggttctggacgttttctggggatcgatcaggatgccgcctatgtggtgcaacatattgagcaacaaataagtcagcaaaatatacatatgccacctactctaattaaaggtgctaaatctaaaatcaaagataaaagaatatctcaaatgtga

SEQ ID NO: 7648 - DNA, 1005 bp, Photorhabdus luminescens; identical to SEQ ID NO: 6421

SEQ ID NO: 7649 - DNA, 381 bp, Photorhabdus luminescens
atggagcaacaaagtgaaaagctgctagtgtggataggcagcagcaagaaggacttgctgaacttgccgaaggacgtgcagcgcttctttggctttgccctagacttcgcgcagcgtggcgaaaagcatgatgctgtgaaggtgatgaaagggtttggtggtgccggcgttctggaagtgttggaggacgacataggtggtacctaccgagcggtgtatacggtgaaatttgacgaagcggtctttgtgctacatgcctttcagaagaagagtaagcacggcatagcgacgccgaaagaagatatggacatcatccgtaatcgactgaaagtggccgctgtgatggcccaggagatgaaaaatgaaagagaaaaccattaa

SEQ ID NO: 7650 - DNA, 288 bp, Photorhabdus luminescens
gtgtttgccgatctgggtttccgtgatgccgaaaagcacaaaattaaatccggcttggcctttgagatcatcaaatctatcaagcgtctggggctgacacaaactactgctggcgaacgtattgggatcagccaggcaaaagtatcccacctgttccggggcgatttttccaacctgtcagaacgtaagatgatggagtgtctgaatcggctggggtgtgacatcgagatcactgtcaagccgactactgcccaaaccgggcatttaattttggcacatagcgggtaa

SEQ ID NO: 7651 - DNA, 1005 bp, Photorhabdus luminescens; identical to SEQ ID NO: 6421

SEQ ID NO: 7652 - DNA, 153 bp, Photorhabdus luminescens
ctggggcacttgagttatttagcggtaaagtgggcgattcaaccggactattacccattatcggcccatgaatacttatacgttaaagtggcttctttagctgctttaccacataaatgccccaaggtaatgagatggttcccctcactctaa

SEQ ID NO: 7653 - DNA, 351 bp, Photorhabdus luminescens
ttgaattatgggcataaccattacgcactaaaactggctgtatctcagtacatcaatgaagatggtattcaaggtgcattggatttgcacactaaagcgaaaaaagactttatcaccgcttttcaagaaaacattctggtacccagagggttgacctataaactacagtttacttcaccgactggtagcagtgttgttgaatcggcgattaagcttgcacgtaaagtaacccaacgctgtcgagtcgttgcttttaccaatggttttcacggtatgacaggaacctcattaagtttgacaggtaataaggatcatcgtcagcctgtgatggatgcttatgtggagcgttga

SEQ ID NO: 7654 - DNA, 3183 bp, Photorhabdus luminescens
atgaaagaacgcatagtgttgcatgaacgaatagtgttgcatgaacaatttgatgcgatggttgagaatgctcctcacaagatcgccattagtgcacatcatgtagaaatgacataccaaaatgtgcaagaccgtgctacccaacttgcctatcgactaatggacttagatatcggggctgaagatgtggttggaatccatattgagcgctcttctgacatgatcatagcgatgttggctgcgcttaaagttggtgctgcttatttagcactcccacccgattatccgactgagcgacttcgttatatgataacggactcgcgtacaaggttggtgttaactcgaactatgatgaaagattcaacggtcattgaaaatgttgccactgtttatatcgatgaaatccaatctgtagtgccaaaaatcctgccacaagttaccagtcaacagctagcttacgttatctatacctcgggaagtacaggacgccccaaaggagtgggagtgactcatcatggcgttaccaacttcgttagccagaaacagcagtacgttcatttcggacctaatgaaaaaatattgcagttagcacctgcggcttttgatgcttctgcctttgaaatatggggagcattgactaatggcgcggcattggtattggcttctccttcatatcaagccattgatgagctaccgaaatgccttgttgaacatggaattacgatattgctactgacacctgccttatttcacgtattggtagattatcgcgaagaggctctggatagcgtacctcaattgcttgttggtggcgatgcaatgtcagtcactcatgcgtttaagtatttgtccaggaagcagaaattaggcaaacactttttatttaataacgtatatggcccgactgaaggaacgaccttggtgagtagttactctatgtcatcattaagtattgatgcgataaaatctcccttaggtaaacctatcgtcaatgcggaaatgtacttattggatgagatgttaagaccggtcaggccaggtgagcgtggtgaaatctatattgggggacagtctgtcgcacgggggtatttatatcaacctgggctaactagcctgcgttttttacctgatcctttctccacccaaccaggagccagaatgtttgctactggtgatgaaggcgtattgtcgaatgatggactgattgagtttgtgggcaggcttgatgatcaggtcaaagtgcggggtcatcgagttgagctggcagaagtagagcatgcaataaaaagctgtcaggatgtgagtgctgtttgtgttgtgctgaacattgacagtgatcgccatgttgaacaactggtcgcccattatacaactcacattgatcatacaactcataaaaacactgatgttgagcaagctatcatcactcgtgttcaaacattgttacccagctatatgtggcctagtcagtttattcagcatgaacagctacctttaacaagcagtggtaaagtggatcgtcgatttttgatgggttggaaagaggctgagagattagaagaggtggtatccggtgaactctccatgacagaagcactggtggcagagatctggcaacaaattctagggccatttgatgttgtgcctgatgctgatttttttgcgttgggaggcgattcgttattggctattcaggttatcgcggaagctgaaaaacgaggactcaatctgacactctctaccttatttcgtacctcgacgcttagggcgatgtgtaaagatttggtgctcccagaacaaacagataatggactaactcgcaatccggcattgcgtggggtttgccgcggtttggcacaaacagaagaagctctcagtcagcagaatgagaacccactgataaatgaaacggataagcaaaggttgcctgttaatatcgaaactgcttatccggcgacgagattgcagctagggatgctgtttgagggattatacagtggtaaagcaatctaccttgatgttattgctcgggatgtcaacttgccactggatgaaaaaatacttcacgacacgcttcagtcaatagccaaaaggcacccggttctcagaacaaaatttgatttggcctcttttagtgaagtgatgcaattggttgaatcactaccatcattgccacttatagtggaaaactacacaaatcttgatgatgaacagttggctgcacgtcacgaaaaagtaatggttgagttaagccaaccatttgatcctgaagaggctcctttaatgagggtacatgcggcggcattgaatgaaggacaatttcggttagcttatgcctttcatcatgcgatccttgatggttggagtgagtctgtttttatccttgagcttttgagattgtatcaagccaatttagttagcgagtctgttttattggagcaaccggcaccattgtcagagtttgtcagacttgagcgagaagcgctcgataacgacaaggcgaaacagttttttagtcaatattcagctaaagaaaaaacggatagatatcaagatactgattataggaaagcagtactggtcttgccggaaagaacagtggagcaattgttaaaaaatgtatcagattggggcattccgttaaaaagtatgttttttgctggtttctatctgacaacagctcatcagttacaagatattgactttgttgcagggatgtctgttaacggtaggcctgagatggaaggtgcggatttaactcttggactgttccttaatcatattccgataaagttgaatcttgactctgctaataactggcaggcactggcaagacagtctttcgatgctgaaaaagaaatattgccctttagacgctttccatattcagaaatacaaaccatgttaggagggccacccttcgaggctgcatttagctacgttcattttcattctcgcaatgagttattagagcaagggttggtgaatagtgatgaagatgtgcgtgaccataccagcttaccgattagggttgagttgataaatgatttgaaaggcgaaggtattttaataaatgtgacagcagatgaaaaacgttatggcacgggattcgctttagcgttggccgaacgacttagtgaaaagatagaagacatagcatttgtatccgagcagattatttaa

SEQ ID NO: 7655 - DNA, 1236 bp, Photorhabdus luminescens
atgaatcttatttcaaacgtagctaaagtgccggataacataaatctcactgaccccctgactcatttacgtcctgatatagataacatctggcggcaattacgtaatgagtcacctgtcgcttggcatcctgcggtcaatggtcaatcaggattttgggttgtcagcacccatgagttagctatgcgggtttaccgtgatagtcaaacctttacctctgttcgtggaaatgtcatggctacactgttacatgatggagacacagcgggtggtcgcatgcttgcagtgtctgatggagatagacaccgtcaaatccgtaaagagttgttaaagtctttcagccctaagaacctgatgtcggtacagaaaagaatcaaaaatgcgatgcatgagcttgtacgtaatgcagtaacatccgggcaatgtgactttgccactgatgtagcaccacatattccgttagcggccatatgtgacattttaaaagttccagaatcggatcgagcaaaactatttgtcaatgcaagtgcagcactggcttcgaactctttgtcagttgataaagtagatacccgcctcgccagaaatgaagtgttgatgtatttctataaatgtattcagactcgcaaaatcgcgccattggaagatgatcttataagtaacctgatagcaatgactcaaaactccctggcattaacagaagaagaactcgtcttcaattgttatagcgtgttactgggtggcgatgaaacaactcggttggcattgatagggatcataaaagcatttgccgaatatccagaatgctgggctcaattgcgacgtggtgaagcagaaattagtaaggcagtagaggagttgttgcgatggaccacgccggctttacatggtggtcggaccgcaacggtagatgttgaattaggcggtcagcagattagggctggtgatattgtcattgtttggaatcggtctgctaactttgatgaaaccgtctttactaaacccaatcagcttgatctgaatcggagtgataatcggcatatttctttttcatatggggctcatttttgccttggtgccgctcttgccagaatagaaattattgcactgctggaggcgcttgtggagctcgttgatcagatctctttgagtggagaacccagccctatctattcgacttttctatctggttaccatcgcttgccagtcaaattgactgctgcacattattcatag

SEQ ID NO: 7656 - DNA, 1524 bp, Photorhabdus luminescens
atgagtgatgaaaatacccaaacacaaatgaagtattcatcccgttttgaaggtttgacggatgaatatttggttgtaataaatgatgaagagcaatatgcctgtgttcattctgaatggcctgtcgctaccggatggcgagcgaccggttttagtgggacgcaagaagcatgtaaaaaatggattgaagaagtttggaccgatatgcgcccggcttctctgcgtaatggcccacaatcctttgataatcaacctctgatagtgatttatgatgaaggcgcagcccttcccaaagatattgtcactgaattgaatggggttgcaccacttgtacttgttatcaattcaaacgaacacacaagagagcgcatatcctacttttcacgatttggtcacgtagttgatggttctgatattgcaagggcggtatcagaacttgctcaccttaatcctgcggggattgtgacatttagtgagcgtgccttacgtcttacagctacgctggcaaaacacttgaatttgccttttcacaatctcgaaacggtctatcggcttactgacaaatataagcagcgagtggctttacaagaggctggcattgagtcgataagattctacctcattaacactgtgtcagattgggagcaagctgttgaacaggtttgtcttcccgcagtgttaaaaccagcctatggtggtggcagcatcgatacttatcttattgaagatccgcaaacaggaaagagccttgtagaaaaactgctttcaaataaacaggttggatttgatggtggtcgttcactggtattggaagagttcctccaggggcggccatcgttgccttttggtgactatgtctcggttgagagcttggtggttaacggagagattaagcatataaatgtgaccggcaagatgccacttagtcccccttttcgtgaatatggtcatatctggccatcagttttaagtgatagtgaacaaaaccaaatctatgcattaacgtcaagtgccatcaacgtgttaggggttaatcgggggatcacccataccgagctgaagttgaccgagcagggacccaggatcattgaagtaaatggccgagtgggcgggggtatcaacgagatggccaaaatcagcctcaatattagtctgcttgaaatggctgcacgattagcgctgggaaaaatgattgatctccctgtgttcaatcctgagcacgtctatttcaatatctgccatattgcgccaacacgtccatgtgaaattctccgaattaatggggaagatgaacttctctctcttgagggtgtatcgtcatatcgcccatatgtatgggcaggagctactttgccgggaggctcacaaaccaatgaaattaacatggtgttgggcaaagtggataaccataaggcatttctggatatttatcagcgtatggggcagtgcttgcgttttcatgttcgatttatggacagtgaagccgttcaaattcttgatgcgcatgaattgggggcgatatga

SEQ ID NO: 7657 - DNA, 765 bp, Photorhabdus luminescens
atgaaacgtgttcaactgacgccaggattatggaattactgcgatcgacagcagacgacaatgactgttgtgattgcgccttttggcggcggcagtgcttattctatgaccgactgggttcagcaactgttgactgatagttatcgagtgctggtgcttcagtatccgggacgaggttctcgaagtattgaaccactccctttatgtataagagatttggtggctaccgcggcaaaagatgtattgctgcatacacaggggcctcttcttcttattggtcatagtatgggcgctttgttatgtcatgaactggcattacttttagaacaagctaaccgaaccgttgaatatttggtcttatcagcagcacgtccaccacatttgaatagtatggtgccagaagagatactccgtatgagccgggaagcttggattgaagagctaaaaaccaatataggaaatgaagataagaaactgcttcatgcggatgtgcttgatctcatgttgcctgtattgcgtgctgattatttgttagtggctgagcacaaacaagccagtggcaaggtacattgccctattttagccattggcggtgatcgtgacccgtgggtgagcccatatcatttacaagagtggcaatcgctgacacatgattcttgccaattagtcatgttccctggagatcacttctattatcgagatcagctttacgacatttatttgtatatccgtcaaacttgcttaaaagaaggaagtctgcgctaa

SEQ ID NO: 7658 - DNA, 180 bp, Photorhabdus luminescens
atgaattacagggtggtatgtaacaaagagggtaagcactccatttggcctgaagggcggatattaccgttagggtggcaaaatgtgggtttttcgggatcagaacaagaatgcctggattggatagctacatattggagtgatcctaaattgaaagtttccgcagagacgttggaatga

SEQ ID NO: 7659 - DNA, 1647 bp, Photorhabdus luminescens
atgacggggttaacccactttttcccatcaaaaatgttgccttctttactgagtttagtgcgcagattttcctttctttacttcatcagcatggttatatggacgctgatccacggcttacctttggtcgttggttttgccatcagccagcttcttgatagtgctgttatcgatcccgtaggctcagcggtttggtggctattggcattggcggtaggctcaatggtattacgctcagtgatactgatttttggcttacagattgattttacccttatttttaaggtcagcgcatatcttaaacaacgcattctggagggaataaattgcagccactctggcgcggatctgggtctttctcaaggggatatgctcaaccgtattcgtaatgacagtgatgaagtagcctcttttctcggttggacagcggatttcttctaccgagcggtactattgttgatagcacttgtggtgttgctgagtactgacattgtgacgacattggcgcttttaccgatggctggtggtttgtggctgggcatagctctcaaacataaggtcggagcattacaggaggagaaacgtcaatatcaaggccaaattgcgggtcgtatcaccgacatattggcaggaatccgtgaccttcgccttggtggaaagttggatctgcatattgagcgactttcggcaagttttgaacgtcgtcgggcggtgcaggcaaagcatcaaatgttcactgatctgctgtcggggctatttcgtaacatcgtgatgctaggtacatctattgttttgattattgtcagtacccgaattgtcagtggcgatttcactattggtaaattggctctgtttttgacttatatcggttgggtcagtgagcagatcttctttttcggtcgcgccttggctaactataaaaatgccgatgtctgctacgagcgaattcagccactgttacagacagagcagcctgccagcgaagcccctattgctgatgacatcctgaaatcactgacagtgagggggctttgttgcaatagcgatacgcaacctatttcgtttacagccacacccaatcaactgattgtcgttaatggagaagtgggttccggtaaaagtcgtatgcttcgcggtctgctcgcgctggaacgacacttatcaggaagtgtgctttggaataacaaagaagtttgtggagacgtcgattggtggcaaagccctaaagttacttatgcccgtcaaggtgctggctttgttggcggtactgttcgagataacttggcactgggtaacgacgctgtcagtgatgaaactatggagcgggcgttaacggcagtatatctgaaaccgggttcatctgatcttcctgaagggcttgatactgtgctggggtccggtagtgtcaaacagttatcaggaggccagcgccaacgtttgacattggcccgtatgctatgtcattcagccgaagtttatgtcgtcgatgattgcgattcatctctggatactgataccgcccgagccatatggtcagcactgcctaaaaagtggtcggggatctggattgtagcctcgcaaaatattgacctgcttgctcaggcggatcaagtggtgactatcaaacggcggagcgaaacatcatga

SEQ ID NO: 7660 - DNA, 1755 bp, Photorhabdus luminescens
atgaaaatacaaacgaatatgcaaggtatgaattctcctaacccattaacaggttttaagttgctttggcagagcgcccggacaatgaaaaaagccattattggcacctttctggcattagttgtcacactggtttgtgatttagcggggccatttgtgatccgtcattacattgataaagcgaccgcaggtacttttgtttatgaacttgtcctcttggctttaggatacgcaatcatctcttttgccggtgttatcgctggtctggttaccagttattgcagtaccagtgcaggttggggtattgccgatgcgtttaggcgtcagctatttcatcatgttgtgcacaatcggtctatcctgcaaattgaaagtgaagctcagggtaagctccttgaaaagattgaggggaatgcggacattattggaaaaactattgcggaatccggattccgaattataggcaatatcgcattagcattaggtactttggtgattttgttttctattatcccagaagtaggtatcgcaattaccgtgttagttctcgttgtggcttatgttctggtgaaacttactaaccttgcagtagtgcgatggaaaaaagcccgtgaagagaaagcccacatatttggttttatcggcgatgctcttgctgcgaaagatgatttgcattcattgggaagacgccgttggcctgctttgcaactacagaagatgctttctggcttattaaaaatggaacgtaaagcctatgtcagcggacgcatattttggccgattacccagctattttttgccttgagttttggcctgggttttggatttgggctgcaattactcggtcataacagtatcagtattggtacgttaaccatgatttatctttatgttgaccgactcagagagccaatggaagagatgtcttcggaggtagatcaggtacaacaattgatggcgaccttatcactggtagtcaagatgttgcgagatgaggagaaagtcaatcacaacagtgtagagaatcagctacctgaaggccccctgtcagttcaatttgatcaggttgactttcgctatgaaagtcagggtaagcaagtcttacataacgtgagcttcagtgtggacgctggaagcaaagtaggcattgttgggcgcacgggggcaggtaaaagcacattactcaatctcatgtgtgggttggctcagcctgatagcggacgggttactcttgctggtgttgaggtcacttccattcatcctgatgaatttgccaatcgtgtggcagtgttaagccaaaaagcgtatctcttttcagcaacactacgcgaaaatttaactctgttcgataacagcatttcagatgatgcaatttggtgcgcgctcgaagagttagagatccataaatgggcgaagacattaccagaggggctggatactttggtgggggttggggggcgttcattgtcggaaggggaagtccaaatgattgccggggtaagaaccatgcttcaagacgcacaattaatcattatcgatgaaggcacctcgctattagatcctcgcactgagcagagttggatgagattactggaaaaaattagcgctaatcgtaccgtgatcatcgttgcccatcgcctgcacacattatccactgctgaccaagtcattatcatgaatgaaggccgtgtcgaggaactccttcatggcgcagggatcaaaacgttaacaaaacatagggaacttatatcatga

SEQ ID NO: 7661 - DNA, 5010 bp, Photorhabdus luminescens
gtggataaaaaaatgacaactatgaagctgattgatcgtgaatactggctgatgcgggttggtgatttaactaaggccgctgccacaaccgcagatatttttcctcaccatgagggatctctggtaagtgcgcaatgtccgcttttccccaccgttactgaccggctaaaacaagtagcgggcaactctgaattgctgacatgggcaattttggcggcagtgactagtatcgtgttgcgccgtattgggggcgtatcctctgttgtgttgcatattaacaccgaacaaggcaagcgtttgcctgtcttattgacggtacctcctgccgtgacttttcgtgaatggttaagccatgttcgcatggccgctgttgaggctattaatcatggatcgatagacaaggcgctgttgatgccgtttttggagcatttcatgcctattgtcgttaattgcgctcagacggaaactgggatagctatcgagcttattgatggtgtagtgagtgtgagtggaattgttgctgcgactcagacgcttcatcacttagcggcaggtatcgcgacactgttaaacaaggggcttttcgatctcgacatctgtctaaataatatggctatcgtcgatgacgcgatgcaaacaaaattgctagccagattcaattcccaacctgattatagctcaggaaaatcattttatcggctagtgttggagcaagcggaaagtaacccccatgcgatagctctccgtgataaaacagaatcgcttacctatcgggaactatttcagttggcgttatcggtagcattgaagttaaaaaatgctggcattagtgccgatgatattgtggcgctttcagcaccacgcagcgctcgatttattgctgttgctaccggtattttcttctcgggtggtgcttacttacctattgatccaactttaccgaaagcccggcaacagcacatgctaaaacatgcgaaggcattgattgcagatcatgttgtggatatgccgcagatagtttggttctcattcagtgaacttagttttcaaagcccggttttagtggatggtgatgagataaagttacttaatcagcaggtaactgagccatcaccaagcgaattagcttatgtaatctttacttcaggctcgacaggtcttcctaaaggtgtaggaattgaacatcgttctttccttaatttactggtatttcaggtccaaaactgtgaattgaaactaggggtgacattgccgcaaacagcacccatttcgtttgatatctcagtttggcaaatgtttactggattgaccgtaggtgcgacggtttccattgtctctgatgatgttgtaaaagatcctcaagagttaattcaatacattattgagcagaaatttgaatatattgaactagttccttcgctcattgcagttatcctggatatccttgaacaatcgatttcattgaagatgcgggttcagcggcagttacgtgggatgatctcaactggagaagtgttaagtacggatctagcacgtcgctggcatcagtgtatgccaatggtgacactgctaaatgcttatggtcccgctgagtgtaccgatgatgtgactcaaggaaaggtcgaagagcaatctgatgggctatattgtccagtgggtacgcctttgccaaacgtgacaatttatgtattagataaagattttcaacttgttcctccaatggtcggtggtgaaattttcgttggtgggccgaatgtcgggcgaggatacatcggcagtaatcgcttcacggcggcggcttttttgccggacccatttctgcctgtcccgggtgcccgtatgtatcggacgggtgatcgtggtcgttggcgagaggatggcatattggagtgccttggccgggccgacaaccaggtgaagattcgtggtcgccgcgtcgaacttggagaaattgaagcggtgctggcaaaccatccggatgtagcgatgtgtgcggttgaacttgttgatatgagtggctttgagcaattaagtgctttcgtgacgcagacgagtgataccgttgtggatgccagatcattgagtaaatttttggctgagcaattgccggattatatggtgccgagcaagttttattttcttgatgcactgttatgtaatgctaatggtaaagtcgatcgtaagcaattaaaggcactggcaaaacaacaacctgaatctgcttcttatgttgcaccacgcagcaagttggaacaacagctttgtgatttatggtgtaaatacctcaagctagccaaagtgggcatcacggatgattttttcgctttgggtggggattccattattggtatccgtctgatacatgaggcgggctctttggggatcaatttgcgtcctcgtcatgtgcttgaacatccaactatcgcttcacttgcaaaactggcgagtaccaaaggtgaaatggcagcaaattcaactccgcgtatagaaaaagcaccattgacatcaatccaacaatggtttttcgagcagcgattttctgaacagcaccattggaatcagtcacatgtgatcagtacaacggagccgttaaatgcagaagcattatccttggcgatacagtcattagttgagcaccatgaacaattgcgagtttgttttcccaaagagaagggaaagcattatcaagccttgcgctcgccttatgacaacttactttggttcgctgaatcagattgttcggaagaaaccatcgccaatgaggctcatgcatcattatcaatcgaggaaggaccgttactacgaattgtaatgttggatgattttcgagttttgctgacattacatcacttaattgtggatcaagtttcctggcaaatcttgctggaagatcttgaaactgcgtatcaggctattattcaaaaagaaatgccgaggtttccgaggaaaagcacgcaatatctctattggtctcagcaacaagcagcaatatctccccaaatacttcctccgatccagttaactgcaccaattgatgtggtacaggtgaatagtcatgtaagtaacctttatggcaaacgttcggttgctgaggtcaagttatctgagtcagaaacacaatatattcaggaaatttcggcattagtgcctaacggaggaatacctgcggttcttttgacgggacttgcaaataccattgctgttgaacagggtaacggtcaactcttgattgagttggaaggttatggcaggcaagaggaaaacaagtctattgacgtaatgcgaactgtggggtggtttacaacaataggcccctttgtgctaccggtcaatgctatggttacggtagtcgaagttgcgactgcaatggttgaagctagtccctatatcaagacccatttacaacaaacttatgttatggagcagaatccaaatattggattcaactatttagggcgcttcaatacgaagcagcagaatgatggctttttcagtgtagaagaagatattggaatgcggcgggcagcaacggggcaccgtccactggaatgggaaatcaatgcggccatcgttgatgggaaactgattattacccttgagtacatcccctcccgtcataatgaagctgcaattaatgtgttgttagccaagtggaagagtgcactaaccaaagtcagatatgcaccgaatgaattaagtgatctggcccctttgacaccagctcagcatgccttttttgagcgtgataatccaaatgaaaatcattgtaatcatggtgtgttgtttacactgagtcgcactttgtcattggagactgttgaacaggcagcagcagcgctattggcccgattccctattttgggagccagctttatggttactacattggggaggtggcaaggaattaacccgcaagcccgtatcgcaattgaacaatttgaattgcagcagatagccctaaatagcttatcgcagaaaattactgagttagcgaatataggtcataagtcgttagatctgctgaatgggccaatctgccgcatacaactttatcgaactgctcataatttgccggacaagttgttgattatagttcaccacttggtagtcgatccttattcctgggatttacttacagaggatttagcggcgttgcttggcggagctgaagcccatgaattagatattccgacaacttcgtatctcgcttgggccaggcgtttacaccgattggtgcaggatgatccagcgttgtttggtgttcattattggctttcacaaccttatgaacaggcacagcagttagtaagtacggatgctattggcattgaggcgaatagggttgagcaaacaacagtatttgatgaagtacagactcagcagtttttaaaaccatctgagcacagtcaacttcccgtacttgcccgattactgactctgcttgcgcggtctttagaaagccattttctttccagtgccaacaatatccttgttgagttgggaggacatggtcgagaagacctattcgacgaagttgatttaggacgcactatcggctggtttacatgtggttttccgttcctgttgcccttttcgatgggacgcagttttgatgaacatgcaactgatgtggcgcggttgttacgtgaggtacctgttcgagggtttggctttgaagcacttcgctatctttctgttaatcctaaaatcaccgaaaaattaaaggcaattcctcgaccacaattaagactggattttgaaggagagcttttatttctgaatacacctgatgaggagaaagttaatccgatctttattgatatcaccacagagggaacgggttactggaagcctcaggtaacaccgatggattatttgctttgctttaacatcagtgtgaatgatgggcagatggaaattcgtgctcaatttgcaggtgatgtcatgccaaaagagcaaataaaaacggtcctatctgaatttaatgaacggataactcataaaaattaa

SEQ ID NO: 7662 - DNA, 3804 bp, Photorhabdus luminescens
gtgacgacactatattcagatgatgcggtcgccataattggcgtctcttttcggttaccacaatgctcaaattggcgtgaattgattgatattttggctgacggtcgggactgcattcgcccaatacctgaaagtcgggtggctaatacggggcaaattcttacaggcaatgagaaagaggggggatggcttgatgaaattaccgggttcgatcaccgttattttggtattgcactaagtgaagccgaatatatcgatcccagacaacgtatagggcttcaactggctacagaagcgattgtcaatgcgggatacactctgaaagagttatctgatgcgcgtacagcagtacttgttgctgcgcacggcgggccgcatccagatctttttcagtcgttatcggtacagggaaaagccaatccgttcgctttcatcggcagcttgcatgctttttcggcgggtcgcattgcgtatctgcttgatctgcgtggcccagtttatgccatagatacgggatgttcatcatttttggtcgcacttcacgaagcacggaacaagattctgacaggggaggctgattttgctctggtaggaggctgtgaacttgttttaggtaccttgcctcagagtagtaagaactcaagtgggttaggggttgagtcaatgacagatcgatgccgtcctttcgatgcaatggctgatggtgctggatttggggaaggaggcggttttgttctgcttaaacggttgagtcgtgcacatcaagatcatgatgttatccatgctgtcatacgagggagtgcgattaatcatgacggtggccgtagcaatggtatcactgcacctagcagcatcgcacaaaccgaggtgattacggcagcatggcatcaagcaggggtcacagctactgatattggttacatagaagctcatggtacgggcactaaaattggtgatccgatagaagtacaaggtttagtcgatacatttgccgcttatgacgtgcaacaggagtcttgtgtcatctcttctgtaaaaagtaattttggacatttaagtggtatggctgggttggcggggcttgttcgtattatagctcaattccgcactggtcagattttccctacggctcacttccaacagttgaatccattgtgtagatctacagaagagctgccgatacgtgtctcttcttcttgtgagccgtggccacgtcaaggtcagcgtccttactgcgcgggaatcagtgggtttgggctaagtggtactaatgtgcatttagtcgttgaagaggccccctcaactttaaggcacaaaaaatacgagataaatgagagattggtgctgatatcggcacagacgacacaagatctcagcacttacctaagtgctataactaatgcgttatcttcaaccgaagcatcaattgacgagattgccgatatattaatgttgggacgggagcatttcccatatcgttggagctgtgtggcttcatctgtttcgcatttagtgcagcaactcacgaaccacggttcaatctcgctatcttcatcttcaccatcatcttcgttatctgttggtcttatttttgatgaatgctctccaatagatattcaactattgatgaaacgaggagaaacatttccagcttttcatcgtgtaataaaacaagcagagaacttatgttcagggaaaacttggacgcttcggcagcgctggattatttggttgttgggacatcacgcggtattgacagcgtttggggtgacaattgacttattactggcctacggtgtggggaaattggccgcacaggtcgtcgatggtggtcttgaatttgttgatgcattgcgtcttgctgatgaaccggtcactgattcaacatttgatcaccagcgtttgcaaaccttgttgcaagaacaggctgaactatgcttggtgagattcagtcgttgtggtgagcttgcaacagccattaacacgttgggttatcagtcatacgatagtgaaagatctctgttgacattgcttggagattggtttgtcaatggcaccaatctggattggcagcaagggtgtgaacgcaagataaatcgtcgtcttgaactgccatttgctccttttgttgccacctattgctggccagagactattgagaactctgctatggtttctgatgttgtaccgcacacttcgatatcaaattcaggagaaaatgttgaagagatattgttgactcaggtcagagaagtgctgaaagagccgaaattaacacttgatgatgatttttttgcggctggaggtaattcacttaatggtgagcagcttgtggttcggctgaacgaggtattaggtacggatctgaaattgatggatttgttggattgcctggatctgaatgagttttatcaattggtgaaagacagtgttcaattatcctccgtatctacaacaccggagatagaaacaaggaacaataaacatgtactttctggtcagcaattagcaatttgggcggcaacggaaattgctggtgagtctggcgcttataatgttcccgctgctctgcttatcaatgcggaggcggatgttgcctggctggagaaaacgctaactgaacttgtcttacaacagttgatgctgcgttgtagtctggaatacaacgaacaaggcgttaacccggtaatccatcctccgatgcaggtcaaactggttcatagtgaagtcgatttaacaaaatacactattgcaacgggcatacccgttctgactcagcgtctacagcagatggttgaaacgccgctctcaccttatggtattcctcccacacgattcgaactgttgcaagtgaattttagcgatggagtacgtcaagcactattgctgaattttcatcacctgttttttgatggctggtcatggcgattggtattggcagctcttagtggtggcaagatatctccgcctgtgaacgactatttaaattacgcgatggagcaatataccttacttgaaagtgaacagggtcgaaaactggaggctttctggtatggatatttggcaaacatcccaattctgctgctgccttgtgatggtgagggcgggacagcatctaacctccagggtgctaatttacctgtgatgatatcgaaggatgttaccgagaggttgaggcagatggcgatgaattctcgcgtaacggtacaaatgataatgttgacaacttgggtggcattacaatggcagataagtgcgcagcatgatatttgtgttgctatgccggtggctaaccggcaactgaaagatgaaaacaccattggttgttatgttaataccgtgattgtgcgtgcacggcttgatccacaccagccatttcacgtagtgctgaatgcggttaggcaggcatcactcagcgcgatttcacatagtgcatttccttctgatcgaatccagaaactgatggcaaatacctcctatcatctcaccatgtttgattttcagaatgatgttgatcctattagggtattagggggaaatggagccgttgtcgaattgctggatgtcgatcctaatggcgcaaaatatccgctcaatcttacctgtattgaatatggtgatgagcttcaagcgcgattggaatattccgctgcccttttctcacaagacacggtttctcgctggttgaatatttatatagaggcactgacacggctgatgacattaggcgaagaaaccactcttttcgccttgtttgatggtcaagacgatgttcttagcgatattccagattttcagttctag

SEQ ID NO: 7663 - DNA, 1785 bp, Photorhabdus luminescens
atgcaaacatgggacactttgacagaatcaagaacttgtgcagatctttttgccaattcagtaaccacttcagattcattatatgctgtacgccatgacaacattgcacttacttataaagaattggcagggaaggctggtgccattgctcaattactcatttcacaaggagtggtaaatggtgatgttgtggcaatttttatggaaagatctgctacaagtcttgtagctgcattggctatctgggccgttggcgctgcatatattcagttagaggtcagcgaacccgacagtagaattaatgaattaatagagcgtgcaggcggggttacagtattaactgatgatttgaactgccgacgtattgaacaccattcttacattaatcttgatagacaaatattagatccacaggaatatattccggtatcaggtcgcaaagccggtgatttggcttatttggtatcaacttccggttcaacaggaattcccaaacttgttgcaattgaacacagcagtatcatgaattacgtctcggcatttgttgagcgtgtatcaccaataccctccagtttggcgagtacaacaacttttgcttcggatcttggtaatacgtctattttcgttgctctgctaacaggtcgtactcttgagcttatcaatcgagaaatgatgctggactcaatcgcgcttgctaagcatatcagtaaattttcaattgaaatgttgaaatgcacgccttcgcaattagagatgttatccagagaaggtaacctttcggaattattacctgaaaaagtacttattattggtggggaagaactaacttcggcacttgctaaaactttatttgcagcaaaccccaatctgagaatatttaatcactatggcccttcggaaacgactattggtgtattaatgcatcagctaaatggaacacgcctaggcaatgactcaattccaatcggtaagcccttaaatggtgttgaaatagctgtattggacgacgccaggcgaccagtttcccccggggaagtggggcaattatatataggagggcgtgcgctggccagaggctatcatggggatcaagatctgacagaaactcactttgttgatatctttggacgtaggttttatgccagtggtgatttggttaaacaaaacgagcaaggcaactatttatttatcgggcgcgtggatcgccagctcaaaatccgtggatatcgaatccagcctaaagagattgagaatgccttgcttgctgaacctgggattaagcaggttgttgttaccagtgtaaaatctgagtttcaccagattgatgaactggttgcttatgttgtgggtactgcgagagagaatgaactactttcaaacttagctacccgattaccggccagtcatattccatccagaatctacaacattgatgaaatccttgttaatgctaatggaaagcttgatatagcgcgtttgcaggcttctgttaatactgttgaatcgatttcttctgatgttaccgttccttgtaatgacatagaaaagcttatcttagatatttggcgtgaagtgcttaagcgtgatgatattgatatgcaggctaaattcctggagtcgggaggtgactcattcaagtcgttagtggtttttgggcgattacgtcgtcattttccaaatctcactgttgcccaactatttaaatatccatccattgagtccttagccaaagtgctcggtggcgagagtacagctcccaataaaactaaggtggtacagttgtga

SEQ ID NO: 7664 - DNA, 792 bp, Photorhabdus luminescens
ttggattatgaagaaccatcaacaccacgtactaaagtcaatgatcgggtgttcacttctacagagtaccctgctgatcaacgaatacctttgcataatgaaatgtcttaccggcgtacttggccaaaatatttatggctgtggtcacaaaaagctgctgattctggtggtcagacaacattggcagactatagaaaagtgctccaacgtctctcgaatgaaacccgtgaagaatttaaaagtaaaggtgttttatatgaacgacgttataacactgggtttgacttaacttggcagcaagtatttcagactgaggaaaggagaatagttgaagagaaactcagatctgaaggtgttgactttgagtggttagatgaagagcagttaatcacacgacaggttgtacaaggtgttgtgactcatccttacactggggaagaaagctggtttaatcaagcgaatctgttccatccttccagtttgcctgaagaagttcagcttgctttggaagctgcactcggtgtggggatatttccacgaatggcgaaatatggcgacggtactcttatcagcgcatccacattaattgaaattcgagccgctattgatgcggagacagtgtacccggattggaagaacggtgatgtggcggttgttgacaaccttgctgttgcccatggcagggaaccgtttagtggagcacgcaaagtctatgtgatcatggcttcaccaatgcattgcaattttttcctgccaaatgaggacatgagatgcaaacatgggacactttga

SEQ ID NO: 7665 - DNA, 1017 bp, Photorhabdus luminescens
atgcgttgcgcttatccaactttttgctattatgcacccgatgtggcttttttttacacaacgatgttatactcaaatcgtaaacttcgtccattaaataccgatgtgacgacttttgattttaagaatattaaaggaaacttcacgatgacacataaaagatacagcccctcttgggaaagctatatgggcgattttctaagaggtaactctgggattaatcatttgaaacctcaatatcagtcctttgatgctattggtcttgagaaacagttaaacgagaatacaacgtatattgcgttgctatccttagaggaagcgaaagatgttttagaggatattgattcgccaaaaccaaaaagtccatttataaagaaagtgttttcgattaccgatcctatatcaccctatgcaggtaatatacgtgatgcttttgactttgcaaatgtagtaggagaatttaaaaaattaggaattaaagccacagagtatgttggtaaaaatgggcaaagatatattaaaatctcaggtcatgcggggcttagaaaaatcatcaatgcttcaagatacagtgcttctaacatgaagatgatctctatggggatagggcaacagggaataaatagtagcatagttaagggagttaaattcaatatactattttcctcagcttatcgagcggttgaatacatctttaaggatgaatacacactagctgatttcttaggcaatatttcagtagatctggctaaagcagcagtagcggcttttgcttcttgggttattggaacttttgcagcaactgcatttgctactggtgctagcgtaattgttgtggctggtattatgcttgctattggtattgcaacgacatctatacttgattctatagataaaaattttaaaattagtgaaactataattaatttgatcaaaaaagaattagaaagaaaaccaaaaacaccagaagctaatttcaatcaatttcttcataactgggggaattatggtaaataa

SEQ ID NO: 7666 - DNA, 402 bp, Photorhabdus luminescens
atgataaataaaaaaaagattatgcatattataggagctttttcttttattattctaacgttatttacttttttttctagcggagaaaatttaatttccttagttaaaatggaagataaaataatattctcaggtcctgtttttatgctattttttgcttttcctttcctttcatactttatagtttctgttattttccttaatataaaaaatcgctggccaaaacatcacgatagttttattaactgttttggggtgattgccattgtttcattctttttaagttttcccctatctttttatgtggattataaattaaaaagtgaaaattatttaatatgtgaaaaaatatcctggaggtcgcctaatacctatgtgaaaaacattaagctatgtgattaa

SEQ ID NO: 7667 - DNA, 855 bp, Photorhabdus luminescens
atgaagaaccgcaacatcactgtgcatggctctattgtgaccattaccacccgtcatgatcaggactacatctcattgaccgatatggtcaggagctttggggacgagagtatcctctataactggctgcgtaaccgcaatactatcgagtttctgggaatatgggagcagctctacaacccagccaattttaaacctctcgaattcgagaggtttaaaagccaggcaggtttgaacagtttttcactatcacccaaaaaatggatcgatgctaccggtgccattggcctgtacgccaaatcaggccggggtggcggcacttatgcccaccgcgatatcgctttcgagtttggttcctggctgagtgcagaattcaagctgtacctgatccgtgagttccagcggctcaaggaagaagaagcccgggttaactcattagaatggaatttccaacgcaccctagccaaggtaaattaccgcattcacacggatgccatcaaagaaagactgatccctccgcaactgaccaaaacgcaaactgccattatttatgccagcgaagctgatttgctcaacgtggctttattcggtcagacagcggctcaatggcgacaaaacaacggcaatcaatccggtaacatgcgtgaccatgcaacacttgagcaactggttgtgttgtccaatctggagagcatcaatgcggttctaattcatcaggaactacccgcaccggaacgtctgggtcagttgaatacgatcgccattactcagatgcgctctctagttggtctgtcagatgtcaaacagttgggaaagggttcacaacaattacctgatccctcatcgacacagtaa

SEQ ID NO: 7668 - DNA, 225 bp, Photorhabdus luminescens
ctgaaagtatttattgctgccttcgtctttttcctgctggcttttgcgggaatgtcgttaggctatatgattaaacgtaagagcatacaagggagctgcggtggtttaagcagtattggggtggaaaaagtatgtgattgcccagaaccttgtgatgcccgtaaaaaacgtatggcgcgtgaagctgcgcggcaggttcaattagagaaacatcggattatctga

SEQ ID NO: 7669 - DNA, 1029 bp, Photorhabdus luminescens
gtgcgtaaaaagataagtagctggatagcgttaatatttgcagtattgctgctggcggcatgcgatggtctggagcagaaaaatattcatgggcaaacaatggggacttactattccattaaatttgtcacgggttcatcggctccttcgccagaagctctgcaaaaagagattgatcgcttgctggaggaggttaacggtcagatgtcgacatatcgccctgattctgaattaagtcgttttaatcaaagtcgccaaattgatcggccattcccggtatcacctgcgacagccaaagtggttaaagaagcgatctacattaataaattgaccgatggcgcattggatgtgacggttggcccattggttaatttatgggggtttggtcccgaagggcacgtgacgaaagcaccttctgcgagtgaactggaaaaacgccgtgaatggactgggattgataaactggtggtagaaggtaataacctgattaaaaccgttccagagctgtatatcgatttatcatctatcgctaaaggttatggcgtagatgttgttgctgaatatctggaatcacagaatatcaaagactatatggttgacattggcggtgaagttcgtacatcaggtcataatggtaaagatctgctgtggcggattgcgattgaaaagccatctgacactggcatggcacaaaatgctcaggaagtgataatgcctgggaatatgtcgatagcgacttcgggtgattaccgtaattactttgaacaaaatggcgtgcgctattcacataccattgatccaaaaacggggaaccctatttctcataatttagtctctattacggtgattgctccagtttgtatgagtgctgatgggctttctactggattgaatgttttagggccggaaaaaggaatggaagttgcggaaaatttgaatatcccggtttttatgattataaaaacgaaaaatggttttgaagagcgttacagtaaagcctttgagccatacctacagaaaaatcaatga

SEQ ID NO: 7670 - DNA, 1227 bp, Photorhabdus luminescens
atggatataataattttaggcgtagtgatgtttaccctaattgtgttggtactgacggcgctgattttgttcgcaaaatcaaagttagttaacactggaaatattagggttgaagttaatggtgatccggaaaagagctttaccgctcctgccggtgataaattgctaaatatgttgtcaagccaggggatttttgtctcttctgcttgtggtggtggtggctcttgtggtcagtgccgcgtaaagattaaagatggtggtggtgacattctgccaacagagctttctcacattagtaagcgtgaagcaaaagaggggtgtcgtctggcttgtcaggtcaatgtaaaacagaacctgaaaattaagttaccggaagagatattcggtgttaagaaatgggaatgtgaagttatctccaacgataacaaagcaactttcattaaagagctaaaattgaagatccctgatggggacgttgtacctttccgcgcaggtggctatattcagattgaagctcagccacatattgctcgttacgaggattatgatgtgccgaaagaataccgtgaggactgggataaatttaatttgttccgttttgtctctgaggtgaaagagccaacagttcgtgcttactcaatggcaaactatccagaagaacacggaattatcatgcttaacgttcgtattgcgacgccgccgccaaaaaattcggaagcacctccgggaattatgtcttcttatatttggtcactaaaacccggtgataaagtgactatttcgggtccgttcggtgaatttttcgcaaaagatactgatgcggaaatgatcttcatcggtggtggcgcaggtatggcaccaatgcgttctcatatctttgatcagcttaatcgattgaattccaaacgtaagattagcttctggtatggtgctcgttctaaacgtgaaatgttctatacagaggatttcgatcagctagcggctgaaaatgaaaactttacctggaacgtagccctatcagatgcactgcctgaagacaactgggatggttacactggttttatccataatgttctgtatgagaattatttgagggatcatccggctcctgaagattgtgagttttacatgtgtgggcctccggttatgaatgccgcggtgatcaaaatgttgaaagatctcggtgttgaggatgaaaacatcatgttagatgattttggcggctga

SEQ ID NO: 7671 - DNA, 597 bp, Photorhabdus luminescens
atggaacattttataagcctgtttgtccgcgctgtctttattgagaacatggcgttggctttcttcctcggtatgtgcacctttttggccgtatcgaaaaatgtcacaacagcgtttggtctgggtattgccgtcacggtggttttagggatctcggttcctgctaataacctggtgtataacttggtattgcgtgacggtgcattggttgaaggggttgatctcagctttctgaactttattacatttattggcgtgattgctgcattagtgcagattcttgaaatgatccttgatcgttatttcccttcactctataacgcgcttggcatttttttaccactgattacggttaactgtgcgatttttggtggtgtctctttcatggcgcagcgtgactataacttttctgaatccatcgtgtatggttttggctcaggtataggttggatgttggcaattgttctgctggcttctatccgtgaaaaaatgaaatatgctgatgttccagcgggtctgaaaggattggggatcacctttgtcactacgggtttgatggcattgggttttatgtccttctctggtgtccagttataa

SEQ ID NO: 7672 - DNA, 630 bp, Photorhabdus luminescens
atggctgatagtaaagaaataaaacgagtccttcttgggccactcttggataataacccgattgcattgcaggttttggggatttgctcagcgctggcggtaacaaccaagctggaaacggcgttggtcatgacaatagcggtaacattggtgactgccttttccagcttttttatctcgttgattcgtcattacatccccggcagtgtgcggatcattgtccagatggctattattgcatcactggttatcgtggtagatcagattttacaggcttatgcttatgagatttccaagcagttgtcggtatttgttggtcttatcattactaactgtatcgtgatgggacgtgcggaagcctatgcgatgaagtctccacccattgagagctttatggatggtatcggtaatggtttaggttacggggttattctggtattggttggtttcctgcgtgagttgtttggttccggcaaactgtttgggattaccgtgatggaatcggtacagaatggtggctggtatcaacctaatggtttgttcctgttagccccaagcgcgtttttcattattggtatgctgatttggggtctgaggacgttgaaaccggcgcaggttgagaaggagtaa

SEQ ID NO: 7673 - DNA, 798 bp, Photorhabdus luminescens
gtggctaatgataaaccaaaaaataatgacagcatcggcagaacatttatcgttgtttttgtgctatgtctcgtttgctcaattgtggtagcaggttctgcggtagggctgaaatctcagcaacaggaacaaaaattgctggataaacagcgtaatatcctcgatgttgcggggttacttaatccacagatgagtgccgatgaggttaaagaagcgttcaaaagacgcattaaaactgagttattgaatctggagacggcaacgcttgaaagcagtcagggcaagtttaacctgaacgatgcgttgcgcagtgatgataccagtattgcattaccacctgaaaaggatctggcgaaaattcgccgtcgcgccaatatggccgaggtctatctggtgaagaatgaacagggtaaaactcgtgaaatcgttctgcctatctatggttctggcttgtggtctgttatgtatgcttttatctccgttgatgtggacggcaaaacggctcgcggtatcacttattattcgcatggcgaaacgccggggttggggggagaagtggataacccgcagtggcgtaaaaagtggataggtaaaaaactgtataacgatgaaggcaacccggcgattaaaattgttcgtggcggtgccgctgccgatgactcttatggtgttgatggtttgtctggtgcgactctcacctctgccggtgtccagaatatgtttaatttctggttaggggataacggttttggtccgttcctgaaaaaagtacgcgaaggagcgttgaaagatggctga

SEQ ID NO: 7674 - DNA, 1239 bp, Photorhabdus luminescens
atgggcctgaaaaactattttgaaaaaattgagcaccactttgagctcgggggcaaattagaaaaatattatccgttgtatgaagcggtaacgacgattttctatacaccaggtacagtaacttctggcggtgcccatgtccgtgatgctatcgatctaaagcgtatgatgatcatggtatggctggccgtattcccggcaatgttctggggaatgtataacgttggtcagcaggcgatccctgcgttgtatcatttatacagtggcgcagaattacaacaacttttggtatctgactggcactattgcgttgctcagtttttgggggcatcactgacaccggatgcgggttggggcagtaaaatgttgcttggtgcaacttactttttgcctgtttacatcgttgtatttgtggtgggtggcttctgggaagtgctgtttgcccttatccgtaagcatgaaattaacgaaggatttttcgttacttctattttatttgcgttgattgttccaccaacgattcctctgtggcaggcggcgctgggtattacattcggtgttgtcattgcgaaagaagtcttcggtggtacaggtcgtaacttcctgaacccggcactggctggccgtgcttttctattctttgcttaccctgcacagatttcaggtgatttggtatggactgcggctgatggtttctctggtgcgaccccgttatctcaatgggcggctggtggtagtcagggattagtgaataccgttaccggtcagcctgttacctggatggatgctttcattggtaatattcctggttctatcggagaagtatctacgctgatgattttcatcggtggggcaattatcctgtttacccgcattgcttcatggcgcattgtcgccggggtgatgttgggtatggttgcaacttcctacctatttaatgctatcggttcagagactaacccgttgtttgctatgccgtggtattggcatatggttctgggtggttttgcttttggtatgatttttatggcgaccgatccagtgtctgcttcatttaccgataaaggtaaatggtggtacggcgttctgattggtgtaatgtgcgttctgatcagggttgttaacccggcatacccggaaggtatgatgctggcgattctgttcgcaaacctgtttgcgccattgtttgattatctggtagtgcaggccaatattaagcggagaaaagcccgtggctaa

SEQ ID NO: 7675 - DNA, 1344 bp, Photorhabdus luminescens
atgattaaaattaaaaaaggactcgacctcccgattgcaggagcgcctgctcaagtaatagaagacggtccgacgattcgccatgtagcactgttgggtgaagagtatgttggaatgcgtccttctatgttggtgaaggaaggtgagcatgttaagaagggccagattctttttgaagataaaaagaatccaggtgtggttttcaccagcccagcctgtgggcaggttgtagcgattaatcgtggtgaacaacgtattttgcagtcaattgtgattgagataacgggagacgaacaggttaattttgaccgttatgatcgtgcccaatttactcaattatcccgagaacaagtggaaaagaatctgattgattccgggttatggactgcactacgtacccgtccttacagccgaagtcctgctcccggctcctcgccaaaagcaatttttgtaaccgcgatggatactcagcctctggctgcaaattcacaggtgattattgctaccgataaagaggcttttgttgatggtctgaatgtactgactaaactgaccgaaggtaaagtccatgtttgccatagtgcaggaagcttgccgaatgtcggtaataatgcacaaatcacttataatcagttctctggtccgcaccctgcgggattagctggaactcatattcactttattgaacccgtcagtgcgactaaaacggtatggcacctgggatatcaggatgtgattgcgatcggtaaattattcactaccggtacactttatactgatcgtgtcattgcattggccggtccacaggttgagaaaccccgtctcatacgtacttgcttaggggccgatctgcttgagttaactcagggtcagcttaaacagggtgaaaaccgtattatttcaggttccgtattgtgcggtactcagtcagatgaggttcatcactatcttggtcgtttccacactttggtttccgttttgcgtgaaggtcgcgaaaaagagctatttggttggatcatgccgggcatcgataaattttctatcacccgcaccaccattggtcatttcctgaaaaataagcgctttgctttttcaaccacaatgaatggtggtgaacgttctatggtaccaattggtaactatgagcgtgttatgcctttggatattatggcaacgcatttgctgcgggatctgctggcgggtgataccgatagtgctcaggcactgggttgtctggagttagatgaggaagacttagcgctttgtacctatgtctgtcctggcaaatatgaatatggtccggtactgcgtgaagtgctgactaagattgagcaggaaggatga

SEQ ID NO: 7676 - DNA, 744 bp, Photorhabdus luminescens
atgaaaaaaattgcggcttttcctgcaataattacaataatattgttgttatttagttcatttactcctgtctatactcaggatactttagtgcaattgcagcaaaatttccctgtgcagcctggctctcctgtctttatccaaatattcaaagaagagcggatattggagctttatactaaaaatagtcatggaagctaccaactgtctaaaagctaccccatctgtaattactctggcggccttggtcccaaaaccacagaaggtgatctgaaaagcccggaaggcttctatcgtgtaaaaacccatcaacttaatccaaatagtcggtattaccgatctattaatctcggctttccaaatgaatacgataaattcagaggctattccggcaactatttaatgatccacggagagtgtaaatctgtcggttgctatgcgatgactaatggttatatggatgagatctaccattatgtagaaagtgcattattgcgcgggcaatatgaaattaatatcagtatttatccattcagaatgacaccacagaatatgctacgccatcgttcatcctcccactatatgttttggttacaattacagccggcttatgaatattttgcaaaaaatcaccagccagcaacggtcagcatcattaacggccaatatgtggttaatgctacacctgaaaaatcaccacttttgcagcatcaatcacaatatgcgttcaccaagatgaaatag

SEQ ID NO: 7677 - DNA, 768 bp, Photorhabdus luminescens
atgtgtgagttacttggcatgagtgcaaatgtgccaacagatatctgctttagtttaggtggcttgattcagcgaggtggtcatactgggccccataaagatggttgggggatcactttttatgaggggcggggctgtcgcacatttaaagatcatcaaccaagttacaattcacccgttgcccgctttgtacaagagtatccgattaaatctagagtggtggtttctcatatccggcaggctaatcgcggtaatgttacgttggaaaatactcatcctttcatccgtgagatgtgggggcgcaactggacttatgcccataatgggcagcttcggggctatcggcagcttgaaacgggtcagtatcgtcccgttgggcaaactgatagcgaacatgctttttgctggattttgcagcaactttcacaaaaatacccaagaaccccctccaattggcctaaggtttttcgttttatcgcttcactagcagatgagctcagcaaaaaaggcgtatttaatatgttgttgtcagatgggcgttttatgatggcatattgttcaaccaacctttattggattacccgtcgggcgccgtttggaaaagcgaaacttctggatcaagatattgaaattgattttcaacaacatacacagccggatgatgttgtttctgtcattgttactcaacctttaacgggtaatgaagcttggaatcgtattgagccgggtcgctatgcactatttcatcttggtgaacgcatattgtga

SEQ ID NO: 7678 - DNA, 582 bp, Photorhabdus luminescens
atgtatcaagacttgatccgtagtgaattgaacgaagccgcggatacgctggcaaagtttttaagtgacgatgcaaatattgaagcaattcaaaaagcagcagtattgctggctgattcatttaaagtgggtggcaaggtactgtcctgcggtaatgggggttcgcattgtgatgcgatgcattttgccgaagaattaacaggtcgttaccgcgagaatcgtcctggctatccagcgattgcgatttctgatgtcagtcatctttcctgcgtcagtaatgatttcgggtatgaatttgttttttctcgttatatagaagcggtagggaaagagggcgatgtattactgggtatctctacttccggtaattccggtaatattatcaaagcagttgaagctgcccgcttaaaaggcatgaaagtcattacgttgacaggcaaggatggcggtaaaatggcaggaaccgctgatgtggaaattcgtgtcccgcattttggttatgcagatcgtattcaggaaattcatatcaaagttattcatatcctgattcaacttattgaaaaagagatggttaaagcttga

SEQ ID NO: 7679 - DNA, 2436 bp, Photorhabdus luminescens
atgaccacattgagtattattctattcttagtcttgattgggatactttgctatcacaaagtcaatctcagtctcagcagcctactgctccttgtctataccgtcctgatgggcgctattgatgcatggagctactggatgttgttaccaatggccattattctgttcccgctgaattttgcgccaatgcgccactccttactgactgttccggccttaaaagccttccgtaaagtaatgccaagtctatctcgcacggaaaaagaagctcttgatgcaggaactacctggtgggaaggcgagctgttccgcggtaaacccgactggaaaaaattgcatgactatccaaggcctcagctaaccgctgaagaacaagcatttctggatggcccggtagaagaagcttgccgcatgaccaatgatttccagataagccatgaacttgctgatttaccacctgagttatggcgttacctgaaagaacaccgcttctttgccatgatcattaaaaaagagtatggcggtctggaattctcagcctatgcacaggcacgagtcctgcaaaaattggcgggggcatccggcattttggcaatcaccgtaggtgtacctaactctctcggcccaggtgaattgttacagcattatggcaccgaagagcagaaaaaccgctatctacccgggcttgcccgtggtgaagagatcccatgtttcgcactgaccagcccggaagctggctctgatgccggatcaatcccagatacaggcgtagtctgtatgggagaatggcaaggtgaacaaattctcggtatgcgcctgacctggaacaaacgttatatcacacttgcacctatcgccaccgtactcggtctggctttcaaactgtccgaccctgaccatttattgggtgatacagaagaattgggcattacctgtgcattgatcccgaccaatgtaccaggagtagaaattggtcatcgccatttcccactgaatattccattccagaatggcccgactcgcggtaaagatatctttgttccgatcgactatattattggcgggccaaaaatggccggacaaggctggcgtatgctggttgagtgtctgtctgttggccgcggtatcactctgccatcaaatgcaaccggcggtttgaaaagcgttgcgatggcaattggtgcatactcttatatccgccgccaatttaaaatgccaattggtaaaatggaagggattgaagaaccactagcacgcattgccggtaacacctatttgatggatgccgcttcaacacttgcaacaaccggtatcatgctaggtgaaaaaccctctgtgttatccgctatcgtgaaatatcactgtactcaccgaggccaacgctcaattattgacgcaatggatattgccggtggtaaaggtatctgccttggtccatccaacttccttgctcgcgcttatcaaggtgcacctatcgccattaccgttgaaggtgccaatattctgacccgtaacatgattatctacggtcagggagctatccgctgccatccttatgtacttgacgaaatggccgcggttgaaaataaccgtattaaagattttgataaggcactgtttagccaccttggtcacgttgctagtaacacgttacgcagcttctggcttggcttaaccaatggccgcaccagcagcacaccggtcaatgatgcaacacgccgttactatcagcaattaaaccgcctgagcaccaaccttgcgctattatcagatgtggcaatgggggtattaggtggtagcctgaaacgccgtgaacgtgtctccgcccgtcttggagatgttttgagtcaaacctatctggcttccgcgacattaaaacgctatgaagatgaaggtcgtcaaaaagaagatttgccgctagttcagtgggccgttcaagatagtttgtatcaggcagaacaggcgatagataacttactgagtaacttcccgaatcgtctggttgccggtctgatgcgtgttattgtcttccctctagggcgtgtacactcagcaccatctgaccatctggatcacaaactggcccagatcttacagcaaccttcggctacccgtgatcgcattggccgaggtcaatatctgacaccaaacgagcacaatcctcacggattattggaagaagcgctgcacgatattattgccgcagaaccgatccacgcccgtttgagtcgcgaagcaggtaagcgtcttggctttactcgcctggataaactggcagaacaggcactcgcagaacgtaagatcacgccagacgaggccgcaattctaaaacgtgcggaagcaagccgtctgcgttctattaatgtcgatgagtttgaaccagaagcgctggctgttcctgcccgcgttgaaaaactgagaacagaagccgcctga

SEQ ID NO: 7680 - DNA, 1311 bp, Photorhabdus luminescens
gtgagagaaaccctgatgagtactacttttactcccaattttacccgtaataattgtcctaatctgataccggagagtttgggtcgtctgccagaaacgtatggtactccattatgggtttacgatagtgaaacaattatccaaaaaatcaatttgttatgtcaatttgatgtggtcaggtttgctcagaaagcgtgttctaatactcacattttacgcctgatgcgtgagtatggtgtgaaagttgatgccgtttcgctaggggaaattgaacgtgctttacgggccgggttttgtccagggcaagaagtgtcagatatcattttcactgctgatttaatcgatgtgtcgacgctgcaaagagtaaccgaattggatattccggttaatgcgggttctatcgatatgttggaacagattggtcaatataaaaaagggcatccggtgtggttgcggattaatcctgggtttggtcatggtcatagccagaagacgaataccgggggtgaaaacagtaaacatggtatttggtaccagaatcttcctcaggcaattgaaaaaatccgccactatggattgaaattgcttggtttacatatgcatattggctctggtgttgattatcatcaccttgccagtgtatgtaatgcgatggttgaacaggttattctttgtggtgaagatattcaggcaatttcagccggtggaggtttatcgactccttatcatcagggagatgaacgaatcaatatcgctcattattttgggttgtgggatgatgctcgtaaaagaattgagcagcatttgggtcataaaattgagttggaaattgaaccggggcgttttttggttgcggaatctggcgttttgatgacagaagttcgggcggttaagcagatggggaaccgtaattatgttctggtggatgcggggttcaatgacttaatgcgtccagtaatgtatggcagttatcaccatatctcggttttgcctgctgatggacgtaagattgagcaattgccattgcgggaaacgttagttgcggggccgttatgtgaatccggtgatatctttacgcaggttgagggcggtggaattgcgccaagagcattgccacctgttcaagttggcgactatttagtttttcatgacactggtgcctatggtgcgtcaatgtcttccaattacaatagccgtccgcttatctctgaagtgttgtttgttaatggtaagcctcaattaattcgtcgccgtcaaacgattgaagagttgttagcattggaagaagtatcttgtgcctctacgtcataa

SEQ ID NO: 7681 - DNA, 936 bp, Photorhabdus luminescens
atgccttcttgttcatggcgccatattgaaatcttccatgcagtaatgacgacaaaaaatctgacagaagcggctattttattacaaacatcacaaccaaccgtcagtcgtgaattagcacgattcgagcatctaataaaattcaaactatttgaccgagtaaaaggccgcctgcatccgacagcacaaggattacgcctttttgaagaagttcagcgctcttattatggactcgaaagaataatgaatgcggctgacaatatacgtaaatttcaacatgctcagctttccattgcctgcctgccagtattttctcaatcactattaccgaaagtttgccatcacttcatccgtcaatatcctgagactaatttaacaatcattccacaggaatcaccgctactggaagagtggctttcagctcaacgccatgatctgggtttgacagaacatttgcagacaccaccgggtacacagagagaaacactgatcacgctgaatgaaatttgcgtattgcccgctgctcaccctctcagtcataagccgctattgactccagaagatttcagcgaacaaaatttcatcagcctttcaataacggatagctaccgtcagctcattgatggaatattcgcagaacaccatattcgccgtcgcatgattatggaaactcacagtgctgcatcagtatgtgcaatggtgcgcgaaggcattggtatttcgattgtcaacccactgaccgtactcgattatctagagagtcacggcaaatctgaaatatgcgctcgcccatttagtattaacattccttttactgtcagcctgataaaacccattcaccgcccttcttctgccccagttgatacttttattgaacacctaaaagcacaaattgctctgtttcctcagaaactaaagtcagcttttcagcattag

SEQ ID NO: 7682 - DNA, 915 bp, Photorhabdus luminescens
atggatagaatcactgctgcgcaagtgttcactataattgtagaacaaggcagcatgattgctgcatcggaacggttagatatgtcgcgggcaatggtatcccgttatttggctgaaatggaaaaatgggcgggggtacgtctgttacatcgtacaacgagaaagatcagcctgacatcagcaggagagatcgcctatcagcgcagtcgtaagttattgcaattgtcggaagagataccagttcatcaaccagtagaagcgcaggagctgagtggtcttttgcggataagcagttctcaatctctggcagtaagcgcgttgtctgtggcgattcctgagtttatgcagatttatcctcagatagcgattgatatgcaaataagcaataaggcaataaatttggtcgaggagcggatagatttagcgttacgcatcacgaataatctggaacccaatttgatcgccagaccgttatcgacatgtcattctgtggtttgtgccgccccttgttatctggcgggaaaaatgctcccgcaaaagcctgcggatttagccttgcataactgtatgacttataacttttttggtaaaagtctttggttatttgaacatcgaggggaaaaatattctgttcctgttagcggtactttgagtgccaatgaatcgatggtgttaatggaagcaacattgcaaggtgcgggaatcgctatgcaaccttattattctgttgcttcgcatttggcgtcaggaaaattgattcagttgttgccagaatatcgacctcaagcgatgggaatttatggtatttatgccagccgtcaaaatatgccagcaacgctgagggcattactggattttctggttcaatggtttgcttcttctccgtactggcaagccctaatgctgaaaagctga

SEQ ID NO: 7683 - DNA, 885 bp, Photorhabdus luminescens
atgactcgcaaaacaacactcaatattgcgctggcaggtatcctttccttgggtaccatttctctggcacaagccgctgatctcaaactggatgtttataatccgggtgagaaaagcctatttcccgtctcttctgaaatcatcagtggagataaagaagttgtcctgatcgatgctcagtttcaaaaaaatgatgctgaagcactggtcaaaagaattaaagataccggcaaaaagctgacaaccatttatatcagtcagtccgatcctgatttctatttcggccttgaagtactgaccaaagcattccctgatgccaaagtcattgcatcaccagaaacaattaaagaaatcaacaagaccaaagatggcaaactggcttattggggaggtgtcctgaaagaacaggcacccaaaaaagtcatcgtgccgcaaccactggaaggtcactcttttacagttgatggtgaaaaactgatcgtcgaaggtcttgatggcccagcggctgatcgtacttttgtttggataccaaaactaaaatcggtagtaggtggcgtcaccgtttcaagcaacattcatgtctggatggcggatacacagactaaagagtcgcgtaaaaactggatgcagacactagatcgtataaaagagctgaaaccgacaattgtggttccggggcatttcattggtaacacaccaatgacgttggaatccgttcatttcacgcaaaaatatctgaccatttttgagaaagagctggcaaaagcgaaagattcaaaagcgctaatcgccgcaatggaaaaacactatccaaaacttggagacaaatccagtctcgaattaagtgctaaggtgctgaaaggcgaaatgaagtggccccaataa

SEQ ID NO: 7684 - DNA, 642 bp, Photorhabdus luminescens
atgcccggaatgactctgcattatatctatgatccactatgtggctggtgttatggcgtttcctctctgatacaagccgcaaaagaggtcgcaaatgtgaaaattgaattgcatggcggcggaatgctgacaggtgataatagacgtcaaatagacaacacatggcgtgattatgtccttagtcaggataaacggatcgcaagccttaccgggcaaattttcagtgagcaatatgtcgcactgttaaatgataaatcactgattatggattcattaccaccaatatcagccattcttgcagcagaaaaattggctggtaaaggtgtcgaaatgttactagcagtacaaaaagcgcattatgttcgtggattaaaaatcagcgaaactgaaacattattgaatttagcaaatgaactacagcttgattcagaacagttccagcaggagctgatattgaataatgaatcagaaagtctccaacatattaggaaaagccgtgaattattggcaaaagttggcggctcaggtttccctacatttattttagaaaatgacagaaatgagctatctattatttctcttgataaatacttgggacaacctaaacgttggcaagatgcgctgattcattatcaattttaa

SEQ ID NO: 7685 - DNA, 612 bp, Photorhabdus luminescens
ttgaataaagtgatagccgtatttattaaaattatttatggctatgaaaaaatagtttttggttattttcaggttgaattagtgacactgtttataacagctttctttatgatttatttttcattaaatttccatttatatgttgttttgatatttgtttgggtgttaattatattgtcttttattgatataaaaattaagttattgccagacataataaattatccactgttatggttaggattattattgaatttgaatcaaacttttgtgcctattgaacaagctgtgacaggtgcgattgtgggttatttgattttatggtcgctctattggttatttagaataatttgtcataaagaagggttaggatatggtgattttaagttaatggcggcggttagtgcttggttggggattggtgcaattcctttattaatgctcttatcctcactgtttggtcttattgggtgcttatggatgtggagaatacgagaaaattgccaagagcctgttgcttttggcccatatatagccatttctgcggtcataatgatctatttgaatttattgggaatggatgggatatcgtggatggtgcccgatagctga

SEQ ID NO: 7686 - DNA, 732 bp, Photorhabdus luminescens
atgcgtataccccgcgtatatcacccggaattactctcatcgaatactgaaatttatctgagtgatgaggcggctaaccatgttgggcgggtactcagaatgagccacggtcagcagttgcaactgtttgatggcagcaatcagattttcaacgctcagattaccgaagctagcaaaaaatctgtcaaagtacatatcagcaatagcgaacttgccgataatgaatcaccacttaatctccatctggggcaagtcatatcccgcggtgagaaaatggaattcaccattcaaaaatctgtagaattaggggtaaatgttattacgcctttaatttctgaacgctgtggtgtaaagctggatggagaacggctggctaaaaagcttcaacagtggcagaaaattgctattgctgcctgtgagcaatgctgtcgtaaccgtgtccctgaaattcgcccagtgatgcaacttgagcactggtgtgcagaaaatgatggcagtttaaaattaaatctacatccacgagccagccaaagcatcaataccctgcctttacctgtagaaaaagtgcgtttactgatcggcccggaagggggattatcgatagatgaaattgctatgacagctaattaccaatttactgatatcctattaggaccacgggtactgagaacagaaacgacagcgctcaccgcaattactgcattacaagtgcgtttcggcgatttgggttaa

SEQ ID NO: 7687 - DNA, 951 bp, Photorhabdus luminescens
atgatcaaactcggcatcgtgatggaccccatttcatccatcaacatcaagaaagacaccagttttgccatgctattagaagcacaacgtcgcagctgggaactccattatatggagatgagtgatctttatctgcaccaaggggaagcccgcgcacgtacccgcttattgcaggtagaaaaccatccacaacaatggtatcaattcgatagagaacaagatctggcactggaaacattggatgtcatcctgatgcgtaaagatccaccatttgataccgaatacatttacgccacttatattttagaacgcgcggaagagaaaggcactctcattgtcaataaaccacaaagcctacgcgattgtaacgaaaaactcttcacagcctggttccctgaattaacaccagatacattagtgactcgcaatgccgctcacttacgtgaatttcaccagaaacatggtgatgtcatctttaaaccactagatggtatgggcggtgcatcgatattccgcctgaaaaaagatgacccaaacgtcggggttattattgaaaccctgacggaacatggcaatcgcttctgcatggcacagaatttcttaccggccatcaaagaaggtgataagcgggtattaattgtcgatggcgaacccgttccttattgcctggctcgtatcccagcccaaggtgaaacccgtggtaatcttgctgcgggtggccgtggtgaagctcgcccgctttcagaaagtgactgggctatcgccagagctgttgctccaacgttgcaagaaaaagggttaatctttgttggcctggacatcattggtgacaaactgactgaaattaatgtcaccagtccaacctgtgcacgcgagatagaagccgctttccctgatatttcaattactggcatgttaatgaatgcaattgaagaacgattagagaaataa

SEQ ID NO: 7688 - DNA, 564 bp, Photorhabdus luminescens
atgaatctacagcaccattttcttatcgccatgccttcattatctgatccctatttcaaacgctcagttgtttacatatgtgaacacaatgcaaatggggcaatgggattggtgataaataaacctattgagcaaatctccgttcggaaagttttacaaaagctgaaaatatcaccagaagatcgggatgaaagtgtcaatctaaacaagcctgtcatgactggtggcccacttgctgaagatcatggttttatattgcacacaccaaaacccggtttcagttcaagtatcaaaatttccgatgacacaatgatcaccacctccaaagatgtccttgaaaccttgggtacaccacgccaaccaaaacagatattggtcacgttggggtataccagttgggaaaaaggccaacttgaaaaagagataatggagaatagttggctaacaacaaacgctgatccacacattattttcaactcacctattgcggaccgctggcgtgaagccgcatctttgctcggaatcaatatctataatattgcgccacaggcgggacatgcatag

SEQ ID NO: 7689 - DNA, 420 bp, Photorhabdus luminescens
atgaataatcgtacaataatggccttcgattttggcacccgcagcatcggcgcagctattggacaagaaatcacgggcaccgccagagcattaacctcgtttaaagccacagatggtatccccaattgggggcaaatcgaaaaattacttaaagaatggcaacccgatctggttatcgttggtcttcccctcaatatggatggcactgagcaattcgtcacagtgcaagcacgtaaatttgcaaaccggctacatggccggtttggcgtacaagtgcaactccaagatgaacgcctgacaacggttgaagcccgtgctcatctgtttgaccgaggtggttataaggctttaaataaaggaaaagtagatgctacttccgctgttattattctggaaagctggtttgaacagcgctattaa

SEQ ID NO: 7690 - DNA, 1038 bp, Photorhabdus luminescens
atgaatatggataagctagtggcccttagtgtaaagcataatgcttcagatctgcatctttgtattgggcaagttcctgtattacgtataaatggagtgctttgtccgcaaactcaactgcaatctgtaaataatctattgctggaagagtggagtaggcagtttttatcagaaaatcagcgacaacagctattaactagtggacatgtggattttgcgttggaaacagaaaatggccaacgattgagaggcaacatctttcgtcagcactccgggttgtcagccgttttgcgtttaattcactctcagtgttcaactctggaacagctaaaagcacctgaaattatccgtgaaatggctttgcgggaagagagtgggttgatcttggtaaccggcgctacaggcagcggaaagtcgacaacgttaactgccattgtggatatgctgaacagccactgttgtcagcacattattacattggaagatcctgtggaatttatccaccatagtcgcaattgtttgatacaacaacggcaaattgggttggattctcccagttatcaggctgcgttaaaaggggctctccggcaagatcctgatgtattgttgttgggtgagctgcgggataaagagacaatacgcttggcgttaaccgcggcagagactgggcatttggtattgtcgactttgcatacccgaggtgctgtacaggcaattgaccggctggtggatattttttccgctgaagaaaaagggtgggtacgtagccagctagcaggcagcctgaaagctgtgatagcacagcaattagtctctgcccagggagggggacgagttgctatatatgaagtattggtagttaatcaggcagtgagtcatctgatacgagaaggaaaaaatcatcaaataacaacgcttatgcagacgggcgctgccagtgggatgcaaacctatgaacaaggctggcagcagcgtaaattgcagggattactggcagagcaaacggaaaggaagattaaagaaaatgctatcagttaa

SEQ ID NO: 7691 - DNA, 696 bp, Photorhabdus luminescens
atgaacaatattgaacaaaatttacaagatgtcaggacccacatagccattgccgcacagaaatgcgaacgcgctccagaagaaattaccttgcttgcagtcagtaaaaccaaacctgtggaagatatcgaaaaagcaatcgctgccgggcaacgccagtttggtgaaaattatgtgcaggaaggtgtagaaaaaattgcttattttgcaaattgtaatgatttgatatggcactttatcggtccgttacagtctaataaaagccgtttggtggcagaaaattttaactggtgccataccatagaccgcttaaaaatagcacaacgcctgaacgaacaacgcccggagggaatggaaccgctgaatattcttattcaaataaatatcagtgatgaacggagcaaatcaggtattcaacttgatgaactatcaacgctggcagccgaaatgaacaaactgccgaatgtaaggctccgtggtttaatggcaatcccggcaccagaacctgactatgcacatcaattagcggttttcaggagaatggaacaagccttccttaacctgaaaacgaaatatccccaaatagatactctttcaatggggatgactgatgatatggctgccgctattaattgtggttccacattagtacgaattggaacagcaattttcggtgcacgtcagtatcacaattaa

SEQ ID NO: 7692 - DNA, 822 bp, Photorhabdus luminescens
atggagagacgtaaaattaccttgattggtgcaggtaatatggctcacgccatcatagctggattagtaaaaggagggtaccctgctgagctgattaatgtctgcgcaccaagtcatactcgccgtgatgcactcgcaacagagtatggcgttaacagcggtagtgacaatattcgctacgcacaggaagcggacgttgttgttctggcggtaaaaccgcaagtgatggtagatgtctgccagcctctgaaagaaaatgtagatttcagtaacaagctggttctgtctattgcctcaggtatttccgttgcacgttttgatgctttattacaagacaaactcaatattgttcgtatcatgccaaacacgccggcattaattggtcaaggggtgagtggattattcgcatctgagcaagtcagtcagtctgaccgtgatttcactcaagcattaatgaacagtgttggtaaaacttactgggtaaaagatgaaaacggcatcaatgacgttatcgccgcagcaggcagtgcgcccgcttatttcttcctatttatggaatcaatgcaacaggaagcagaacgtttaggttttgataaccaaacagcccgtgaaattattttgcaaacggcaataggttctgcggcactggccgcatcaaatgtagatctcccttttgcaaccctgcgtgaacaggtaacatctaaaggcggtactactgcggaagcattacgtattttttatgaaggcaaattaccggaaaccatatccaacgcgatgcaggcggctattcgccgggcacaggaaatggaaaaacaattttaa

SEQ ID NO: 7693 - DNA, 549 bp, Photorhabdus luminescens
atgcaatttttaacctttattctgttcacagttctggatttatacatcgctgttttattacttcgtgtatggatgcaatgggcccgttgtgatttttataacccatttgcccaatttattgtgaaaatgacccaaccgatcattcggccattgcgccgagtgataccatctattggttcgctcgatactgcctccattgttatcgcttacgttctggtattgtttaaattaatcatgcaactttggttcagtaccggtacggttgctttcctcacacttttcatccctatcgggttaatcgaattgctaacagcaacaggtaaactggtattttggttagtgctggcacgcgctctactaagctggataagccaagggcgcaatccgattgactatgttctgatgcaactaacagagccattgatggcacctatccgccgtattatcccaacaatgggcggccttgatttttcagcaatgatcgtcattttgatcctctacgcattgaactatcttcgcgctgatgttctctcatggctgatacagtaa

SEQ ID NO: 7694 - DNA, 594 bp, Photorhabdus luminescens
atgcaaaaagtcgttctggcaaccggcaaccccggaaaagttcgtgaactggcacaattactggctgattttggtctggatattgttgctcaaactgagttaggcgtagattcagccgaagagaccgggctgacatttattgaaaatgccattcttaaagctcgccacgccgcacaagttaccggcctgcccgcaattgctgatgattctggcctatccgtagacatccttggtggagctccgggtatctattcagctcgctatgcaggagaaaatgccactgaccagcaaaatttggaaaaattgctggatacgatgaaagatattcctgacgatcaacgtcaagctcagtttaactgtgtgctggtttatatacgccatgcagaagatccaacacctctggtatttcatggccgctggccggggttcatcgcacataaatctgccggtaatggtgggttcggttatgatcccatcttttacataccggaattaggctgtactgcggctgaattaactggtgaacaaaaaaatgctgtttcacatcgtggtcaggcactaaagatgatgttggatacactacgtaatgcttaa

SEQ ID NO: 7695 - DNA, 1131 bp, Photorhabdus luminescens
atgcttaagctcccaccactaagtctttatatccatattccgtggtgtgtacaaaagtgcccttactgtgatttcaactctcatgccttgaaaggtgatgttccacaccaagagtatgttgaccatttattggcagatctgaaaacggatctgccaatggtcaatggtcgggaagttaccactatctttattggtggtggaacccctagcctgcttagctcacaagcaatgcaacaattgctggatggtgtccgtgccctcctgccggtatcgccacaagctgaaattactatggaagccaatccgggtactgtggaagccgaccgctttagtggttatcagcaagcgggtattaaccgaatatccattggcgtgcaaagtttcagtccagataaactggtacgccttggccgtattcacggaccggatgaagccaaacgggcagcacatttagccgctagtctggggctacgcagttttaatctggatttgatgcatggtttgccgaaccaaagccttgatgaagcgctagatgatttacgtcaggcaatcgagttatcaccaccgcatctttcatggtatcagttgactattgaacctaataccagctttggttcccgccctccggttctgcccgacgatgatgcgttgtgggatattttttcacaaggtcaccaattgctgacagcagcgggttatcagcaatacgaaacttctgcttatgccaaaccaggttaccaatgccagcataatctcaactactggcgctttggcgattaccttggtattggctgcggtgctcatggaaaaatcacatttgaagatggccgtattctgcgtacagtgaaaaccaaacatccccgtggatatatgcaggggcgctatctggataaacagcatcaggtagaaaatgaagatcggccatttgaattttttatgaaccgattccgtttactagaagcaatgccaaaacaagatttcagtgatttcaccgggttatctgaaacctcaattcgtactcaaattaaacaagccttagccgcaggttatctctctgaaacagcaacacactggcaaattacgcagaaaggcaaactgttcctaaattcattattggaactatttctctag

SEQ ID NO: 7696 - DNA, 663 bp, Photorhabdus luminescens
atgaatattgaaaataaagaaatgttatataccttgtccaaagaagacctcgccacagaactaactccgtattatcaagatttttatgatcaactttccgatcatcaaaaggaaaatattagctttgacatggttgtaaatgatgcttacaagagattacattttaataactcagagccaactgacactgatggaagattaaaattaatagagtacgcaggtgaatctccatgcattcatgcaattggtatagttgtcgcagatgcttttaaacttgcatttaaattcatgggcatacataaacctgaaagagaatcagccacacagatattattgaaaaaattaggtcatgatgctatacatgagctacttactatagttcataaccttaagaattcgaattctattactgataaatcaaagcatacctggtcattaatttccgcagttgaaagtattttaggtatttctggaataactgattgcttaaaagagacaatgcattggtacaattggatgattactggaataactgcaatcgcacaattaaccatatggtttgctacaggtggagctgcatttattgcagaaatagcactggcgggtcctgctatagccagattagcccttgactctgtagacgcggctaatacttgttcataa

SEQ ID NO: 7697 - DNA, 951 bp, Photorhabdus luminescens
atgaaaaagatcatccctgtcgttctggtatcgttatttgctgttgcaagccattccgcatttagtcagaaatctgctgtatttacaccaaatgttgttacagctcaggctgatgataaggttatagttaagcacctttccggtgaaactgaggtcaaaaaaaatcctcagaaagttgtttcatttgatttcggcacttatgattcattagttaaattaggtttatcagatagggttgtggcattacctacaggtaatacgcctgaatatctccgtaatagcttacctaaagaggtagaaaatgcaggaggaatgaaagagcctaatctggaaaaactggcgcagcttaaacctgatttgatcgttattaccggccgtcaaggttctttctatgaaaatctgtcaaaaatagcaccgacaattaatttgggaactgatagcaaaaattatctggtttcggttgaaagtaacataacattattaggtgaattatttagtaaacagagtgaagtgaaagaccaaattgttgagttggagaaaaccattgttaaagctcaggataaagctaaatctgctgatgcaaaagttttagtattgttacataacgcagataaactaatgctgaataaccagagtgtcgtgtatgacgtggttaaggcacagaaagcggaattagctattcctgctggtgaagataaaaccaaacgcgttgtagtgacttctgacatgattgctcaagctaatccagatgtaattttaattattgaccgcagtgaagcaattggtgctggtaagctagataaagcgaagtttgaagatgataaagtgaaatctacttcagcgtacaagaatggcaaaattacttatctgaagtctgatctgtggtatttgtctggcggtggtttggagagcctgtcagcacaagttaatgctgtagctgatgccctttaa

SEQ ID NO: 7698 - DNA, 723 bp, Photorhabdus luminescens
atgttacgcaaaattatcattgctgcatctttgctatttgttgctcagactcaagctggttatgaatgccaggtaaatccacagaatgacattattattacttctcaatcagttcaagttgtgggggcaagtggcaatctccagatttcacctgatggttcagtaattcgtgatggtaagaacttaagtttaaatacagaacagcgtcagaaagcacagcgatatcagcgggctttgcggcaggatttgccttggattaaacaagaaaccggaaaacatctgataacggcgcgtaaatccttggataaagtagtagtagagactatcggcaaggatagcaatgtgcgtcatcggttgtccgatcttgagtcagggcttaatcagcaaataaaccgaattattgaaactcgttctgatggtatggcattccaccatcaagcgattaagctggttgaaaaagatagccgtagcttaattgagcaaagtcttggtggagtattacaggacagtattaatgagattggcaataaacaatttagcctgaatggtgataataatcaggcactacaatctttgcttggtagtttggggggattgcagaataatttgaaagctgaatggcggactcaggaggaagatttccagcgttttggcaaagaggtttgcggtaaggtcagtggccttgagcaacaacgaattgaattactgaattctattaaatag

SEQ ID NO: 7699 - DNA, 927 bp, Photorhabdus luminescens
gtgagtacaacgttctctaatacgttattgtcggatattttgcgacaagttcgtcccctgattggccaagggaaagtggcaaattatattcctgcactggcggaggttcctgctgataacttggcaatagctatctgtactattgatgggcagatatttcatgcaggagatgctgagaagcgtttttcgattcaatctatttctaaaatattaagtctgactttagccatgacacgttatcaggaacaagagatctggcagcgggtcgggcaggaaccttctggtcagccatttaactcattagttcagttggaactggaaaaaggcaaaccccgtaacccttttgttaacgcgggtgcattaattgtctgtgacatgttgcagtcgcgattgagtgcacctaaacagcgtatgctggaagtggtgcgcaaacttgctggttgtcctgatatttgttacgacagcaaagttgcccgttctgaaatggaacattctcaccgcaatgcagcgattgcctatctgatgaaatccttcggtaatttcgataacgatgtgctcgcggtactgcaaacttattttcattattgcgctttgaaaatgaactgtattgagcttgctaaatgtttcatttatttggcgaatcaagggagtacgataggttctgagcagcaaatccttagtcctcgtcaggcccggcagattaatgcactgatgatgacctgtggtatgtatgatggttccggtgaatttgcattcaggattggtatgccaggaaaatcgggcgttggtggtgggatcgtgtgtgtcgtgccgggagagtttactgttactgtttggtcaccggaattggatcgatcggggaactctttggccggttgtgctgccctagaattgttagctgatcgtgttgggcgatccgttttttaa

SEQ ID NO: 7700 - DNA, 327 bp, Photorhabdus luminescens
atggctaaaaaccgcagtcgtcgtttgcgtaaaaagatgcatattgatgaatttaaagagttgggtttttctgttaagtggaatttcccgtctaatacaccgatagatgttatcgatagcactgttgatgcatttattgatgagctgattgaatccaatggcttagcattggatgccagcggttatctggattgggaaggcttaatctgtttgcaaaaaattggtatgtgtacagaagaacaccgccaattggttgaaaaatggctgaaagatcgcggtatggaagatgtcatgacctctgaattgtttgatgtttggtgggattga

SEQ ID NO: 7701 - DNA, 720 bp, Photorhabdus luminescens
atgataaataacgtaatttcgccggaatttgatgaaaatggcagggcgttgcgccgtgttaggagttttgttcgtcgtcagggccggttaactaatcgtcagcaacaagcgcttgataatctctggccaaaaataggtgttgagtatcaggcagaaaaactggagctgggagcactttttgggcgagaagcccctgtggtgctggaaattggctttggtatgggggcatcacttgtcacaatggcaagtcagaatccagaaaaagactttcttggaattgaagttcatgtgcctggtgtcggtgcttgtctggcttccgctgaagatgaaaatatcggtaacttgcgggtgatgtgccatgatgcgattgaagtgctggaaaacatgatcccggataatcgtttggaaatggtccagcttttctttccggatccgtggcataaagtacgtcataataaacgcaggattgtacagccaccatttgcggaactgataaaaagcaagttgaaagtagggggcgtattccatatggcgactgactggcagccatatgctgagcatatgttggaagtgatgaatggcgtagataattaccttaatttgtccgaaaatggtgattatgtgccgcgtccatcttcacgcccgataacgaaatttgaattgcgcggtcagcggttggggcatggcgtatgggacatcatgtttaagaggattaagtaa

SEQ ID NO: 7702 - DNA, 1038 bp, Photorhabdus luminescens
atggaagcaaagcaattctccacagtggtactggattggtaccatcgttacggtcgtaaaaccctgccttggcaattggaaaagacctcttaccacgtctggctttcagaagtgatgttgcaacaaactcaggttgcgacggtcattccctattttcagcgctttatttcacgttttcccgatataacttcacttgccgcagccccccttgatgaagtccttcatttatggaccggccttggttactacgctcgcgctcgtaatttacataaagcagcacagcaggttgtggagcggcaccaaggtaaattcccgacaacttttgaagatgttgtcgccctacctggcgttggtcgttcgacagcaggtgcaatcctttcactttctcaaggtaaacatttcccaattcttgatggcaacgttaaacgggtattggcccgctgttatgccgtggaaggttggccgggtaaaaaagaggttgaaagctgcctctggcaaatcagcaccaatgtaacgccagcgcaagaggtagaatattttaatcaggcgatgatggacttaggcgcaatggtttgcactcgcagcaagccgaaatgtgaaatctgcccattaaatcaaggatgtatcgcttacgctaaccatagctggacaaaatatcccggtaaaaaacctaaacagagcattcctgaaaaaacagcttatttcttgctgatgcaaaataatgattctgtctggctagaacagcgcccaccaacggggatctggggtggtttgtttgcgtttcctcagtttgagagcatggatttactaaatggctggttagaacaatcaggcatttctcacagtaaacacgaacaactcaccgcattccgccacacatttagccattttcatctagatattgtgccgataaaaataaatattttatctttcactacctgcatggatgaaaataaaggactttggtataacttacagcaacccgcaactgttgggctggcagcaccagttgaatatctattacaacaactgggctga

SEQ ID NO: 7703 - DNA, 273 bp, Photorhabdus luminescens
atgaacagaactgttttttgtactttcttacaacgcgaagccgaagggctggattttcagctttatccgggcgaattgggcaaacgcattttcaatgaaatttccaaagaagcgtggagacaatggatgagcaaacaaaccatgctgatcaatgagaaaaaactcagcaccatgaacccggaagatcgtaaattgcttgaacaggaaatgactaaattcctgttcgaaggtcatgatattcaaattgatggatataccccaccagaaaaataa

SEQ ID NO: 7704 - DNA, 1074 bp, Photorhabdus luminescens
atgaaaaaactgttagcgttgtttgttattgccccaattcttatttcctgtaccagcaacaaaaatagtgaataccgcgaagaatatataaaagataccaatggttttgatattttgatgggccagtttgctcataacattgagaacatttgggggttgcatgaagtattaattgcaggcccgaaggattacgttaaatataccgatcaataccggacccgcagccatatcaattttgaagctggaacgatcacaattgaaacaatttctccaattgaccctacaacctatttacgcaaggccattatcacgaccttattaatgggtgatgatccaggttcagttgatctttattctgatactaacgatattcagatcagtaaagaacctttcctttatggacaagttatggacaataatggccaaccgattcgttgggaatggcgagcaacacactttgcagattatctgattgccaataaattacaaaaacgccaatccggtttacatgtcatttggtctgtcactatacaactggtaccaaaccatttggacaaacgtgctcataaatatctgccactgattcgtcaagcttccattaaatatggcatagacgaatccctgattttggccattatgcaaatagaatccagcttcaacccctatgcagtcagccgttctgatgcacttggattgatgcaagttgtacaacatactgctggccgtgatgtttttaaaatgaaaggtaaatcagggcaaccgagccgtagttatctatttgatccagaaaataacatcgatgccggcactgcatatttatcgatattacaaaacagttatctggttgacatcactaatgcaacatctcgccgctacgcagtaataacggcttacaacggtggtgcaggtagtgtattacgggtattttccagcgataagaaaaaagcggctcaaattattaataaaatggctccgggtgatgtttatgaaaccctgacaaccaaacatccatcggcagaatcacgtcgttatctgatgaaagtcaatactgcccagaaaggctatcatcattaa

SEQ ID NO: 7705 - DNA, 141 bp, Photorhabdus luminescens
ttgacgggctctaccgaatacggtttaatgcgccccgttgcccggatagctcagtcggtagagcagaggattgaaaatcctcgtgtcggtggttcgattccgcctccgggcaccattcaaagtgcgcttgttgggagataa

SEQ ID NO: 7706 - DNA, 1002 bp, Photorhabdus luminescens
atggacagtatgacctgggataacctgctggatgaatatttttttgccaaaatcttgcgaccggctactgagtcgagttatcgcaaggtggtgaatacattccaggtgtttgcaggtgccgacaatcggcctgctcaggtaacccgacagcaggtcctggcgtggcgcagatatgtattgcatcagcgcggactgaaaggcgtgacctggaacagtaagattgcgcatatgcggtcagtgtttaatttggcgatagaagaaaaaatactgccccaaacggaaaacccatttattggtgtagaggttaatgagaacaaaaataaaaagaaaacattgaccaaaaaacaactgacaaccttgtatctcacgatggggcaatttgaagagcgggaacgacggacaggggataatcatcgtgcccgctgtgcattatatccgacctggtactggctgacggtattggatacgttgcgttataccgggatgcggcaaaatcagttattacatatccggctcggggatattgacctggatgagcgccggattattctttgctctgaggggagtaagaaccattatgaacaccaggtgccggtggtgaaatggttgtatccgcggctggagattttgctggaacgtgcgcaagccgctggggcaaaacccagtgatcccctgttctgtgtgaactattttaccgccaaaacagacagaggaagtgaaactgatcaattacagacgataaagtcattctttcgtcgtttgtcaaaggagtgtggatttgatgtgggcccccaccgtttccggcatactttggcaactgaactgatgaaagcgcctgatcgtaatttgcaaatggtgcgcggattactgggccatcgcagtattgccacgacgatggaatatattgatatcaatctggatattgccgggcgtgcgctggagcgtgaattaatgctttatatcgatgttgaaccagagagaggcgaagtattaatcagataa

SEQ ID NO: 7707 - DNA, 1521 bp, Photorhabdus luminescens
gtgttgaaaaaaattaaaatcctgctggcaggagcatccacaggaaaaaagccacttccacaatccgccgccatcccacaaacggtcaaagcaggctactttttgccgtctgagtccaggctattgctggatacttcccggcgacgacaatatttacagtgtctgtgggacaatagcacattatccaaaacacgctatcagacgctgtggctggccccattacatgagtgtgtggcattgatgcaacaacttccggcggcaccgcagggaccttatgcccgtttgggcggattaattgatgtgacgttgcaatgtactgcatttgccgtacgtctggcgaaagggcagatgttaccgccgggtgtggcacctgagacgcaggcagcacaaagtgtgatatggaacacggtggtgttttacgctgcgttatttcattttttacctgttttggcaaagtttgagggcgaactggatgaaggccaaccttggtacccagggctggctgtgccgcagggggcgtatcgtttccggttcaaaacttcctcagtggagacgatggttgcctgtcattttggggtgttacttgccgggcgattgctgccggctaaggcattgacctggctggcgtcggtacctgatgccttgccttcgctgttttgtattctatccggtgagatgaagaaagataacgcaataaatcagataatgacagaagctttgaataaagccggtgcaccgacaatatcagaagtattatctgtcatggctgcatcaccgcaagttattgtttcaggaaatcccgatgtttctgctacgcctttatcaaccgcaatggaaaatgttctgccctctcagatacggcaggaagataacacgatgactaaaattgtttcatcagccgtgaagtctgttgatgagcctctctttactgctatgacagtcacgccggagaaggggaggcaaccggatggaagcacgcagcagctattgtcattaatggggatgaatgttgtcaccacagtcacagaacaagttatggtgagtgaagcggaaatcgcaccgccatacacgtcaataccttcacaacacgctgttcagacaacatggcagaatcatgaaaatgctattgagacatcctgtattggagagcagttctgggactggttgtccgttggcttaatgcatgggggtatgagtattaatacgccgaaagcccggatacatttggttggcggctttgtgtttgtgagtgcgccggctattttctttcagtttcttagtgagaaaaaacaggctgatggcaaagaggttagccaaaaatggaaacgggtacaaaccgcatttgagcggctgggacgacatcgaataagtagtggaaagtgtttttgttgttgtcatctttatgattctgccgatcggattggctcctatcaacgtgttcatggctacttaatcaaaagtactttgctttaccgtggtagtcctgtacccgaggatagcccttttctaatgatttcctga

SEQ ID NO: 7708 - DNA, 180 bp, Photorhabdus luminescens
atgcactggacacattctattttcctctttaatcctttcttgcatgatccatcattgaataaagttcttgccttttgtacttatcgtagcgaattcaacgaaataaccggatacacgcttcgtttacccgtgactgaattggaaacgtttgaatcattgcgtgctgttttcatcgattaa

SEQ ID NO: 7709 - DNA, 723 bp, Photorhabdus luminescens
atgttccccgttttccaggagcatgttttgtctgtttttattgatcataaaaaagcgtttattaccttgtttaatgaaactgcccgttattattatcgtaaccgagtattcgatgattttgtacaatgtgcggcaattagtctgcataatgcagtctgcccggacagtaagctggagcaaggatatctgcaaatcatcaaacactataagccggaagatgctagccggttttctcaactgcttgaacatgtcatgatgggattggaatttgaacctcatgattttcttggcggtgtttttatgcaattgaatctcggcaacaaacatctgaagcaattctttactccctggcccatcagcttggtaatggcgaaaatgcagttgagcgacgtcgagcaacgcttaacgaagcagccctttttcaccttatatgagccagcttgtggtgcgggttgtatggttattgcggcagcggaagtgttgaaaatgtcaggttataatcctgctcagcatatgtgggtatcctgtgtggatattgatgtcgtggcggcttcgatggcctatatccagctttctctattggggatacctggggaggtggtgataggtgatgccctgacgaatgaacgtcatcgggtcatgtatactccggtacattggctgggaaactggccttgtcgtctcaggaaaaatcgtcagcagtatgaggttcaaacggtttga

SEQ ID NO: 7710 - DNA, 921 bp, Photorhabdus luminescens
atgccgaagtggtacgctaatcgtttgcatatcacgggtcaacctgaccaactggatgccctgcgacaatggggattgggagacagaattccctattacggacaggctatccatcaaagtattaagctgtttgtcgcgggctgtgtcggtctcctacaaccgactgaaacgacagatttcctgctttatccggcgctggtagcgaaaggaacagggggagactcaccggaaaaccgggcgtttgagcaatggctggccttgttaaaagagaatgttgcgcttgatgaagtcaccagccaacagattgacaggctataccaacaaagtggtctggccgagcgaaaatgggagacgttgctcccgacagcgcagaaaaccatcatggctttatttaaccaaaagtcctgtgactggttcggtttggttgattggaacggagaacgtgacacggaaatgctgtggtctcatcttgatgatcggctgacagagacggtgccttgtgacttgtttctgctgataccgacccatcttgcgagtgaaatcaatggattttgcggcggattgttaagggatcacgagacaactcatgagttgtatatccgattgtacggtatggcgcagccgcgaggttatgacatagcctggaagcacaatgatgatggcagtctgaccgggcattttgacaaaacacccagggagccgtggtatgaaaaaatcatagcgcctttatccaggcaatatcactgccatatcacccattattttaaaggtgcccgtagtttttgtggttacgatacatatcggaatgggcagagggaagaggttagcattgatgaactggaatttggtgaggaagacggtgtccgtaaggtgataggaccggcctacattctcggcaatatttcacatgacggatgttag

SEQ ID NO: 7711 - DNA, 189 bp, Photorhabdus luminescens
atgaaaaagattaagaccaaaacagccccaaaaattgtccgcaagaacaaagtcgcccgtcgtcatggcaggcgtttccggcctgatttgtaccgggtgatgacgggcaggattatcgcggcgtttggaaaaagaaggcgccctgatgtacaggccataaaattgtggagaccggctgtccggctataa

SEQ ID NO: 7712 - DNA, 333 bp, Photorhabdus luminescens
atgttactttttaaggctaaagatctgaaacctgtgttgcgggaagcgatagcccatcagtgtgacgtgttgctggtcaaggatcagggcatttatatcatgtctgatatcggttcgatgcaaaacggcaaatatcttgtcgcttatgcttgcggttatcatccggagaaggacgaaggctggtatgaacgtgcccgggaggaagcgggcggcgatgattttgcggaaaagctgggtttctccatatctacactcaaccggttactgaatgacaaatgtgatctgaaggtgacgctgacagccacacaaattatcacacaattttacccctga

SEQ ID NO: 7713 - DNA, 912 bp, Photorhabdus luminescens
atgtctttattacgtttttatatccggcatcaattcgtagaacgaatggggctggagctggatgacgacgctattttctgtctgtttaatgaaagccagggagactacgtcaatacccatataaagtttaccaaagagttacttttgcctgtcatgactcatcttttggacagcttatctgaggatccggcaaaccgggctagatgcagaaatagtgaacgtatcctgacgttatggatacgggggatggatgcgatatctcatgtttatcaggatccgttgctgatgccttatacccatccggaaagcagtggtcgtgtggatacccttatccggccggatacagccgtgttactgaatctaacggcagaggaatttttgcgtctgacggcgcaggataatctaccggaagatgaacaaattgggctggaacagttcagcaaaacacaaaagtactggacacgttttatggactatttggataagcagttgacagaaacgtgtctgtattgttttgaacgtctgggccaatttcttcgtcacttacaggttgaaccccgtttgatacggcgtttttccttctctgtcggttacattgatgtcttcatggggccacaggatttacacaatattgacgcagaggaatttgagtcagggtatctcgaagactatatcgatgaggtctctgatggactcatgacgccagtccagttccaggttgatgtggtatacaaaaatggttgtgtaatagagagttttcgatcagatgtagacattgaaaatgttaataacccgacactcaaggattatcgggatgtggtggatgaggcaatcacatgggtagatgagcagtttgggctgaaaacccgttcagtgagcctgtcttcgccagtacagaggctggcggcataa

SEQ ID NO: 7714 - DNA, 1974 bp, Photorhabdus luminescens
atgatgaccatttcttacctaccggacgatatctgccggttaataacccgacgtcttacagacagcctggaaagtggaggggtgctctggcagcagccttggcaagcggccagtgagtacggtttgccgcagcatgcgctgaccggacaaccgtttagcggtatcaatgtgctgttgctctggcaaactatgttgcagcggcagctgatatctaatcgctggttaaccggtgatgatttaagagcgttaggcggatgggtggtcaaaggtgaaaaaccgacaaccatcgtccgttaccggccttcaatgtcgctgatgcgtgtgattaatctggaacaatgtgaaggactgccggcagagctccaaccaggttgccctttacccccccgtccggctcccggttttgccgctgttcagcaactggtgacggccagtgggatcccggtggttcatcggtcaggcattgtgcccgtttaccggtcgttgcatgaccgtattgaactgcctggctgtcaggactatgccgaaagtacacaatactggcatgatttattgcatcaactggttcatgcctctggccatccgtcccggttaaaccgttttggcctgacagcccgaagtgagtgggatgaaagtcgggaacaatgggtgacagcactaggcaccgcgtttttggctgcattgacgggtgtccggggtaacctggtatatcctgataatacgatactacgggaacatgctttgggctcagatccgtggtggttatttcaggctgctaatgatgcccgccgtgcaatggattatttgcaagaccggcgacagcagttaccaagccaggtggaattgtggcagcagatggctgccgtattgctcagtgagcactatggtctgccgctgaatgacaccatgctggaatatgatgaggtggttcagcgccatattgatgagggcatcacaccgctgatggctgtcagtgctttagcccgaatatatcactgggaacggcgtgaccagccagaaggcaggttgtttccggaagaattggggcaggccagtgaggcattggcgttattctccagccagccatcgtgtctgaactattctcggatcccggcgacagaaccggctgatacttgtgaaccggacagatcatcacaatctgaacggttgctgttaccgccggtggcgtctgatcgtagctgtgaagatgaagataatgatccgtctgacgataatgttgtggaactgccgttggcggccacttaccgggaaccgaatccacataaacaggcttttatcagactgtttaaccagattgcgccgcatgaaaatcgctggcaggtgttctgtgattttgtgcatatggcagcctgttcactgtacaacgcgttgttgcaaaatgatgaatttgaagcggactatatgcagcgggttaaacgttattcccgtgaagatgcattccggctgagtcgtttgctgagtgaagttattatggggctggagtatgaagccggtgattttctgggagctgttttcatggcgctggaattaggtaatgaccaggttggccagtattttacgccgtttccggtcagtcatatgatggccagaatgaagctcgctgagggcttggcgaggctgggatccggagagcatgaatatatcacagtgtctgatccggattgtggcgccggcgggatgattattgcgatgtatcagaccatgctggaagcggggtttaatcctcagcaacagatgttggcgttttgtgtcgatattgacccggttgccgcgatgatgacttatatccaactgtcgttgctgggtgtcccggccgtggtcacggtgggcaattcactcactcatgtcatgtctcagaaaatggtgacgccaatgtaccatttaggattctggcaatttaaacgtcagcgtcaggaagctgaagatgaaatagcgatgcgcaaggccagctga

SEQ ID NO: 7715 - DNA, 546 bp, Photorhabdus luminescens
ttgattaccctgacggggaaacccgtgagggttaactccgtcagtcatttttttacgaaaggagttaaccctatgagtacaatgacgactaaagaacacattcggtcaccgtcccagtccctgtccgtgcaggcgctggctgagccggaaatattcaaaaaaacccgtagccggtttaatcagtggttgcaggcgcaattcgacaatcactatcacaccctgagaaatcacggttaccgttgttttcttgctcgtcatcatccgaccgagcttgagcgttacgatgaggcatgtgaagccttacggcgtgaggaatttcaccggttcagtgagttgcagacgctggggctgttcctgtatcaacaggttcagctaaaggagaagaaactcaggcagcgtcgtcgttggctgttgaccgggatagcattgacgtcgctggtgacgggagtatatttgattcttcatgcttatgaggttgatttgtcagcagtttatcacgagctgactgcgttaccggccagaatagctcattatttcatgcgctaa

SEQ ID NO: 7716 - DNA, 297 bp, Photorhabdus luminescens
atggtcaatgagacgttgactgccgttacccggtgggtgatgccggctgtagcgattgaagagccagtctggttgcgaatggtgagttatccgtctgcgccggaatatgaaacagaacggtttcatcaactgatttaccaggcattcaaagcctggtcagcagcaaagccgggaacgtgtgaggtgacgtttggttttttctgtttgccgtatgacggcgacatgaaggcccccttatggcaagcgctgcggcttaaacatgaatctgatcggttgctgattgcgttggacgcctaa

SEQ ID NO: 7717 - DNA, 387 bp, Photorhabdus luminescens
atgttaatgatctttgcgacagtactttggggcgttattcgttggatttctctgtcgttttaccatgtgatgtcctggttgttacgccgaagacaggtgagactaccggtgactcatatgacccaggctcggagacaaacggtgtatgcgggtaaatggcaactttctgatgacgcgaagtcatgcgggagaccggttgtggtcagagatagacacagctacaaaccgggtgtggagttgctgtatttcggtgaggagagtccagagccgttttatggcgagcggtaccttatcgacgaaacggaagcggtggattcggcacaacagatgctaacgcgcctgttgagacagcgtagtttatcgcatgcttatgatgaggccgcataa

SEQ ID NO: 7718 - DNA, 222 bp, Photorhabdus luminescens
atgcctgcttttcatccccccactgatacgacaaccttgtcggtttcagagatgttaacgccgaaacaacgctcacttatccgcgatttgatccgtgatgagtgtgattatcgggatcgtgacgcactccttaaacttttgggcatgataacgctgttcaaagttgcggggatcctgacgttaggtgtgctgttgctggttttccagttgttatggggataa

SEQ ID NO: 7719 - DNA, 165 bp, Photorhabdus luminescens
ttgggcgcaaagttaagtcggggagattgcctcggctggcgatacttatcaggcatcctgacagggattgacctgacggatttatttactttgtatgatgttcgtgatgaacatcttccttacatttcccggggcttgtccccgtcaagggcaggctcccggtaa

SEQ ID NO: 7720 - DNA, 978 bp, Photorhabdus luminescens
atgacattcagaataccgttttgtattgcctgcctccgtcaggttacaagcggtggtgtcgtgtgggttaaaaaggaaatcgtttgcatgtcaaagttgagtaaacagttagtcacattggcccgtcaggctggcggcagttttaaaaccgtttcagacagaatgaaaatagccaaacgtctggcggaaagcatggcgatattaaatattcaaatccgtgatattaagaatatgaaaattaatcatattgaaaaatatatcgatagccgaaagtcagagaatatttcaaagcgcacgttacaaaatgagatggcggccgttcgggcgatattcgctatggcgggaagatctcaattagctaaccctcatcacgaacggttaagtaatcatgcgctcggattatccggcaccagccgggaggggactaagatggcgatttcggatgagcgttatcacacgacgcttgttttggcccgggggaaagatgaaggggtcgctgcggctatgcaactttctcgttatctgggactgcgaacagaagaagcggttcaggcggcaaagtcattaagaacgtgggaaaaagccttattgcgtggggatgaaagagtgagggtagtgtttggtacaaaaggaggacgtccccgtgacacgacggtggttgagcgggataaagtgatccaggccgtcaggacggcaataaagtatgccaataaaaatcagggtcgtttgattgataaaccgaatttacattcggccattgatcgttaccggaatatcgtcagggaagcggggttaaccggaaagtcttcgccacacagtttgcgttatgcttatgctgttgaggccataaattatcatctgtcgaaaggattaagtcgaaaagaagcggaagcgatggtttcaatggatttagggcatggggatggacgaggacattatgttgcccgtgtctacaataaacagtgcagtgatgattaa

SEQ ID NO: 7721 - DNA, 258 bp, Photorhabdus luminescens
ttgccagtatcctcaaacaataacctgcgggttgattttgctttctacgattggcttgcctgggtggtttcgttcagtagtctggatgactgttgtcagattcgacaggttattggatattttgcggacaacgcattgggtccagaagaaatgggcggcgtcacttgttggcgtgataacgaaaaccaagtgacgctgccagcgtacaacatcctaaaccacgtaatacaagctttccctgtatcttctaccttctga

SEQ ID NO: 7722 - DNA, 1665 bp, Photorhabdus luminescens
atgaaaagcagtattttagtcttaacggttttttgtagcgtagtctcaggcagtcaagccgccgacatcgcagatcaacaactcattcatcaacaggcccgtcagcaagccctggaggcgcaattagccccgccgcctgcggaggttcacctgtcggtaccggaaaccggggaatcatccgccttcccggtggaaaccccctgttttcctatcacacatgtagcattggcaggtaccgaaaatttcccgcactggttaccgttccggcgtgtcgcccaacagggcgaaaaccattgcctgggcgataaaggcattagccggctgataacccaattgcaagatcagctcattaatcacggctatgtcaccagccgggttctggttcctccccaggatctgcgtacccaaacgctaaaactggtgatgataccgggcaaaatccggcatatccgctatacccctgacagcgggaaatatatccagcggataaccccctttcccgcgcgtgaaggcaagctactggatttacgggacattgagcagggactggaaaacttgcaacgcttcccgaccgtgcaggcggatatgaacattgtcccggcagagcagccgggggagagcgatattgtgctggactggcgtcagtcccggcattggcgaatcgccacgtatctggatgataccggctccaaaagcaccgggcgttatcagggcggactcaccttctttctggacaacccgctggcgttgagtgatctgttttatctctccggtggacgcgatattcattcatctgccgggaagggcagccaaaacgacacgctctattactccctgccgttcggctactggatggcgagcgtgacggccagtcattacgattatacccagacgatagccgggctgaatcaggcgatccaataccggggcaaaagccaaaacctggcggttcagcttagccgtgttctgcaccgtaacgccgaccagaaaaccctgcttaatggtgaaatttatcgccggacgtcgcgcaattttattgataagaccgaagttgatgttcagcgccgggaaaccgcgggctggaagctggggctgtcccatcatcactttatcggcagcgcgacgctggatactagggtgacttaccagcagggcatgcgctggtttggcgcacaaccggcgccggaagagtaccgcaatgaagggaccgccttacctaaaatcacccaattctcggcgacgcttgccgggccgttaaccttgttttctcagcctttttcttatcaaacccagtatttgcgtcagataagcgccagcccattgacgccccaggatcgcttctcgattggcggtcgctggacggtgcgcggctttgatggcgagctgactttatccgctgatcggggctggtacagccgcaacgaactggactggcaaaccccgctgaaagggcagtcgctgtatctggcaatggattatggcgaagtgggcggccggggcagcgacgcgctgctcggaaaacacctggcggggagcgccctaggctggcgcggcagtctgaaaggggtgagctacgacctgtttgtcggcgtcccgctgtccaaacccgccggtttccaaacctctcccgtcacggccggattcaacctgtattggcagtattaa

SEQ ID NO: 7723 - DNA, 8814 bp, Photorhabdus luminescens
atgaacaagcagttgtatcgtattatctttaatcaatcccgccagatgtggatggtagtggccgagatagcgcgggccggacggggacgaaccgggcgccgatatcggtgcccctcttcaccacagcatcgttgccgactcactgcgctacggtttggattgttgttagcctttggcgggatttcgctcaccgcgcaggcggcgattgtggccgacggacaggcgccggggcgccagcaaccgaccatcattcgcagcgccaacggcacgccgcaggtcaatatccagacgccgggcgccgatggcgtttcccacaatacctaccgtcagtttgacgtggataaacagggagttatcctcaataacagccatcaagccacgcagacgcaactggggggtatggtcgcgggcaatccgtggttagccaaaggggacgccagcgttattcttaacgaagtcaacagtcgttaccccagtcaactcaatggctggattgaagtcgccgggcataaagccgaggtgattattgccaacccggcgggtatcacctgtaacggttgcgggttcattaactcacatcgcaccacgctcactaccgggcaagctctgatggagcgaggccggctgaaagggtttgatgtcaatcagggggaagtgcggattgacgggcacggcatggacagcacacagcaaagttacaccgatattatcgcccgctccgtcgccatcaacgccaaattacacgcgcaagacctgaaagtgaccaccgggcgcaatattgtggatacggcgcatcagcagatagagaaaaaatcgattgacgatgaaaagcacccggcgtttgcgttggatgtggcggcgctgggcggcatgtatgcccataaaatcaggctgataggcaccgaaacgggggtgggcgtgcataatgccggtaatatcggcgcgtctgccggggaggtccatatcaccgccgatggctgggtagagaaccgcggcaccctcagcagccgggatacgttgcaattaacctcgtctgccgatgtcactaacaccggcaaattgctgtcacaatcggcggtgaatttacagaccaaaggagcactgcgcaatcagggccgggtggaagctcgcggcgataccacggtcaacgcaggcacaatacacagcagccatgacagtgtgtgggccgcgggactggatgataacggcaacactacccgtcccggctcactgactctgaccgcgcagcacgttcaggcgaaggggaaaaatctggccgccgatacgctggctgtccacagtcagcggattgacctgagcgacagccagaccgcagccagccagattcaactcaccgccagtcaagcggggatcagtaccgctcgcgctaccgtcaacgccgaccgtttgacggcgaaaacgccgggccagtttaacaacgacggcggccagttagtggcgaaggaaatccacctgacgaccccggatttatccaaccagcaggggaaaattaaccagaccgggaccggtgaactgacgctccatacacgcaccctgaataaccgtgaggggacagtgttcaatcaggggaaattgaccctcactactgaccggcttaacaaccgtcagggcactattgccagtcagggcgaggacctgcatctgaccgcgcatcaggccgataacaaccaggggacggtgcaattggccggtcagggtcgattatcgctcaacacgcaacggtggctgggtgataagggcaagctgctcaccaatggcgccctgacgatacaggccggtgaactgcaactcaaccaggctgaaactcaggccgggcagataaccgtcaacgccgacaccctgagtcatcaaggcggcgtgatgcaacaacagggcaaagataccctgtccctcaccacccggaagctggataaccagcgcggtacccttgcgggcaacggcaacctgaaccttaaagcaacgaccgtcgataatcgtcacggcaacatcgtggccgccgaaaaaggctcgctgacactggcggtcaaagacacgctggacaatcagtcgggccgggtgttaagcggcgggcagttaaccctgcgcaccggcgatgttgataacaccggcgggataatcgccgcggacggtaaaaccacgctgaccagcgccgagctcactaatactcagggccagattgccggcaatggcgggctggacattcacagtcaacaactgataaaccgcgaggggaccttacaatccgccgacgccctgactctggataccgacgggcagttactggataaccagcagggccatattctcggtgagggcaagacgaccatcaccagtggcccgctggacaatcgccacggtcatcttcaaggcggacagttggctatcgatacccgacacgccgcgctggataaccgggacggcaaattgttatccacggacaccttaaccctgaatactcatcagctcgacaatcgtcacgggcaggtgcaggcggtgggcgacaccacgctcaatgttgacactcaaaccgataacaccggcggccttatccgtggcggtcagcaattgaccctgaacaccgctcatttgattaaccgggaaacgaagcagacggataacgggctggaagcgcaaaacctgacggtcaacgctcaacaggtggacaatactcagggcgctttacgggcagccaaccatctgaaagcgaacatcagccagaccttaaataatactcaggggctggtctctgcgggcaaacagctcattctcaaaagcgaggcccggcaaccgcatctggcgattaataaccggcaaggcacgctgattgccggggagcacgccacgattaacgcccatgctctgagcggtgacggccaactgttatcgcagggcgatatggcggtcactttaaccgaggattttcatcataccggcaacaccgcggccaatggcaatctgaccctgaaaacaaccggcaatctcctcaacgaccgccagataaaagccggtcgggcgctgcatcttgacactcacaatctcaccaatagcgcctccggtgaaatcagcgccgggcaaacgcaaatccaggctcacgataccctgagcaacaccggactgattgacggcggtttgactcatctcacggccaacaccctgaacaataccggcaccgggcgcatttacggggaccagctggccctccagacgggcacattgaataacaccgctcaggacggcaaagccgcggtcattgcggcacgggaccggctggacatcggcaccgcaacgctcaataaccagcatcatgcgcagatttacagcgtgggcgacatgcgcatcggcggccagttggataataccctgacggcctccggtcaagcccatgagctcaataaccacgcagcgacgattgaagccgggcgccacttgaagattaatgccgaccagattaacaacaccaacgccgggttggtcactcaggtcgtcgaaacggaaaagtctcagcatcacgatgcagtactcagcggccagaccacccgttacgactggtcacaggtggacacttcccaccgcaataaatacaaagtgcacgatgccatcatgccggatggcagccgcagtaatgacttttacgaatatcagtacacccggaccgtcaaggaaactcaggttaaacagagtgaccccggtaaaattctggccgggggtaatatcacgctcaacagtgcgcaggtcactaatcacgacagccagattgtcgccagcggggcgctggatggagaaatcggcgaactgcacaatattgccactcagggcgaacggattaccaccgataaaggtcgccaaactcactggtacgccaaaaagaccaaacacaaaaagttcgggttcggtggcaccaaaacctcgcaggggaaaagccgcagcaattatgacccggcccccgtaatagaaaccatcgacctgaaaacgctggcctggcaggagaatacccgtccacagggcaccgatatcacgattacagaccgacagaccggtcagatacattctgcccccacggcggttacgccggtgaacggtatcaaaaatcagccactggtattgcccccggagaccgtcaaagggcaaacagtcgatccggtgatacgcgtggtgacacccgatacgcgtttgccgaataacagcctgtataccgtgcaaccgggcagcgacagccactatctggtggagaccgacccgaaattcacccagtacaaacagtggctgggctcggactatatgcggcaacagttaacgcacgacccggcgctggttcacaaacgcctgggcgatgggttctacgaacagcggctggtgcgcgaccaaatcacccaactgaccggtcagcgctatctgccgggctacaacaacgacgaagcgcagtttaaagcgctgatggatgccggtgtcgcctttggcaaacagcaacagttaacgccgggtgtggcgctgagtccggcacagatggcgctgctgacctcagatattatctggctgactaaccaaaccgtgaccctgccggatggcactaccgaggtggtgactgtgccgcaggtttacgcgcgcgtccgtcagggcgacctgagcagtgatggcgccttgctggccgggaataccgtggcgctcaacagtcagggcgatatcaccaacagcggcacgatgagcgggcgtgacgtcactcaactgacggccaacaatttgaccaacagcggctttattcgcggcggcaaagtggatttagcggcccaacagacgctcactaaccggggcggccagattcagggggatgatcgggtgactctgaaaggccgggatatcaccagcgcatcgaccgtgcgcggggatgaagctaaccgctggctggaccgtccggcaggcatctatgtgcagaacgataagggcaccttatcgctgagcgccattaacaatgtccaattaaccgccagtgacgtcaagaatgcgggtaaagacggtcacaccgagataacggcaggccataacctgacgctggacgccttaagcacgcgccgcacagagcaaggcgactgggggaaagataacacccgccgtctgacccaacaacaagatatcggcagccagataaccggcgccggtgaggtgaccctgcaagccgggcaggatttgaacgccaccgccgcccacgtcaacgccggtcaacaactgacggcgcaggccggaaataatctgacgctgaccaccgggacggcctcatccgacttagtggagcacagcaagcaaaccagcaaaggctggctgtcgaaatcgtcagtggaaacccacgatgaagtgcatgaccggcaggcgctcagtaccacattcagtggcgataaagtgactctacaggccggtaaagacctcaatatccgcggcagcaatgtcgccggtacgcaggatgtcagcctgaacgccggtcatcagctcaccgtcaccaccgcagccgaagcgcacgatgaaacccatttgcgacaggagaaaaaatccggcctgatggggaccagcggcatgggtttcaccgttggcaaagccagccagaaagtcaccaccgacagtgacagccagctgagcaaaggcagcacggtcggcagcagccagggcaatgtcacccttaacgcgggagaacagctccgggttcacggcagtgaggtgattgccggtaaagacctgacgctgaccggtcaacaggttgatatcaccagcgcggaaaatcgccatcacaccacgacaaaaaccgaacaaaaacagagcggcttaaccgtggcgctgagtggcgccgcaggcggggccgtcaacagcgcggtgcaaacagccagagccgcccgcactgaaagtgacccgcgagtaaaagccctgcaaaacactaaagccgccctcagcggagtgcaagcggcgcaggctggccgactggcggaggctcagggcagtgacgacaaaggcaataataatctggccggggtgagcctgtcttatggccgccagtcttcccgttcagaacagcagcaccgccaaaccacccaacagggcagccacctcaccgccggggataacctcaccataaccgccaaaggggatggcaaaggcgcatcaggccagaatggcgatatccgtattcagggcagccagttacaggcgggtaaagacctgcaactcaatgcgaatcgggatattcagctctcatccagccagaacaccgagcagacgaccggcaaaaacagcagccacggccgctcgctgggcatgggcctgaccgtgggaccgggaggcaccggtctgaatgtctcggccaatgtcagtcggggcaacggtcgcgaaaacggcaacggcgtcagtcatactaacaccacattacaggcgggacagagcgtcgggctgaacagtggccgggacacgacgctgaaaggcgctcaggtcagcggcgaacagattaccgccgacgtgaaacgtcatttgatcctcagcagcgagcaggacagccagcgctatgacagccaacaacagaatgccagcgcgggcgtcagtgccaccgtgggtcccctcactaacggtaccgcaagcctcaatgccagccgcaataaactgcacagcaactatgacagcgtgcaggagcagaccgggctgtttgctggcaaaggcggctatcaggttaacgtcggtgaccacacccaattggacggcgcggtgatagcgagtcacgctgacaaaaccaaaaacaccctgaacaccgggacgctgggctttaaagatattaaaaatcaagcggattttactgttgagcagcaaagtgcgggcgtcagcctgggccaaccgaccgccggtcaggtcctgaataatctggcggtcaatgggctgagtggttccaataaccagggccatgacagcaccaccacgcacgctgccgtcagtgacggcaacctgattatccgggataaagcgcaccagactcaggatgtcgcgaacttaagtcgcgataccgataatgccgcgaatgtcctgagtccgatatttgataaggaaaaagaacagcaacggctgaaacaggcgcaactgattggcgaactcagcgcccagatgaccgagatagcccgtacggaagggaaaattatcgccaccaaagcggcgaaagcgaagctggaccatatcagtgagccggacaaagcggcagccagaaaaaaattggtcgacagtggcaatccacacccgactgcggcggatattaataagcaagtttatgacaccgcttacacacaggcgctgaatgactcgggctttgggactggcggaacctatcagaaagcgttacaggcagccacggcagccattcagggcttggcagggaacaacctcggtcaggcgctggccgggggcgcttcaccgtatctggccggtgtgataaaagcgctgacgacagatccacaaactcataaagtggatattgccaccaatacgctggcccatgcgattttaggcgcggtaacggcagaggtcagtggcaataatgccttgtcaggcgcagccggtgccgcatcgggtgaactggccgctcaagttctgataaagcaactttacggcgacggcaccaaagtcagtgaattaacggaggagcagaagcaaactatcagcaccctttccaccctggcagcaggattggcaggcggcattgccggtgactccaccgccagtgccctcactggggcgcaggccgggaagaatgcggtggagaataatgcgctggcctcgcgaaatctgggtgattgccgcacgctgtcaccggaagcgtgcggcaaggctaaggagctgagccagcgcattctggataaaggcttgccgtcagtggaggacatgcgcggtaaactggcatcatgtcaggatgacagctgccgtaaaggagtctggacagagtaccggcaggccagtgatgcgaccatcaacagcctgaaacagatggcgttgaatggtgagttgagtcgtgaagaactggcattcatcaaccatgaactgggcaaggagctggccgtctcaggttaccgtgccaatgacaagatagggcgttcagagcagagcagctggttaaatggcggcagcggacccctctccgggttttttaacacggaactgcgtcaaaaagagctggaaaaatcgggcttgtccaaagcggatgcggcgcagtacgtgaaggaagagcagcgcaacctgttgttgctggagactgcggtcggggctattgggggagcagccagtaataagatacaggcgaagccatcatctgtatcatcaaaaaataatgttgataaaagcgttccggcggaagctactcaagtacagcctaaccaaacggctaataaatcaagtacaacaacacagacagatgtcgcaaaatactttggccaggacagaaaatattggtcggctgagccagttccctttaagggaaataaggtttatcaacgaaatgacttgtttgatccaagccgtattgatcctaaatcaggtaagacaaacgtagagcttatgagagctggtagagcacctatcggtaatgatggaaaacctgtcaatttacatcatatgttacaaaagcaggatggacctatagctgaggtaacgcagagttttcataaggataatcataaggtcatacatataaatgataacagtatcccctcaggtattaaccgctcggagtttaataagtggcgttctgattattggaaacaacgagctaacgattttaaatag

SEQ ID NO: 7724 - DNA, 420 bp, Photorhabdus luminescens
atgaatactaaacttaatgatgttattgaagaaatcgaacgcttatcagatggtcaaagaaatgatgttgatttgccagatgatgaattaatttctcagtatgaaaaagaaattggtttcgaattttcaaatgattataaagaggttttgaaaaaaataagtaatatattctacggaactatagatttgttatctgttacccgtgataaaaaatattatggagaactgtcacaagcgttaagcgatgcaagagagcaagggctacctgaaaatttgctcccgatctgtgaagataatggcagttattattgtattgattatgacggaaaaattaagtactggacgcttgatggttataacgaggaaagttggcctgatcttgctagctggataaagcaagtatggatagaaggtaattag

SEQ ID NO: 7725 - DNA, 243 bp, Photorhabdus luminescens; identical to SEQ ID NO: 5836

SEQ ID NO: 7726 - DNA, 336 bp, Photorhabdus luminescens
atgatgacgttaggtcagcggatttctgccctgcgtaaacacgccggacttacacaagcgcaactggctcaggcactgaacgtttctcagcaagcggttcagtcatgggaagcgggcagaagacggatccagatctctgttctgcctgagatagcaaagttactttccgtctcgctcgaagaactgttcggcgaagagagcgacacgatcccccgtaaacggggaccggcttcacggcttgagcaacagatacagattatcagccagttgccccgcgctaagcagaagctggtttcagagatgctggatgcggtaattgcacaggcacaacagtaa

SEQ ID NO: 7727 - DNA, 3315 bp, Photorhabdus luminescens
atgacccgcgttcccgataccgatttagcccgcttaaagcaaaccgtctcgttactggggctggcgcgtaagcaaggccgtccgatgaaaaaacgcggtgaggattatgtgctgcgctgtccgttccataacgagaaaacgccctcaatggtgatatcgcctgctaagaacctgtatcactgctttggctgtggcgcagcgggatcggtgctggactgggtgatacaaacggaaggggtgacgctgaaaatcgctatccgccggctgcgggagctggccgggttgccggatatggacaatgcggttgtggccgcttcttctttagccgccccgccgggatcacaggcggcacctctgccgcgcccgaaactggccgacctggacgatgacgggcaggcgctgttgcatcaggtgattgatttttatcatcagcacttactggcgtcaccggaagccaaagcctggctggagcggcgcgggctgaaccatcctgaactggtcagccactttaaactggggtatgcgggccatcacggtatcagcggttccgcggggttgttgccgtccaaagacagtcaggaaggtcagcagttgcgcggcaagctgtcggggctgggcgtgttgcgtaccaccacccggcaggaccacttccggggctgtgtcgtggtgccgataattggctgggccgaatcggccagtgtggccagccgcgggcgggtgctgcaactgtatggccgccgaacccagccggattacaaagtgctgaaagacagcccaaagcatctgtacctgtcctcaccactggccggggtctggaatgaggcagcgatgaaagccgctgcggaaattatcctgtgcgaagcgctgatcgatgctatgaccttctggtgtgccgggttccgcaacgtgatcgccgcgttcggggtgaacgggtttaaccgtgagcatctcgaagccttgcagtatcacggcgtgaagcgggtgctgattgcctttgaccgggacgaggccggagaccgtggcgcggctaatgtggcggctgacttactggaagccggtatcgaggcatggcgggtgcagttcccgccgggcatggatgccaatgactatgcgctgaaaagcggcaatgccgaacatgcgctggggctggccttgcaacaggcggtctggctgggacagggaacagcgccgggcgcggtgttcagccatgagcggcccgtcttgccgacggtgacggaaaagccccaaagtgccggggtggctaaatcttcttctttagccgccccgccggcgctgaccgttgcccccgtgccctgtgagcgcacggcgtccggtgagttgttgatgaaaagcggcccccgggtctggcggatacgggggatgaaaaaatccccggtaccggacgtgatgaaagtcaatgtgcaggtgcgggatgaaacgtccggcctgttccatgtggatacgctggacatgtatcacgcgcggcatcgtcagcactacatcagcacggcggcgcaagagctggaatgcgagctgtcggtcatcaaacgcgaagccgggcgggtcttgctgatgctggagcagcaacaggacgcgcaacagcaagccgacgccgaagcctcagggacaacggcggtgacggtcagcgcggaagacgaagccgccgcgctggcgttgctaacatcgccgaacctgacagaacagattatcaacgacatggccgcctgtggggtggtcggcgaatccaccaatctgctgaccgggtatctggcggcagtctcgcgcaaactcgataaaccgctggccgtgttaatccagagcagcagcgcggcaggcaagagcagcctgatggatgccgtgctgaacctgatgccggaagaggagcgtatccagtactcggcgatgaccggacagagcctgtattacctcggcgaaaccagcctgcaacacaaaatactggcgatagccgaagaagaaggggtgcggcaggcggcctatgccctgaaactgttgcagtccgacggcgagctgaaaatcgccagcaccggcaagaacgagcagagcggcgaactggtgacgcgggaatacagggtacagggaccggtgatgctgatgttaacgacgacggccattgatgtggatgaagagctgctgaaccgctgtctggtgctgacggtcaacgaatcgcgtgagcagacgcaggctatccacgccatgcagcggcaccgccagacgctggccgggttgctggctgactcggagaaaggctatctgacgcagttacaccagaacgcccagcgcctgttaaggccgctgaaagtggtcaatccttacgcccatcaactgacgttcctgtcagacaaaacccggatgcggcgcgaccacatgaaatacctgacgctgatacaggccattgccctgctgcaccagtatcaacgtgaagtgaagaaaaccacccaccgcgggcaggtcatcgaatatatcgaagtcacccaggacgacattgccctggctaaccggctggcgcatgaggtgctggggcgcacgctggatgaaatgccgccgcagacgcgcaagctgttactgctgatacaagagatggtgaacgcacaggcgcaaatccagcactgccagccaaatgaagtccgctttacccggcgggatatccgcgcctttacccactggagcgacagccagctcaaaaaccactgtcaacggctgacggaaatggaatacctgctgttgcatggcggcagccgggggcacctgctgcattatgaactgctgtgggacggagaagacaacggcgcagcccacctgtgcggcctgctggatgtcggagaagcggactcagaaaccgccggcagtgaacgcaagtctgacccggaaggtcgtaagtcttccccaagtccggggcaagtctggcctgagtctggggaagaaaaacccgcgtcagcccagacagaacaagggccggcaggggcacaagtccgggcagatgaaaacgcagttattaaggaaaataatcacagaggcgcattgcccgtacccgacagggataaaacgccggcagccgtcccgacaggtcatgagagcaagtctgacttaaatgaacgccagtctgcctcaagtctgggccaggtccgggctaagtctggggtaaaaaaatccccatcagggcaggcagaacacgggttcagcgtaccgcaagtcggggtaacggaagacaccgtgataaaaggaaaaaagaaaacacgccccttgtctgcgcccgcccctcaatctcaaccggaggtcaatcatggcaaaccgtaa

SEQ ID NO: 7728 - DNA, 1131 bp, Photorhabdus luminescens
atggcaaaccgtaaaccccgcaagggaagtctcctgaccgtcgatgacgtctaccgtcagcctgtcggtccggcacatgacccaaaaagcctgtatgcgctgctgctgcgcttcgtggcctggcggcaggaacggaactggtcggaaaccacgctgaaagtgcagacccatcacacctatcactttatcctgtgggccacggaccggggcctgtactatgccgcggacatcacgcggccaatactggagcgttaccagcgctacctgtaccagtaccgcaagaccaacggagagccgctgagcatccgcacccaacgcacgcagttgcagccgttacaggtatggttcaaatggctgacgaaacagaacctgatactggcgaacccggcagcggacattgagttgccgcgggaagaaaaacgcctgccgcggtatatcctgagcattgatgaaatcgagcatatcctgtcgctgcctgacccgaatacgttgcagggcgcgcgcgaccgggccctgatggagctgctctggtcaaccgggatacgacgcagtgaagcggcccggctcgatatctacagcatagacgggtcacgcaaaacggtgaccatccggcagggcaaggggaataaagaccgggtattgcccctcggcgaacgggccttaaactggctccagttctatcagcaacagattcgcccgcaactgctggtcaccccggacatccaatcactgttcgtggcaatggacggtctcgacgggttgcagccgaacggtatcacgaatgccgtaagcggttatatccgggccgccggcattgagaaaaaaggtgcctgccacctgttccggcatgcgatggcaacgcagatgctggagaacggcgcggacctgcgctggatacaggccatgttaggccatgccagcgtggagtcaacccaggtgtatacgcaggtctctatccgggccttgcaggcggtgcacgccagcacccatccggcggagcaaatggccgacgaaaaagtccgcgacgccgatgaggtgggtttactggccgacctgtacgccgacgataacgccgacacggacacgccgccggacagttcagagccgacctcaaccgccgatagccgctga

SEQ ID NO: 7729 - DNA, 132 bp, Photorhabdus luminescens
gtgagcccgggcaaccgcctgagcattgatgagcggcttaatgcgtataattggcattatgtcttgcgcccccgcgggtcagcattggcgggtgtggcgcacaaggctgcgccttatgctctaaccgactga

SEQ ID NO: 7730 - DNA, 267 bp, Photorhabdus luminescens; identical to SEQ ID NO: 5857

SEQ ID NO: 7731 - DNA, 687 bp, Photorhabdus luminescens
ttggcggtcaacgtcgcaatggaatgggttgttgcggataataatgccctgagcttacccaaaggcatggcggattatggtcggtcagcatcaagtctggctaccgctatgttaaatgaaggtaaatcccctcaagagatttcagcggcattgtcaaaacatgccaaaggcgatcacccggaaggacaagatccggcaagaggattattagtcgcttggggggcaggtgcttctgctgtgggaggtactataattgcgcctgttgctgggaccgcagccgtagtgggtggagctttacttggtgcaatatccgataccggaaaacagcttatcactatgaaaccaaacgagagttacagctataccgacacccttatagctgccggagtgggagcattaacccaaggtaaaggtttgatatatacagaaggggtaaatattggtggagcctggctgggtagcaagcttaaaggtgaagatgcaactggagctgttataggtgcggctgttggtactgtagcaggtgctaaaggtggaaaaataattacagataaactggctcctgtcgttatcagtcctgtagcgtcagaaataggtggtgctatcggaggtactgttgtaggtacagtaataggcactggtattgaaaaccagataaaagaaaatggagctaaaaatggaaaataa

SEQ ID NO: 7732 - DNA, 264 bp, Photorhabdus luminescens
atggaaaataaacgaataggattaaaagcttttatcctacttacagcttactggacatcgtttatttttcttttggcctttattgcagggttagctgtacctgcattttattattttgaaaatggttattttaattatcattggaatgattttatttacactgcgagagtaggagttggtgcaggattgcctgttggaattggaatttgggtattggcgaagatagaagaaattcgcaaaagaaaatcctcttcagatccttag

SEQ ID NO: 7733 - DNA, 621 bp, Photorhabdus luminescens
atgccaccaccaccgatagccggttcaaacacgggtgaagccgtgaatgaagcaaaccagacaatagcttcagctttggacaaaaaattgaaggaaatgggagagtctatagataaagccacccaatgttcttttggccgggtatgttcgtcagattatgtcgataatgaaagccaaccaaatgtagggaagaatctgacaaatgaagaaaagtctcagtatggtggagttggttctggatcacctagtggttgggaaccacaggatgaggagaatgcgagaactcagcaatctgattccaaaaattttgatgataagtttaaaaagagtgatttagtatcttctgctaataagcctattaataatcaaggattatctgctggggctcgtgcttgggaaaaacacgcaggaagaccaggaggaatatttgagccgttaaaaggaaatgttactcagaaaaatgaagcagctagccggttcgtaaatgaagtgttgaataataagaatactgtccgaaccgatttatccaagggtggtatagaataccgtctacctgatggtagaggtgtccgctacaactcagatggttctttctcaggttttttagatcctaaaaggtaa

SEQ ID NO: 7734 - DNA, 912 bp, Photorhabdus luminescens
atggaatgggttgttattgagaataactatctgagcgtgaatgagctggacagttttgcgcatcaagcccgcacctgtgaaggcgaaagctgcaaacaagtgatcaaggatatggtagacactaatatccgcaatcagcaggaaatgatggatttctgcaacagcaacccgacccagtgtgcacagaagtatggttatctggttgatcagtggccggtgtttgaacgtaccctcaaaaatatggaccgggatggcacattgccggttgagttcagaaattacctgtcggcggtgaatacgttaggtcaggcggccacaggcaaggtaggcgaactcggctggacaaaacgctttgaggcgatgggcatgagcaaggaaacggccgctgcgatggcgatgacattgccaattgtgatggagggggctaaagggccgaagtcatcgccaacaacaaagggaagcacaggcgcggctgttaatacagagaaaacggcgctggaaaagattgggaaaaacagtcaaggcacaacgaatctgggtgataaatcggataatactgtttatcatcaacagcttatcaaaaatgctgaaaagatatctactgcgaaaccaggacaacaagttgctgcgccaagggatctgaatgagcaaactttctggaaacaggttgaatcaaatccgtcacaaggaagtaaattgttaggtatgaataaagatccccgttttcctacagcggctggttttcagaaaatggaagcaaaacataggctccctaatggacaaacaataactatccattaccagtacaactcaaatactggtaaagcctatgacatgaaaattactactcctcagagaatccaacaggatcctaaaaaggtaatagattcaataaaggataatgttaaatga

SEQ ID NO: 7735 - DNA, 318 bp, Photorhabdus luminescens; identical to SEQ ID NO: 7506

SEQ ID NO: 7736 - DNA, 243 bp, Photorhabdus luminescens; identical to SEQ ID NO: 7507

SEQ ID NO: 7737 - DNA, 372 bp, Photorhabdus luminescens; identical to SEQ ID NO: 7508

SEQ ID NO: 7738 - DNA, 3315 bp, Photorhabdus luminescens
atgacccgcgttcccgataccgatttagcccgcttaaagcaaaccgtctcgttactggggctggcgcgtaagcaaggccgtccgatgaaaaaacgcggtgaggattatgtgctgcgctgtccgttccataacgagaaaacgccctcaatggtgatatcgcctgctaagaacctgtatcactgctttggctgtggcgcagcggggtcggtgctggactgggtgatacaaacggaaggggtgacgctgaaaatcgctatccgccggctgcgggagctggccgggttgccggatatggacaatgcagttgtggccgcttcttctttagccgccccgccggagtcacaggcggcacccctgccgcgcccgaaactggccgacctggacgatgacgggcaggcgctgttgcatcaggtgattgatttttatcatcagcacttactggcgtcaccggaagccaaagcctggctggcacgacgcgggctgaatcatcctgaactggtcagccacttccggctcggttatgcgggtcatcacggtatcagcggttccgcgggattgttgccgtccaaagacagtcaggaaggccagcagttgcgcggcaagctgtcggggctgggcgtgttgcgtaccaccacccggcaggaccacttccggggctgtgtcgtggtgccgataatcggctgggccgaatcggccagtgtggccagccgcgggcgggtgctgcaactgtatggccgccgaacccagccggattacaaagtgctgaaagacagcccaaagcatctgtacctgtcctcacccctggccggggtctggaatgaggcagcgatgaaagccgctgcggaaattatcctgtgcgaagcgctgatcgatgccatgaccttctggtgtgccgggttccgtaacgtgattgccgcgttcggggtgaacgggtttaaccgtgagcacctcgaagccttgcagtatcacggcgtgaaacgggtgctgattgcctttgaccgggacgaggccggagaccgtggcgcggctaatgtggcggctgacttactggaagccggtatcgaggcatggcgggtgcagttcccgccgggcatggatgccaatgactatgccgtcaaaagcggcaacgccgaacatgcactggggctggcgttgcaacaggcggtctggctgggacagggaacggcaccgggcgcggtgttcagccatgagcggcccgtctcgccgggtgtgacggaaaagcctcacaatgctgatgtggctaaaccggctgctttagccgccccgccggcgctgaccgttgcccccgtgccctgtgagcgtacggcgtccggtgagttgttgatgaaaagcggcccccgggtctggcggatacgagggatgaaaaaatcgccggtgcccgatgtgatgaaagtcaatgtgcaggtccgtgatgaaacgtccggcctgttccatgtggatacgctggacatgtatcacgcgcggcatcgtcagaactacatcagcacggcggcgcaagagctggaatgcgagctgtcggtcatcaaacgcgaagccgggcgggtattgctgatgctggagcagcaacaggacgcgcaacagcaagccgacgccgaagcctcagggacaacggcggtcacggtcagcgcggaagacgaagccgccgcgctggcattgctgacatcaccgaacttaacagaacagattatcaacgacatggccgcctgcggggtggtcggcgaatcgaccaatctgctgaccgggtatctggcggcagtctcgcgcaaactcgataaaccgctggccgtgttaatccagagcagcagcgcggcaggcaagagcagcctgatggatgccgtgctgaacctgatgccggaagaggagcgtatccagtactcggcaatgaccggacagagcctgtattacctcggcgaaaccagcctgcaacacaaaatactggcgatagccgaagaggaaggcgtgcggcaggcggcttatgccctgaaactgttgcagtccgacggcgagctgaaaatcgccagcaccggcaagaacgagcagagcggcgaactggtgacgcgggaatacaaggtacagggaccggtgatgctgatgttaacgacgacggccattgatgtggatgaagagctgctgaaccgctgtctggtgctgacggtcaacgaatcgcgcgagcagacgcaggctatccacgccatgcagcgacaccgccagacgctggccgggttgctggctgactcggagaaaggctatctgacgcagttacaccagaacgcccagcgcctgttaaggccgctgaaagtggtcaatccttacgcccaccaactgacgttcctgtcagacaaaacccggatgcggcgcgaccacatgaaatacctgacgctgatacaggccattgccctgctgcaccagtatcaacgtgaagtgaagaaaacgacccaccgcgggcaggtcatcgaatatatcgaagtcacccaagacgatattgccctcgccaaccggctggcgcatgaggtgctggggcgcacgctggatgaaatgccgccgcaaacacgcaaactgttactgctgatacaagagatggtgaacgaacaggcgcaaatccagcactgccagccaaatgaagtgcgctttacccggcgggatatccgcgcctttacccactggagcgacagccagctcaaaaaccactgtcaacggctgacggaaatggaatacctgctgttgcatggcggcagccgggggcacctgctgcattatgaactgctgtgggacggagaagacaacggcgcagcccacctgtgcggcctgctggatgtcggagaagcggactcagaaaccgccggcagtgaacgcaagtctgacccggaaggtcgtaagtcttccccaagtccggggcaagtctggcctgagtctggggaagaaaaacccgcgtcagcccggacagaacaagggccggcaggggcacaagtccgggcagatgaaaacgcagttattaaggaaaataatcacagaggcgcattgcccgtacccgacagggataaaacgccggcagccgtcccgacaggtcatgagagcaagtctgacttaaatgaacacccgtctgcctcaagtctgggccaggtccgggctaagtctggggtgaaaaaatccccatccgggcaggcagagcacgggttcagcgtaccgcaagtcggggtaacggaagacaccgtgataaaaggaaaaaagaaaacgcgccccttgtctgcgcccgcccctcaatctcaaccggaggtcaatcatggcaaaccgtaa

SEQ ID NO: 7739 - DNA, 1113 bp, Photorhabdus luminescens
atggcaaaccgtaaaccccgcaaggggagccttctgaccgttaatgacgtctaccgtcagcctgtggggccggcgcatgacccgaagagcctgtatgcgttgttgctgcgctttgtagtgtggcgacaggaacggaactggtcagaaagtacgctgaaagtacagacgcaccatacttaccactttatcctgtgggcaaccgagcgcggcttatactacgcagcggatatcacccggccgatactggagcgttaccagcgttatctgtatcagtaccgcaagaccaacggtgaaccgttaagcacccggacgcaacgtacccaactggagccattgaaagtctggttcaaatggctgaccaaacagaatctgatactggcgaacccggcggcggacattgaactccccagactggaaaagcacctgccgcgctatatcctgaccatcgatgaaaccgaacagatactggcgcagcctgacctgacgacgttgcaggggatacgtgaccgggcgttgatggagttgctctggtcaaccgggatgcgtcggggcgaattaacccggctggatgtgtacagcgttgacggaaaacgcaaaacggtgaccatccggcagggcaaggggaataaagaccgggtgttgcccctcggtgaacgggccttaagctggctacagcgctatcagcaacaggtgcggccacaacttatcgtcaatccagacgtcaaggcattattcgtcgcaatggatgggctggacggcttacaggctaacggtatcagcaatctggtgacagcttatatcaacgcggtgggtatcgagaaaaaaggtgcctgccacctgttccggcatgcgatggcaacgcagatgctggagaacggcgcggacctgcgctggatacaggccatgttaggccatgccagcgtggaatccacccaggtgtatacgcaggtctctatccgggccttgcaggcggtgcacgccagtacgcatccggcggagcaaatggccgacgaaaaagtccgcgacgccgatgaagtgggtttactggccgacctgtacgccgacgataacgccgatgccgacacgccgccggacagcccagagctgacctga

SEQ ID NO: 7740 - DNA, 456 bp, Photorhabdus luminescens
ctgccctgcaaccgttgggccaacccccctaaaggcaggtcggcctgcggcctccgctcattgacttccccccgccccaaccccgctgcactggctgcgcccggttcgcagtcgcaggctccttgctcattcccgtgctcgccatcgccgccccgtgcagcccccgggggcttccctgaacaaaatcgcgtggtcatgcaaggtcatgcgcaacccgaaaccccggtgcccccgagcgtcgcaggggcgccgcttgcgggctctatgccgcccgcgcccgcagaacgggcatccgccgcccaagcgagttgggcgacgttcgcccgttgccgaaaaaggcgctacactgacaatggcacggcgggaaaaaccggcctttggaggcgaaaagcgcgtcagggggttttggggccggcggtgaacgcccattggaaaaaacgggtggtaactggctga

SEQ ID NO: 7741 - DNA, 855 bp, Photorhabdus luminescens
ttggcggtcaacttcgcaatggaatgggttgttgcggataataatgccctaggtgcagcagccgggtcagacttgggattttggttggctaaaacaccggactgtgatacggcttgcaaaagtaatattgctaaaggtatagctaatggaaatctaattgtctctgtgggaggaatggcagtagccggtggtgcccagattgtggccgccacacctgaaattgcagcaatggcacgagctgcactggaaggatgtaaagctgcgccaacaatttgtctaaataatgcaggtattcaggtcgcagaagcattaacgccgggtggtgtgggcgcagccggcgtaataggtgtgggtaaaactgcggcagaggcagtggcagcaaaatccgaagctgtagcggctaatgtggtgaagaatgtctcgaagaacttagaacaaggagtatcaaaaactataaaatcttatggcccgcatgaaattggcccattaggaaaccccaatgatttgcgagctcctgcttcaacgttcagaagtggaagttatactgaaaaagtcgcagaaacagatatatattttttcagagattatggcggctctgctaaagttgatggtcgcttttggactcctcagccatcaaaaggacctctacaatctcaactggatagtgctgttttacctgaatggggtaatacttttaaaaaccaagccattataaagatccccaaaggtactaagtattatgaagggccagcggcagcacaaattggaactaaagggactcaaccaacgttacatggtggtggtacgcaaatatttttaccatcactagacaataactggataattaagaaatga

SEQ ID NO: 7742 - DNA, 306 bp, Photorhabdus luminescens
atgaacacaaaagaaatagttgaaaattgggtaaaagagaaaaaatcactttacttctttctccctgatggcccttatggtagaccctttgataatcaatatattattgagaaaattgaggaaaccagtgagagctttaacataatattttctaatgaaatagcattgcgttttctgggaaaaattaatatcacagatgagggatataatctaacaataagcgattttactaagtgtatatttgaaataagcagtaggattcttaaaagttatacagaagggcaagtagtattaagtggcttttaa

SEQ ID NO: 7743 - DNA, 876 bp, Photorhabdus luminescens
gtggataataatgcccttagcatgggaagtttgtttggttccgaaagcgctaaacattttgaaggcgcagggtcactggctcaaaagatgactcaatccggggcaacacccgaagaaatcaacgcagccttaactcactacctcaaaggacaagtccctgagggtcaagacccggcaaaaggtctgattattgcgtgggggaacttctttggtgttccgttagatgtcgtgttatcaaatgagcagatgacgccacagaaagcggcggaaattgttgctggagggatacctaccagtgaagcgaagctgatacagtttgcagccgcgaaagcatatctgtctttaagtaagtatcggtcaacagaagtggttgaggggaaaggaggttctctggctgataaaagtattactggaaataagacgacgatttcatctataaatgagggcaaaggtacttctggacgactccctgaaaagcccattaaagaagtaacagcaacagaagtaaataattggtggaaaagtcagggatatgaacaacctccatatactccaggaactacagtaaaggaatttgaattagcagctaacacgcaatttgttagggtttatgatggtactcattcacaaatgagagggggatggatgatgaaagccgaagatataaaaggattaagtagtaaacaaattcaagaaaaatttgctttgccatatgagccaaaatacgttgcggatgttgaaattaaagcaggtactaagatgagagtaggttctgcaaatagtctgtttggctataaaggtggaggaacccagtttgatcttatggggcaaagaacaggtacattcactaatgaacaggctattcagaaaaaatag

SEQ ID NO: 7744 - DNA, 798 bp, Photorhabdus luminescens
atgcgctggcctcccgaaatctgggcgattgccgcacgctgtcaccggaagccgtgcggtaaggccaaagaattaagccagcgcattctggataaaggtctgccgtcggttgaagacatgcgcggtaaactggcatcgtgtcaggatgacagttgccgtaaaggggtctggacagcgtaccggcaggccagtgatgccaccatcaataccttgaaacaaatggcgttgaatggtgagttgagccgcgaagagctggcctttatcaaccatgaggtgggtaaagaactggcggtatcgggataccgtgccaatgacaagctaggccgttcagagcagagcagctggttaaatggcggtagtggaccactttctgggttctttaacacggaactgcgccaaaaagagctggaaaacgccgggttatctaaagccgatgcggcgcagtatgtgaaggaagagcaacggaatctggtgttgctggagaccgcggtcggggctattggggcaaaagctaatagaacttctgtgaatatagtcggaaagggaactactcagacaggaaaagggacaacattacctgcgggctataccccaaaaggaaattcagttaccaggccaaaaaatggtgtttataataacactggaaaaatagacgcatcaggaaacacaatttatagtcacaatggtgggtactatacgtttgaaaatggcgtgaagacaagagttcaatcggtcgcggtaggaatagtcgttaccggctatccccccccccgcacagatccggacgtgcgctactaa

SEQ ID NO: 7745 - DNA, 168 bp, Photorhabdus luminescens
ctgccggcggggcaacgggcagccatgataatgaggctgctggaaaccgccagagccaacggacatgagccctgggtctggttacgtgatgttctcagccgactgcctgtctggccgaacagtcggttgaatgagctattgccctggcctgagaatcccttcagttaa

SEQ ID NO: 7746 - DNA, 270 bp, Photorhabdus luminescens
ttggcagtaactttgcatcagttctatgcaatagaattttctcctgatgccttttttgtgacaaatgagggggccgaatttgtgaacatagagcaatcgttaggttgggagcgaataatgcctgatacactactacagttgattgctattccgggtaatcattcaagtatgatgggggagaatgagaataaaatcacgctagctgaagctatgaatagaacgttattaacctcagcttcgtttaaaaatagcgatatcacaatcccgtaa

SEQ ID NO: 7747 - DNA, 885 bp, Photorhabdus luminescens; identical to SEQ ID NO: 7045

SEQ ID NO: 7748 - DNA, 5376 bp, Photorhabdus luminescens
tcaagagacaggcttaaagcgggggcggtttatgtaccgattgatccggataccccggatgagcgcaaactctgggtcatacaggattgtgcggctcagttgctgctgacggataatcacatggcgatcccgaacaatctggcggtgccgttattgcgaatgagggaggaaacagatcccggccgggaagatgacgaacgggatcttaacttaacccgtcggggttcagatgccgtttatgtgatgtatacctccggttcgacgggggtaccgaaaggggttattgtgtcgcatcgtgcggtcatccggctggttatcaataatggctatgcggaaattgaaccggatgaccgggtggcctttaccgcgaatcccgcctttgatgccggcacctttgaagtctgggctccgctgctcaacggcggggcgctggtggttatcgaccgcagtacattattaactccatggcagttagtccgggcattacagagccactgtatcacagttctgtcactggttgtcggcctgtttaaccggctggcgggggagttatccccggttttaccacagataaaaattctgattgttgggggggatgtccttgaccctaatgttattgaccaggtgctgactggcaatccgccacagcaattattacaggcttatggcccgagtgaaggtaccacgtttacgaccacctaccgtattacggcattagcacagggcataaccagcatcccgattggccgccccattgccaatacgcgggtttatgtattgaatgccaaaggattaccggtgccgttaggcgctgtcggtgaaatgtatattggtggtgatggggtcgccaggggctatctgaaccggcctgaactgacggcagaacgtttcctggccgacccgttcagcgataaaccggatgcccggatgtaccgcaccggggatttggcgcgctacttgccggacggcaatctggaatttttgggccgcactgaccagcaggtgaaaatccgcggtttccgcattgaaccgggggaaattgaagcgcggctggccgaacacccggcggtgcgtgaagccgtggtgctggctcacgggaaagggctggacaaacggctggtggcgtatgtggcggcggacgtggaagaagggctggtaaataacttacgtgagcgcctgagtcaagttttgccggagtatatggtgccggcggcggtggtgcgtctggaccgcttcccgctaaccccgaacggcaaactggaccgccgggcgctgccggtgcccggggaggacgcctttgcccgccagcgttatgcagccccgcagggcgccaccgaaactgccctggcggcggtctggcgagagttactgggtattgaaaaaatcagccggcatgacaatttctttgccctgggcgggcattctttgctggcggtgcgggtgatagaacatttgcgtcagcaggggctgacactggcggtacgcgacctgtttcagaccccggtgttagccaatctggcacaaaagctggcgcagtacgcggccgtgcccgtgcctgccaatgtgattaccccggatacctgtacgctcacgccggctatgctgccgttgataaatctgacgccggcggatattgaccgtatcgttgggcaggtgccgggcggcctcagcaaccttcaggacatttatgccctgtccccgctgcaggacgggatcttattccaccatttgctggcaagtgagggcgatccatacttgttgaccggtcagatggtatttgcggctcgggaggtgctggaccgctatctggccgcggtgcagcaggtggtcaaccgccacgatattctgcgcaccgcctttatctggcaggggctgtcagagccggcgcaggtggtctggcgccaggccccgttatccgtcaccgaattgacattagatccggcagacgggccggtcagtgagcagttaagccggcgttttgacccgcgccattatcgtctgaacttaagtgaagccccgttattgcagtttgttgttgcccgggacacggaggggcgttggtgcttactggaattacagcatcacctgattggtgaccataccacgttagaagtcctgcatcgtgaaatccgggcgtttctgacggagcaggcggaaacgctgccggccccggtgccgttccgcaatctggtggcccgggcccggttaggccggagtcaggaagaacacacccgtttcttcaccgacatgctgtcggaggtaacagagccgaccctgccgttcggcgtggcggaggtccaccgtgacggctcacaggtgacggaattccaccggatgttgccggcggaactgaatgatcgtctgcgccggcaggcgcagcagttgggcgtcagtctggcaacgttgtgccatctggcctgggcgcaggtgttgtcacgcaccagcgggcaggaaaaggtggtgttcggcacggtgctgttcgggcgcatggcggcgggagcaggggccggcacagggatgggactgtttattaataccctgccgctgcgactggatatcgataacacaccggtgcgggagagtgtgcggcaggcccagtcccggctggccggattactggcgcatgagcatgcgtcactggcgctggctcagcggtgcagcagcattgacaatgcggggcctcttttcagtgccttgctgaactaccgacacaatgatgtatcagccctgtccgatgagggactaagcggcattgaatttatgggcggacaggagcggactaactacccgtttgcgctgtcggtggaggattttgggacggcgctggggctgaccgctcaggttgtcgagccgtttgggccggagcgggtctgtgactatatgcagcaggcactggacagtctggcggaagcgctggcgcacaccccggacaggccggtgcgtgccctggatatcctgccggccgcggaacggaccttgttactcaccacctggaatgccacggaaacgccgtatcctgaagacttatgtatccatcagttatttgaacggcaggcagcgacaaccccggacgccattgccctggtgtatgaaaatcagtcgctcagttacgcggaactcaacgcccgggcgaaccggctggcacatcaattaattacgctgggggtcgtgcccgaccagttagtggcgatttgtgtctcacgctcactggtcatggtggtcgggatattggccatcctgaaagccggtggggcgtatatgccgctcgaccctgcttatccagatgaaagattggcctatatgttcgaagacgcagctcccgttgcagtactgactcaaaccgagtgggttgaccggctagccagcactgtgcctactgtcgtacttgatgcccaaactcaactttggatgtcatattccaccgataatccagatcctcaggtgttgggactgacatcacaccatctggcctatgtaatttacacctcaggctctacgggacagcctaaaggagttatgaatagtcaccaggctttatgtaaccgcctactatggttcgtccggaatatcgcaacgacaccattggtcggggcactaaaaaccagcatcagctttgttgattctgtcactgaaatgctaggcgtgttgttggctggaggtaaactggttgtattcaatgatcatgaagtgaaagatttcgatcgtttcagtgatggtttacgtcgttttggcgtcaattatctggtggtggtgccttcgctgttaaaacacttaattcaaggttatagcgataaattgaaatccattaggacgttagtttgcagcggagaacggctggctcctgaactggctcggcaagttgtgacggattacccttggctccgtctgttaaatttctatggttcatccgaaattaatggtgatgccacctggtatgaataccctactcagacagaaataccggaagtatcggtgataggccgtcccatcgccaatacccagatctatcttctcgatcctattgggcaacctgtcccgcttggtgtagtcggcgaaatttatatcgccggtgctggcgtggctcatggttatctcaatcgtcccgaattaacggctgaacatttccttcatgacctatatagtgataaaccggatgcacgtatgtaccgtactggagatttggcgcgttatcgtccggacggcaatctggagttcctcggtcgtaatgatcagcaggtgaaaattcgcggtttccgtattgaaccggaggagattgaggcccagttgatggaacatccagcagtgcgtggttccgtcgtgttggcactggatgacgggtcggataaacggttggtggcttatgtgatggcggacgctgaggagggactggttaacagcttacgtatccacctgaattcggttctgccggattatatggtaccggcggcatttgtgcgactagagagcttcccgttaaccgctaacggaaaactggacaaacaggcattgccagcaccggatagcgatgcgtttgcccgtcaacactatgaggcaccacaaggagcaaccgaaatcttgttggcgacgatttggcataaactgctgggcattgaacaaattagccggcacgacaatttctttgccctgggaggacattcactattagctgtaagaatgatgaatcttgctgctgggcagggcttgaatttcacgttaaataccctgtttcagttccctgtgttggtcgaactggcggtaaaaataaccttagaccctctgcttcaaagacaaaatagcgccatatcagtacggcctggtggaacagggttaccgctatttttaattcccactggtacgggagactattcgtatgccttcgggctgtcccagtatatctcatcgggttacccgatttatgcattaccttggccttccatcaatgaagaaccgatgtcaacgatggaagagttagctgccaaaatggttaccctgatgaaagctgttcaatccacagggccatacaggataggaggctattcttccggaggtatattagcttatgcgattgctcagcaacttttgaatgccggtgagcaggttaatttcttggggatgattgatacactagcgcctcattatttaagagaagatcctctgcaaccgaaatatcgtttccttgttggactcactcaacggttagaaggagagcatctagaagagatatcggtgttgcaccagaacattgaagcgttgaatttagttcagttgattgaggccgcacaagaactggaattatatccggcaactctacgtgccgatgtggtcgcaaaatattgggagcaaattgcacgttatgcacaattaattgctaattaa

SEQ ID NO: 7749 - DNA, 1383 bp, Photorhabdus luminescens; identical to SEQ ID NO: 7510

SEQ ID NO: 7750 - DNA, 14952 bp, Photorhabdus luminescens
atgaaagataacattgctacagagggaaatatgtttaaaagcgaagtactttctcagaagttagatgaaaataccccacatcatacagatgagacaccgattccatcacgaaaatgcgttgtagtcggggggacatcccttgcggtgtcctgtgctgaacaaattcaatccgctggacatattatacaagcagtgttatctacagatagtgttttgcaaacatgggctgagcagcaggggattgattgggttaattcggtggaagaattacaagaacacatccagttacagcctgttgactggcttttctccattgtcaatcctctcattttgcctgcctcattaattaaacaaatccgcggaggcgcttttaattatcatgacagtcccttgccgcgttatgcaggtagccatgcaacgtcctgggcgctgttagcgagggaaatagcgtatgccatttcctggcactgtattgaaggcgctgtgaatggcggaaacattgctgtgcaatggccggtctcgattgaagaacaggatacggcttttttattgaatctgaaatgttatcaggcggctcagaaaggatttaatgaactcttaacagcgctgagtcacgacacattaataacctacccgcaaaatctttcgcaacggcgtttttatgcgctgtcgcatcgcccggaggcgggtgggtacttatgttggaaacagccgggcgaggtattgtctgcgttagtgcgcgcattagactttggcgagaatgacgccaatccattaggttacccaaaactgttattaaaacaggatacggtacgaatttcctggcttcagcggttgggtacctgttctggggaaaaaccggggacgttgattcgtgtggaggaggagggctggcaggtgtcgacgggcagtgaggatgtccggatcgggggattttccacattggaaggccagttattgtctgtccgtgagctgacagaaatatcagaactgcaacccggtgaacaattgcctttgatttcgccccaacaggcacagaatatcaagaatacacttcaaaagttcgcccctgatgaacctttctggtgtcagcgtcttaccggctggcaacccagccatttacctttcgatatctcccataagacagcagaaccccgctgggcaataagtccctggcaatctgcgttttcccaaaaaagtcaggaagcgacatggaaaacgttattacaggcattcgttatctatctgacgcggttgacccagcaaacggtatgtcaggttggttggtatgtgggagcaaacgaggagttatcaaatatggcatcgatggtgcccatgaccgttgaagccgaatttaataaaccgtggagtgaggttgttgtcgctgttgataatgaactggccctgctggcacaacatggcacatacagtcgtgaccttttttcgcgttttcctgcactgtccgttatcccagaattaagaacgtgctatccatggccgatagctgtctctgtcgtgccggatagccggttaggtgatcaggaaaggtctagcgaattactgacatttcagataaatacacagggtggtttccgttggatttatgatgaaaatcgtctggatacggcagtgatcctgcggatgagtgaacatttgcagcagttattgtcattagaaaagacaaatgaagccatccccatcgggcagcttaatttgctttctgaaactgaacggatgttgctcttgaaaacctggaatgcgacagcaatgccgtatcctgaagatttgtatattcatcagttatttgaacaacaggtggcgaaaaccccggaagcgacggctttggtgtatgaaaatcagtccctgagttatgccgaattaaatactcgtgctaatcggttggcccatcaacttattgcgttgggcgtagagccggatcagcgggtagcgatttgtgtctcacgttcaccggccatggtggtgggattattggcggtattaaaagctggcggtgcttacgtctcgctcgatccaagttatcctgttgaacgattggcgtatatgctcaacgatgccgcaccggtggttttgctgacccagagcgtgctcgctgacagttcgaagcatgcattctctgcggctgactacacaattgtactgctggatgcccctgacgctgcacaggttgaacaacctgaccataatccggaaccccaaactttggggctgacatcacgccatccggcctacattatctacacctccggttccaccggtttacctaagggggtggagatgccgcaggcgggtctgttaaacctgctacaatggcaccgtcaatccccgtcacaacccgccggaaacggtaaaactctccagtttgccgcactgggatttgatgtcgcttttcaggaaatcttcaccaccttgtgtgaaggcggctgtctggtgctgattaatgagtccctgcgccggcagccggaacagcttctccgcctgatctcgcaacaacggattgaccgaattttccttccctatattgcactccagcaccttgcggaagcagccagccacagcggggaagatttttcctgtctggcccatatcgtcaccgcgggcgaacaactgcgtataacaccggccattcagcgttttctgcaacgtgcagaaggttgccgcttacacaatcactatggcccgactgaaagccatgtgacaacggcatacattctggatcaggatccgaaccggtggcccactttgcctcccatcggtcgcccgattgccaataaccgtatctatattcttgacacgtgcggtcagcctgttccgctggggggacttggggagatttatattgcgggtcaaggcgtcgcacggggttatctgaaccggcctgaactgacggcagaacgtttcctggccgacccgttcagcgataaaccggatgcccgcatgtaccgcaccggggatttggcgcgttatttgccggacggcaatctggaatttttgggtcgtactgaccagcaggtgaaaatccgcggtttccgcattgaaccgggggaaattgaagcgcggctggccgaacacccggcggtgcgtgaagctgtggtgctggcacggggggaagggctggacaaacggctggtggcgtatgtggcggcggacgtggaagaagagctggtgaataacttacgtgagcgcctgagtcaagttttgccggagtatatggtgccggcggcggtggtgcgtctggaccgcttcccgctaaccccgaacggcaaactggaccgccgggcgctgccggtgcccggggaggacgcctttgcccgccagcgttatgcagccccgcagggcgccaccgaaactgccctggcggcgatctggcgagagttactgggtatcgaaaaaatcagccggcatgacaatttctttgccctgggcgggcattctttgctggcggtacgggtgatgaaccggataatgaccgtactgggtgtggagctcccgctggcggcgctgtttcattcgccttcgctggcggccttagcgcaggcggcacagaaacaagaccggcccgccttgcccgccatactgccggtctcccggacggaaactttgccgttatccttggcccagcagcgtttatggttcctggcccagctcgatggggtcagtgaaacgtatcatatccccctggcgctgcatttacgcggccggctggatatcgccgcctggcagcaggccctgaatgccgtctttgcccgccatgaagcattgcgcacggtttttgtttccgttgacggtcagcctcagattcatctgttggcggcagacgacgggttgccgctggtacagcatgatttgcgcgggcatccggatgctgacacggaattagaacgcctgtgtgctggagaaatgtctgcaccgtttgacctcagccggggaccgcttatccgggcggaacttatccgactgacggaagaggattatcgttttttgctgacccagcatcatattgtgtccgatggctggtcagtcaatgtgctgataaatgaactgaacgcactctacgccgcctttctggccggtcagccggacccgctgcccccattggccattcagtacccggattacgccgcctggcagcatcagtggttttccgccgaacgtacccaggtgcagtcggactactggcgcacaacactggccgatgccccggtgctgctggcgttgcccacagaccgtccccgcccgccagagccgtcgtttgccggtcagatattaccggttcacttgggacccgaattaaccaccgccctgaaacagttaagccagcagcacggggttaccctgtttatgaccgtgttgtcggcctggggcgtggtcttatcgcggctgtccggtcaggaggatattattatcggcaccccgagtgccggccgcagccggcaggaagtagaatcgttgatggggttcttcgtgaatacgctggccttgcgtatgcacttctcgggtgcattaacggtcgccgaattgctgacccaagtccggcaaaccgcgttagcggcccaggcccatcaggatctgccgtttgagcaggtggtggaaattgtccaaccgccgcgccggctggcgcatacgccgctgttccaggtcatgtttgcctggcagagcaatgaacacacggactgggcattgccgggcctgatggcgtcaccgattgaccaaactttagatactgtcaaatttgatctcgaactggatatgtttgaggataatggcgcgatttcaggtaatttacgttatgccaccgccctgtttgatcagacaactatggaacgacacattggctacctgcggactgtgttgcaggtgatggtcgctaaccaccaacagcggatcggggaaattgatatcctgacatcggcagagcgccggttattgctggaaacgtggaatgccacggaaacgccgtatcctgaagacttatgtattcatcagttatttgaacggcaggcagcgacaaccccggacgccattgccctggtgtatgaaaatcagtcgctcagttacgcggaactcaacgcccgggcgaaccggctggcacatcaattaattacgctgggggtcgtgcccgaccagttagtggcgatttgtgtctcacgctcaccggccatggtggtcgggatattggccatcctgaaagccggtggggcgtatgtgccgttggatccggcttatcccggtgagcgtctggcgcatatgctcaccgatgctgccccggctattattctggcggatgagacaggacggacagctttgggagagaaggcgctggctggacggaaggtgcttgatccgaatagcctgcctgagcaaccggacagtaatccacagatagcggcattgatcccctgtcatctggcctatgtcatttacacctccggttcgaccggtgcgcctaaaggggtaatggtagaacatcaggcaatttatcaacgctatctgggccttaatgagacttatgcggttacggcgcaagaccggatactgcaattttcatcgtttgcatttgatgcgtcagtcgaggaatttttctcgtcattatgccatggtgccacgctggtgatgcgcgatgataactggttgtcttctatacaagcgtttatttctttaactcagcaaaaccgtatcacggtgatgtctctgccgaccctattttggtctgaactggcgggtagagacaaggcattacgactaccggattgtctcagattaatcattattggtggtgaggagatgaaaacgcgggctattcagaattggtttgcacaggaaactcatcacccacggttattgaatacttatggtccgactgaaaataccgtgattgcgacttgtcaggcgatattatcctcggaggatgatggctcaattggccggccggtaagcaatacttgtatttatttgttagatagatacggtcagccggtaccattaggttgcattggagaactgtatatcggcggcgtgggtgtggcccggggttacctgaaccagcctgaattaacggcagaacgttttctggctgacccgttcagtggtaaaccccatgcccggatgtaccgcaccggagatttggcccgctacttgccggacggcaatctggaatttttgggccgcactgaccagcaggtgaaaatccgtggcttccgcattgaaccgggggagattgaagcccggctgaccgaacacccggcggtacgtgactctgtagtcgtggctcagggggaagggcaggataaacggctggtggcgtatgtggtggcagaagctcatgtggagctagcgaatagcctgcgtgcttatctacaagctgttttgccagactatatggtgccggcggcgtttgtgcgtctggaggcgctgccattaaccctgaacggcaagctggaccgtcgggcattgccggtaccggatgatgactcgtttgcccggcaggcttatgcgccgctgcggggggaaacggaaaacgccctggcggtgatttggggtgacctgctgggcattgagcaagtcagccggcatgacaatttctttgcgctgggcgggcattcgctgctggcggtgcggatggtggaacgcctgcgccagctggggctgacactggcggtgcgcgacctgtttcagtcaccagtgttatcagacctggcgcaaacgctgggacagcatcagaccctggaaatcccaccgaatatgattacccccacgacacggcaactgacgccggcaatgttaccactggtggatttgacgcaggcggatattgaccacattgtcagacaagtgccgggtgggatggcaaatatccaggatatctatgccctgtcgcccctgcaggacgggattttattccaccatttactggcaaatgagggtgatccgtatttgttgaccagccagatggtgtttgcggaccgggccctgctggagcgctatttaatggcggtgcagcaggtggtggatcgccacgatatcttgcggaccgcctttatctggcagggggtatcggttccggcgcaagtggtctggcgtcaggccaccgtgtcggtgacagagctgacgctggatgcggcagatagcccggtcggtgagcagttaaaccggcgttttgacccgtgccactgtcgtctcgagttgagccaggcaccgctgctgcagtttgtcattgcccgggaagaaagcggccactggctcttacaggaattgcaccaccatctgattggtgaccatacgacgctggaggtgatgcaccgtgaagtgcaggcttatctggcagggcgggaagaaaatctgtctgcaccggtgccattccgtcatctggtggcgcaggcccggctgggcgtgagtcaggccgcccacacccgtttctttatcgatatgctggcagacgtggcggagccgacgttgccgtttgggttgacggaagtgcatcgtgatggttcgcaggtaacggagttccaccggttgctggcccctgaattgaatgaccgcttgcgccatcaggcccggcagttaggcgtcagcttggcggcgttgtgtcatctggcctgggcccaggtgctgtcacgtaccagcgggcaggaaaaggtggtgttcggcaccgtgctggtcgggcgtatggcggcgggagaaggggcagacagtgggatggggctgtttattaataccttgccgctgcgactggatatcgataacacaccggtgcgggagagtgtgcggcaggcccagtcccggctggccggattactggcgcatgagcatgcctcactggcactagctcaacgttgcagtggggttgccagtggtactccgttgttcaatacactgttgaactaccgacataatgcgccactggcggctaccgataacatgatggaaggtgtcgaattccttggtgggcaggaacgtactaattacccgtttgccctgtcggtggaggattttggggatgccctggggctgacggcgcaagtgatacgaccgtttaaccctgagcaaatatgtggttacatgcagcaggcattggaaagcttggcggaagcgctggaacacacgccggacaggccggttagggcattggaaattctgccggaagcggaacgtacgctgttgttaaaaacctggaacgcgacagaaaccgtctatccagaccagttatgtattcatcagttgtttgaacaacaggtggggagaacgtctgatgccacagcactcatatatgaagagcaaacactcagctatgccgaactgaatgcccgtgctaaccgattggctcatgaattgatcgttttaggtgtcgtaccagaccagcgggtcgcaatttgtgtggcccgttcaccggcaatgatagtgagcatattggccgtgttgaaagccggtggggcttatgtaccgctagatccgtcctatccgggagcgcgtttggcgcatatcttggatgatatagcgccgttagtagtcctggctgataaggcagggtatgcagcactggatgaaaaagcgttagacggagtgattgtcctcgatccaaatacatcagtaaaccaactggacagcaacccgacggtgccaacactgacctcacggcatctggcctatgtgatttatacatcaggttcgacaggcacaccaaagggcgtgatggttgagcatcgcgggctggttaacctgattcaagagaaaattactcagttcagtatcaaccctgaaagtcgagtgttgcagtttgcctccttggggttcgacgccagcatttgggaaatcatgattgcgttaggaggtggtgccagtctggttatcgctgccgacacagttcgttatgacccacatcgcctctggcattatctggaacaacaagcggtaacacatatcactctgcctccggctttgcttcagaatggagccaatttaccgtcgttaacaataagaccaacagtgatactgtgtggtgaagcgcccaatgcggtattgcttcaggagctatgtgacagggtaattttgtttaatgcttatggcccgacagaaagcacggtttgtgccacgatctggcgttgcccgtcaggctatacagacgcgttagtccctatcggatatccaacagccaacagccaggtttatctgttggatgctgacggccagccggtgccactgggggcggtgggggagctatacattggtggtgtgggtgtggcgcggggttatctgaaccggcctgaactgacggcagagcgtttcttgcccgatccgttcagtgataaaccggatacgcgaatgtaccgcaccggggatttggcgcgttatttgccggacggcaatctggaatttttgggccgcaatgaccagcaggtaaaaatccgcggtttccgcattgaaccgggggaaatcgaagcgcggctggccgaacacccggcggtgcgtgaagccgtggtactggcacgggggaaagggacggacaaacggctggtggcgtatgtggcggccgatgcgaaagcggggctggtcaaccgcctgcgggcgcgcctgagtgcccaattgccggactatatggtgccggcggcgttggtgcgcctggatcgcttcccgttaaccccgaacggcaaactggaccgccgggcgctgccagtacccgggaaggacgactttgcccgtcagctttatgcagccccgcagggcaccactgaaaccgccctagcggcggtctggcgtgagttgctgggccttgaacaagtcagtcggcatgacaatttctttgccctgggcgggcattccctgctggccgtacggctgattgaacgtctgcgtcagctggggttgacattgctggtgcgcgacttgtttcaaacaccagtactgtcagatctagcccagacactggggcagcatcagaccgaaagcgtggcggtgcctgccaatgtgattactccggataccaccacgctcacgccagccatgttgccgctgatagatctgacgcagacagatattaaccgtatcgttgagcaggtaccgggcggcctcagcaaccttcaggacatttatgccctgtcaccgctgcaggacgggatcttattccaccatttgctggcaagtgagggcgatccgtacctgtcgaccggtcagatggtgtttgcggaccgagctgtgctggaccgctacctgtcggcggtccagcaggtgatcaaccgccatgatattctgcgcaccgcctttatctggcagaggctgtcagagccggcgcaggtggtctggcaccaggccccgttatccgtcaccgaattgacattagatccggcagacgggccggtcagtgagcagttaagccggcgttttgacccgcgccattatcgtctgaacttaaatgaagccccattattgcagttcgtcgtagcccgggacacggaagggcgttggtgcttactggaattacagcatcacctgattggtgaccataccacgttagaagtcctgcaccgtgaaatccgggcgtttctgacggggctggcggaaacgctgccggccccggtgccgttccgcaatctggtggcccaggcccggttaggcctgagtcaggaagaacacacccgtttcttcaccgacatgctgtcggaggtggcagagccgaccctgctgttcggcgtggcggaggtccaccgtgacggctcacaggtgacggaattccaccggatgttgccggcggaactgaatgaccgtctgcgtcagcaggcgcagcaattgggcgtcagtctggcaacgttgtgccatctggcctgggcgcaggtgttgtcacgcaccagcgggcaggaaaaggtggtgttcggcacagtgctgttcgggcgcatggcagcgggagcagggatggataacgggctagggctgtttcttaataccctgccactacggctggatatcgataacacaccggtgcgggagagtgtgcagcaggcccagtcccggctggccggattactggcgcatgagcatgcgtcactggtgctggcgcaacagtgcagtggtatcgacaacacaggcccgctcttcagtgccctgctgaactaccggcataatgcggtatcagccctgtctgatgaggagctaaacggggttgagtttatgggcgggcaggagcggacgaactacccgtttacgctgtcggtggaggattttggtgatgcgctggggctgacggctcaggttgtcgagccgtttgacccggcacggatatgcggttatatgcagcaagcgctggaaagtctggcagaggcgttggcgcacaccccggacaggccggttggggcgttagatattctgccggccgcggaacgtaccttgttgctaaaaatctggaatgccacggaaacgctgtatcctgaagatttgtatattcatcagttatttgaacaacaggtggcgaaaaccccggaagcgacggctttggtgtatgaaaatcagttcctgagttatgccgaattaaatactcgtgctaatcggttggcccatcaacttattgcgttgggcgtagagccggatcagcgggtagcgatttgtgtctcacgttcaccggccatggtggtgggattattggcggtattaaaagctggcggtgcttatgtctcgctcgatccaaattatcctgttgaacgattggcgtatatgctcaacgatgccgcaccggtggttttgctgacccagagcgtgctcgctgacagttcgaagcatgcattctctgcggctgactacacaatcgtactgctggatgcccctgacgctgcacaggttgaacaacctgaccataatccggaaccccaaactttggggctgacatcacgccatccggcctacattatctacacctccggttccaccggtttacctaagggggtggagatgccgcaggcgggtctgttaaacctgctacaatggcaccgtcaatccccgtcacaacccgccggaaacggtaaaactctccagtttgccgcactgggatttgatgtcgcttttcaggaaatcttcaccaccttgtgtgaaggcggctgtctggtgctgattaatgagtccctgcgccggcagccggaacagcttctccgcctgatctcgcaacaacggattgaccgaattttccttccctatattgcactccagcaccttgcggaagcagccagccacagcggggaagatttttcctgtctggcccatatcgtcaccgcgggcgaacaactgcgtataacaccggccattcagcgttttctgcaacgtgcagaaggttgccgcttacacaatcactatggcccgactgaaagccatgtgacaacggcatacattctggatcaggatccgaaccggtggcccactttgcctcccatcggtcgcccgattgccaataaccgtatctatattcttgacacgtgcggtcagcctgttccgctggggggacttggggagatttatattgcgggtcaaggcgtcgcacggggttatctgaaccggcctgagctgacggcggaacgtttcctggctgacccgttcagcgataaaccggatgcccgcatgtaccgcaccggggatttggcccgttacttgccggacggcaatctggaatttttgggccgcactgaccagcaggtgaaaatccgcggtttccgcattgaaccgggggaaattgaagcgcggctggccgaacacccggcggtgcgtgaagccgtggtgctggcacagggggaagggctggacaaacggctggtggcgtatgtggcggcggacgtggaagaagagctggtgaataacttacgtgagcgcctgagtcaagttttgccggagtatatggtgccggcggcggtggtgcgtctggaccgcttcccgctaaccccgaacggtaaactggaccgccgggcgctgccggtgcccggggaggacgcctttgcccgccagcgttatgcagccccgcagggcgccaccgaaactgccctggcggcgatctggcgagagttactgggtatcgaaaaaatcagccggcatgacaatttctttgctctgggtgggcattctttgctggcggtacgggtgatgaaccggataatgaccgtactgggtgtggagctcccgctggcggcgctgtttccttcgccttcgctggcggccttagcgcaggcggtacagaaacaagaccggcccgccttgcccgccatactgccggtctcccggacggaaactttgccgttatccttggcccagcagcgtttatggttcctggcccagctcgacggggtcagtgaaacgtatcatatccccctggcgctgcatttacgcggccggctggatatcaccgcctggcagcaggccctgaatgccgtctttgcccgccatgaagcattgcgcacggtttttgtttcggttgacggtcagcctcagattcatctgttggcggcagacgacggggtgccgctggtacagcatgatttgcgcgggcatccggatgctgatacggaattagaacgcctgtgtgctggagaaatgtctgcaccgtttgacctcagccggggaccgcttatccgggcggaacttatccgactgacggaagaggattatcgttttttgctgacccagcatcatattgtgtccgatggctggtcagtcaatgtgctgataaatgaactgaacgcactctacgccgcctttctggccggtcagccggatccgctgcccccattggccattcagtacccggattacgccgcctggcagcatcagtggttttccgccgaacgtacccaggcgcaggcggactactggcgcacaacactggccgatgccccggtgctgctggcgttgccgacagaccgtccccgcccgccagagccgtcgtttgccggtcaggtattaccggttcacttgggacccgaattaaccaccgccctgaaacagttaagccagcagcacggggttaccctgtttatgaccgtgttgtcggcctggggcgtggtcttatcgcggctgtccggtcaggaggatattattatcggcaccccgagtgccggccgcagccggcaggaagtggaatcgttgatggggttcttcgtgaatacgctggccttgcgtatgcacttctcgggtgcattaacggtcgccgaattgctgacccaagtccggcaaaccgcgttagcggcccaggcccatcaggatctgccgtttgagcaggtggtggaaattgtccaaccgccgcgccggctggcgcatacgccgctgttccaggtcatgtttgcctggcagaacaatgaacacacggactgggcattgccgggcctgatggcgtcaccgattgaccaaattttagatactgtcaaatttgatctcgaactggatatgtttgaggataatggcgcgatttcaggtaatttacgttatgccaccgccctgtttgatcagacaactatggaacgacacattggctacctgcggactgtgttgcaggtgatggtcgctaaccaccaacagcggatcggggaaattgatatcctgacatcggcagagcgccggttattgctggaaacgtggaatgccacggaaacgccgtatcctgaagacttatgtattcatcagttatttgaacggcaggcagcgacaaccccgggcgctattgccctggtgcatgaaaatcagtcgctcagctatgcggaactcaatgcccgggcgaaccgactggctcgtcaactcattgcactgggagttcgtcccggcggacatatagcgctgttgtttgaacgctcaatagcactggtggtcgcccagctggcggtgcttaaagcctgtctttcctacacaaatattttaacccgcccccgcgttattgaacttttccctcatagattgatctcaataaaaaacacgacttga

SEQ ID NO: 7751 - DNA, 603 bp, Photorhabdus luminescens
ctggccgctactatgggggcaggcttcaatgggaagagccggatgagcggagacgttcacgtccggttccgtgagcgccttggggggaggttccccggggcgactcgaccagtcctgggcttccagaaacatcaggatgctctggcgtgccaatccctgctacaacgacgactgatgcagtttgggctgaaggtacacccagcgaaaacccggctggtacggtttggtcgctttgcgttaaagcaatatgaggagcgaccggagaggggcaagccggggacgtttgattttctgggattgacgcattatataggacgactacacacgggcaaggatgcggtgatgcgcaaaacccaacgaaaacgatgtcaaacacaactgaagcgaataaagcaggggctgcggcaacggctattcctaccgcgaccgattgaggtaatcaccgatatggcggtcaacggtggtctgatggagtcgcaatgcttgggctatcatcacagaactccacccttcagaagtcagaaggatagcttttattctgtctcgtacttgaccatcacgagttgtgtcgtgaagacgctcaagtttgattttttgttctga

SEQ ID NO: 7752 - DNA, 1410 bp, Photorhabdus luminescens
atgagcgccagagtaccaatgcggggtacaggggcggagcaagccgtagtagcgttgaaggaccgtaatgggtctggagcaaagggcttgccccattgtgctgatggcacgacagcaaccacgggcgataaagccggtgggaggactgctgtaaaatcggcaaagccatttcctgtgagtaagcgacaggtgtgggatgcgtataaacgagtgaaagctaaccgtggtgcggcaggtattgacggacagacactggccgggtttgacgagaatgttgcagacaatctctacaagctatggaacagactggcttcgggcagttatatgccgcaggcggtaaggcgtgtggagatccccaaagctgatggtggtgtgcgtccgctcggtattcctgccgtgtcggacagaatcgcccagatggtcgttaaacaggtacttgagcctgtactggaacctctgttccatgccgactcgtatggctaccggccggggaaatctgctcaccaggcgattgcgcaggcgagaacacgctgctggcagtttgactgggttgtggaaatcgatatcaaagggttctttgataatattgatcatgccctgttactgaaagcagtgcggcatcacacacaggaacgctggttggtgatgtatatcgaacgctggctgaaggcgccggtgcaaatgccggatggaagggtgcaggtacggaacagggggacgccgcagggcggcgtgatttcacctctgatctcgaatctgttcctgcattatgcctttgatatgtggatgaaacgtcagtttcccggcgtcccctttgaaaggtatgccgatgatgttgtatgccactgtcacagtcagtcgcaggccgaagcactgataagtaaagcaggccagcggttcgcgcaatgtgggctggagttgcatccgcagaagacccggatggtttactgtaaagatgccgatcgacgggggaattacgcagagacgcgcttcgactttctgggctatacattccggccccgtttgtcgaagaatcgctggggtaagaccttcgttaacttcagtccggggatgagtgccagagcagggaaagcaatccgtcaggaggtgaggagttggggtctgcaaaatcgcagtgacaagtccttgtacgatctggcgcatatgttcaatgcgaaaatcagaggctggataaattattacggtgctttttataaatcggccctgtatccaacgctgaggcaaatcgatcgcaaactcgtgttatggctgacccgtaaacataagcgacttcggggccaccggcgacgggccagtcactggctggcgcgtgttgcgcggagtgaaacgaggttatttgcccactggccgctactatgggggcaggcttcaatgggaagagccggatga

SEQ ID NO: 7753 - DNA, 201 bp, Photorhabdus luminescens
ttgatgatgtgtcgaaagcgtatagatgatgtcaaaaccatggtggagtcgttcctgtgggataagcgcaggaggcgacctgtttactgcctgcgcggcatccggcataaaggcggcgtgaagtcgattcaggctcttgtggggaacgtgggaacctgtcaccccgatgagaagggagaaacgcaagtggaggtcccatga

SEQ ID NO: 7754 - DNA, 474 bp, Photorhabdus luminescens
gtgcagcaagcggctgtcacggtcttaaatcaaatctacgagaccgattttctcggcttctcgtatgggttcagaccgggcagagggcagcacgatgctctggacgcgttgaatgtggccgttatggagaggaaagtcaattgggtgctggatctggacatcagtcggttcttcgataccgtggaacatgactggctcatccggtttattcagctcaggataagggacggttggatggtgcgattaatcaggcagtgggttacggtggggatagttgatgaacacggtcaccgacagaagtcgcattgtggcacgccgcaaggtgctgtcatatcgccactgctggcgaatatctatctgcactacagctttgatctctggctcaacgcatggcgaaagcgggtgcaaggagaggtggtgatgatccgatacgccgatgatggtgtgccacgaaggcatgcaccggggacgtaa

SEQ ID NO: 7755 - DNA, 270 bp, Photorhabdus luminescens
gtgaacaaaacagagaacaatgtggcggaattgatggagggaaggctcccgaccaaggggaacagccaacagtgcgcccgtatccggacacagagccggggaaatacgacgttacgcctgctggctgtgcgaaaagcagcaaagagggataggaaacaacagtttactcacctttttcatcacatcagtgaagaacttttatgtcagagttttcagcaacttaaacgtcagtctgccccgggctgcgagggtatcacatgggaaaactag

SEQ ID NO: 7756 - DNA, 576 bp, Photorhabdus luminescens
ttggatgcgggctattttacggccccggtttgttatctgacggaacagttaggcatgacgcccattatcggttatcgccgcccaaacaagggaccgaacacctttcagaagaaacacttcacctatgacaggcagcaagattgctatgtctgcccgcagagcaaaaacctgatttataccacaaccgaccgtcagggataccggcattatcaagcgccggcgactctctgccagagctgtccgcagcgtgatgcctgcactcacgcgaaaggcggaaaaatgctaacccgccatgtctgggaggccagtaaagagcaggccagagaaaaccgattaaccccgtgggggaagaagctctataagcgaagaaaggagacgatagagcgtagttttgcggatgcgaagcagcatcacgggcaccgctatgcccgttttcgtgggttgcagaaagtgcaaatacagtgtctcctggcggcaacagcccaaaatatcaagaagatagctttgctggtcgcaatgctgtgttgtttttatctctggagagcgagtattttattgcaggagaagcgaaaatag

SEQ ID NO: 7757 - DNA, 1149 bp, Photorhabdus luminescens
atgagcaacaaattacttaacgtggcggattaccgcactttggcgaagaaaaaattaccaaagataatttttgactacctagagggcggtgcggaggatgaaaaagggctacgctataatcagcagatttttgatcgctggcgttttataccccatcgattaattgacgtcagtaaaagggatatttcatgtactttgtttaataaggtatggtcagcaccttttgctattgctcctactgggcttaatgccacttttcggccaaatggcgatttgattcttgcccgggtggcagcgaaagagaacattccttttatactctccagtgcggcgaacatgacaattgaagatgtggctagacagtgtgacggagaaaaatggttccagctttatgtagtatgtcccgaactggcagaacaaatggtgaagcgggcgttggcctctgattacaccactttggtaattaccgttgatgttgcggttaatggctatcgggaacgggatatacgtaaccagttctgtctgcctttgcgctatcgtcccgccgtgctgcttgacggctgccttcatccaagctggttgctgcgctttttatgtaacggaatgcctcaattggcgaatttcgtcatgacggagaacataggcgtagatgttcaggtcgcagtaatgagtcgacaaatggatgctagctttaactggcaaagcttggaacagttgcgagctttatggccacataagctcttggtgaaagggcttgtccgaccagaggaagctaaaaaatgtattgaactgggagctgatggtgtgatcctgtccaatcacggtgggagacagcttgatggcacactttccccaatggaaacgttaagtgccacggtacaggcgatgtatcaacctgtcttgatcgatagtggcttccgtcgaggatctgatatcgttaaagcgttggctctgggagcaaatatggtgttgctgggaagggcggtattgtatggccttgcagcgactggtgaacaaggcgtcagtgaggtgatccgtttactaaaagaagatatagaacgtacattggtgcatataggctccccttcaatcagggggttgactcccgattttgttcacaattgttggcagtttgcaacggtcaaataa

SEQ ID NO: 7758 - DNA, 1293 bp, Photorhabdus luminescens
atgcctctggcaatagaagcaagcgacttggcttttcaggagcacgctgacctgaacacgatgtgttttctcaatgaagtcatagagcgatatcctaatgcgatttcgtttgcctctggtcgtccctcagagattaatgctcggccggaaaaatggtcgcagtatattgcgctgttttcccactatctggccggagcgcgtaataaaagccatcaagagattggtaacttgcttggacagtatggcgatacgcgcggcattattaatccattgatcgctaagcagctatatcttgatgagggaattacgctggagccggaagagattttggtcactaatggtgctcaggaagggatggttatctgccttgatacgctgttctctccagcgcatgatgtattactggtgacagatccagcttatattggtattaccggtgcggccagaatcaaaggcattgacgtggtgtatgttgagtgcgatagcgagggaccgattatctctgcattggagtacagcatcaatagcatcgctgcatcaggaaagcgtgcacgtgccatctacactattcctgatttttctaatccttgtggcagaaccatgtctttggcacggagaaaagaattactggttttttgttatgcacgagaattgtttattttagaagatagcccttaccgtctgtttgattatacgcatcatcaacaaccgacgctgcttgccttggataacgaagcagtggttattcatatcggtacttttgccaaaacattatgtccagcggtgcgtattggttatttgatttgccgggctcacgtaaaacggggggagctggctgtaccactgattaatgatatgacccgagtgaaaagctttatttccgtaaataccgggcaaatcactcaggctattgtgggaggatttctgctggaaaataattgttcattaaagcaaatcacgcagaatatcagtgaacactatcgagcaaagcgggatcgattactacacagcctaacgtgtttctttgctgaaaaagactccactatctcatggaatatgcctaatggcggcttttttctcaacttgagtctacctttcaacctgactatgcaggatattgagcgttgtgctgctgagtttggcgtgattgtagttccaacggcgatattttccaattcagatcgttacaacaatgtactcagactttctttcagctatgttgaatctgacctgattgaagagggggtgcgtcgattgtcctgctttattgccgatcggaggaaaaactcatga

SEQ ID NO: 7759 - DNA, 591 bp, Photorhabdus luminescens
atgctcggcgttttaaattggatgttcccagagatactaagcatgggaatagattactttaactttaactttctgataaagattatgaccgaaaatcacatttccctcacagggatagcgaagaaatataaaaagattgaccacctggctattgcagttgtgtcactggataaagcgttgagcatgtatgtggagatgcttggttttacccttgtggaacgtcgagtaacaaagggtgtaaccaccgcgatggaatccgcaattttacaaggaaatggctatacgttggtgctattacagggcacagaatcgcagtctcaggtgacacagtacgttgaacagtatgggcctggtgttcagcatgttgcttttgaggtggagaacttggaagaagtcgtagccgaattagaggaaaacggcattgaattttccacgcagattattagggggggtaacttgaaacagattttcaccaaacgtgacagtgagtcaggaatgatgtttgagtttcttgagaggcatggtgaaggatttgaagaagagaatataaacaacttgttccggcagttggaaaagacacaacaaatttaa

SEQ ID NO: 7760 - DNA, 204 bp, Photorhabdus luminescens
ctgacaaaaagctgggataaagaacagaatattacgttcgatgaactagcaagatgctccctagcgattgctagtatattgcagaaaaaacaacagctaatacatgaacgattgcttgtagcaactgaatccggtattccgtttctcgtggtgttaatggcctgttttttcacgggagttgtggcaatttgctgtacaacttga

SEQ ID NO: 7761 - DNA, 138 bp, Photorhabdus luminescens
atgaatatcacagcatcagataagtacactggccaaagtacccctgaattgagcataaatacctttccaaaattagcttataccgcacctgaaaaactgaaatatacactacaccaaacaatggttatttttccctaa

SEQ ID NO: 7762 - DNA, 261 bp, Photorhabdus luminescens
atggtagattcgactaataagtgcgtaacgctgcaactgctctgggaagaatatggtgagcgtaaccctggcggattttacagttataaccattactgccgcctttaccgtgattggctgaaaacaacctcaccatcaatgcgtcaggttcataaagcaggtaaaaaactctttgttgagcagaagtggaggttcaggtcgttgaacgctgaatcatggcacgtatccggcatgagaccttctacagtcttgcttcactga

SEQ ID NO: 7763 - DNA, 285 bp, Photorhabdus luminescens
atcatggcacgtatccggcatgagaccttctacagtcttgcttcactgaatcaacgtatcagagaattactggaaagattgaacaataaggtgatgaaaaaaatgggctactcacgtgccgaactcttcatccagatcgataagccagcactgaaacccctcccgattatggctcactgtcccaattgtcatgggttctatggtgccagttcaatggagcgtttgccaacagaacaagccatcaaacacactatccagaaatttaaagaaattaatcggggttag

SEQ ID NO: 7764 - DNA, 234 bp, Photorhabdus luminescens
ctgttacgttatgatgacgcattgttttcttttcctcaaaatacgggaaggtgcccaatatgccatcctagcagtccgcaacaactcagtctcacttgtctccggggcttactcaacgatgttaatgaaaaaatggttggcaactggctggacagaagcccccagatggcattcaatactttcttgagcgtgctgatcgaggcaaaagcaaccctcaatattctacgtcagtga

SEQ ID NO: 7765 - DNA, 129 bp, Photorhabdus luminescens
gtgctgatgccgggcaaagtgcacggtgacgacatcccggtaccacatcaggccctgggaaggggaaaaatcgacccgatgagtatcgacaatatcgaataccctgtcggtgataatttatgcctttaa

SEQ ID NO: 7766 - DNA, 363 bp, Photorhabdus luminescens
atgcacagtagcgtccctgatactcccgacgacggtgatatatctgatgtgaatatcctatggtctggcatgtcggatgcgattgcatcactggatttttcatgtattagcgatactgtactgtgtcagttaattgaatcatccaaagaaaatactatgggcatgtgtcatggtgtaacttttcttggtgactcaatgttgtcgtttgccagtaataacatccatgaatttacgccagagagtttgtgtcagctcgggcatagcctagaggcgttgagttctctattaccgatgttgtttactctgcatgaaaaagcgagtggtgaatatcgtcgtagaacttcgaaaaacgagataaaatag

SEQ ID NO: 7767 - DNA, 249 bp, Photorhabdus luminescens
gtggagaaaaaagattggcacccagcagatattatcgctgctttaagaaaaaagggaacatcattggcagctatttctagagaagcagggctggcatcgtcaacgttatctaatgccttgcaaagaccttggtgtaaaggtgaaacaattattgcaaatgcattgggacagaagcctgatgaaatttggccttcccgttaccagaaaagaaggaagagatatttatctccaagagaaagaatattgtga

SEQ ID NO: 7768 - DNA, 567 bp, Photorhabdus luminescens
atgaaaattgagaaaatgaaaaacaaaaaagcatcagacgcttcttttagtgatgaagaaaaagaaggttttatcagtaggttattacaacttgtagggcaaagaaacattaggactgccgccaaagattggggcttgccttactcaactctcaataactacatcaacaaaggaacaagcccatcattaaaatatatgcaaattgttgctaataaggaaaatgtaagcttagattggcttgctaatggggataaaaatttcaaatttgaaacaccagatgcacactataatgatattgagttacgacattcctggaacttggtttttaactccttaaatctatgcgaagtagataagcttataaaattaattcatcgtaaaggtattgaagggctattaacaatggctcatgaaaagcaagatatcaaggatgtcattgataagcttcatattagatcaagcttgaaacaagcaatcaaaatggctcttgctggggatgaatcaacagataaagaaattttacgctgtatcactacacttgtaagtcaagaaacaaacaaaaattaa

SEQ ID NO: 7769 - DNA, 144 bp, Photorhabdus luminescens
gtggatgtggatactgaaacaactgaacagattaaattacttggccccaaaacctatcactactcaataaagggagtgattggatggagcactatcgatataacagagaaatcagcactcaataacaacagggcgctttgttaa

SEQ ID NO: 7770 - DNA, 111 bp, Photorhabdus luminescens
atgtccataagagagcgcaaaatcgagggcatgcgccgtgccaaagctgctttcgagctggctgagcgttctggtacgttaacaaagcgccctgttgttattgagtgctga

SEQ ID NO: 7771 - DNA, 495 bp, Photorhabdus luminescens
atgccaacttttcatcagacaggatttattgaggctactgttggagaaatccagtatcaccggtttgatttttctgtagaagatcatgattttgtgatgattttttccgctgttgaaatatctgatgttgaatacctccagatgcgctcggaagaggtcggtttttccatccctgagcgttgctatgatgttaagtttgaccgtctagagaattttgacagtggtgatttctacgcacctccaccaccagatgctattttcagtaagcttgggtatcagggcttgatgaggttgggtaaagcatttagcgagattatcggtctgcactatcaattttatgatgctaaggcatattttgctatggcggaaacgcgaaagcttaagagtttttatgaccgaattttacagcagcctaatgttggtgtaccatatgaaattatcatcaatttaggtgagatggggagaggttatgcaatcaaaacgccaagtttctga

SEQ ID NO: 7772 - DNA, 381 bp, Photorhabdus luminescens
atgactaaccataatgacatacaacgtacaatgcgcgctcagattcggggagcaaaagctgccaggatttatcgtaatttacgccagcgtttacgtacttgggatgaacattgtgttgccaaagcccacaaatacaatctccctagctggatgggacatatgcccatttatttacttgttagcagtatagtagtcactttgctggcaggagtactaatggcaataggagttattgtgctgatctttggactactactgggattttcactagctaaagataacaagcaagatactacctacagtgaatctctaaaagctaagtatcgaaatggttcagaaggttatggtttttactccaacggcagcaaactagatgattaa

SEQ ID NO: 7773 - DNA, 1515 bp, Photorhabdus luminescens
atgacaacttacagctatctggaatattttctgaccctgctgggctggatagtgaataacggcttgtggaatgtgctgctggccaccgggttatttgtgctgccgttgacattcaaaatgataggtatctggctgaaagtccgggaagaaggggaggatgaagggaataagggcatgctctcagtaacccggattgaaaacactttgtatggcgcttttctggtcatgattgcttgctgtgtgccgttggtcaatgtgagtctgagtaccattacgtatgatgactcgcgggcaaaaagttgtggtacttggacaccgaaaccggctgaaacgggttatgcgtccgtgatatcgtcgcttgacggtaaaacggcggcggctccggtttggtggatactggttcatcagatttccaaaggggtcactcaggctgcaatagcttctcttccctgcagtcccgacttgaggcaactgcgttttgaggtccagcatacgcggattaataatccggcactggctcagatattacaggatttcacccatggctgttatgcgctggcattgtatcagtggaaacgccgggacgagggaagaaccctggatgaagtggtattacgggatattgaatggttagggtcaaaaacgtttctgaatagtgcgggttattatgatgtacttcagtcaaaaacgcctcgttcggattttccctggaaaccgcaccgtgatgatggttttgctaatacgggacaggggggatatccgacctgcaaagaatggtggtcagacagtcaagtaggattggaaaaacggatcatggcgcaggttgaaccaagcatgtggtttcggctatctgcggcattgaaactgatgggcaaagagacgtcagaatacaaagaagcggtgatacggcgtctggtgagcccggaaagcttgaccgcatctcaagggggacatgtctatgccggttacggcggtaacgcggattttaccctgatgaattcggtgggccggatagcctcattgggcggggtgtcgttggggagtctggcggcatttccggcgtttgatgcaatgcgccaggcattaccaatggtacaggctgttatactgatggcggtgactatcatattgcccctgattatcgtatttgctgtctacgaatataaaacggtcgttacgctgacttttattgtgtttgcgctgaattttttgaccttctggtgggaattggcacgctggttggacagctggttactggaggcattgtatggttcggatacgcacagccgctggaatatggctggttttcagaatagcacagacgatatcattatgagttttgtgatgggagcgatgtttattgtgctgccggcattgtggatgggagcgttgtcgtgggcgggtatcagagttggtggtgcattagaaaacacagcgttgcgacatgggacttctgaagctcaatctagtggtgccagaatgggagagtcggtgtcaaacaaaatcatgaaatag

SEQ ID NO: 7774 - DNA, 375 bp, Photorhabdus luminescens
atgatgtctgagcaaagtaaaatccgggtacctactggcactaaacagaggttgataatgggactgaaacggcatttcaggcgggggttaatcgtcacgttgatgatggggggcatgttacttgttgccgcagttggcttggcgtatccgtctcagttcaatgccttacaacattggatgtacacgacccgttacggctggctggcttggcgattggccatgtacagtgttattgcctgtttcatgtggcagctttggcgatccccattgccgttaacacagaaagcggctctgaaacggattgcactcatttcgctgggatttgtggggttttgtgagtatgccatgttcttcgtctccggagatcagtcatga

SEQ ID NO: 7775 - DNA, 1263 bp, Photorhabdus luminescens
gtgatatcgcagccggcgacccgcagtcatctgcaacatctgggcggattaaacctcggttggagcagtgacctgatgtgcggtaactttgatttgaaaacgacggtagggaatcagcttaatggcctgacttcggggtttaaaaacctgatgggggaagtgatacaaggggctactggggccgtagctagtttacccgcaatggttatccagcgtgctaatccgggattatatgaaatgctgaccaacggggtgttacaggcaggtattgcgttcgacaaatcacaactgagttgccagaacatgtcacagcgtatgatggatttctcggatagcagtaaatggactaaagcggcgttgatggaggaatataaaacgttggtgaataccggtaatggtgatgcggttggcacgacacaaaaaatggaggttgcggacggtacacaaggttcaaattggattgggggtgaaaaacggggaggaaaagggcagaaagcgattcagcccatccgggatctggcaaaagccggcttcaatatgatgaacaacctgccggcgaatagccatgccaatgtcaaccgcacacaatgtaatggcgctgcttgccagaaattcaagaacagtgaagaagccgcagacgcggtcgtcaaggtgttaggtgatcgttcggttcgtacctgtactgacagtcgtcagtgtaccagtggggataccaaagaccagccgggtgcaagtgtcgctgggacggggtttgcaccgatgctggaagaggctaccaggaccaacattgagcaattgatgaaactggtcagcggggaaaatgcgcctaccatagtcaatctggcaaaactcaaaacaggtagcttgatggtgactcgcggggttatccaggctctgaaacgtgatccggacagtggggctttggtgagtcggttggccagtgagttggcgatggccgacaccgttgagactgcgctcactatgcgacgaatgttgatgaccggccaggcagaaccgaatgccgccgctcaggcgcaggcgatggcagagagtgatcgtcgcattgcgacactggacagagaaattactgccctgaagaatgaaatggagttgcgccgggcgattgcacaaaataccgccctgaccacgcttgagcgcgaacaaaatcgagttgaaatgaatctgcaacggcaatccaccgataataccgacagtcgtattcacaccttgtccgtgccgccgaaagggcgtgaagggcaataa

SEQ ID NO: 7776 - DNA, 999 bp, Photorhabdus luminescens
atgaagtctctagatttaccgtcattaacatggcattcccggctgaaaaagttcggtatggtcctgatactaacggttgttttggcgccagtggccgttgctagtgtgaatacggctcagattgtgtccagtgccgcgtcggtatcgtgcatcagttggcggataaaaggtctctgttactggctgctgtgttctccctgggggtgtaaagtgcgtacctcgataaaagttgcgcattttattcctcaggccgtggtctccgtctataacgcgcctggcggtaatccctggagagaaatgtctctggtcagccagactgttgacggcgtggaaaatgccgtaacgagagcactttccgggatagccgtggggggcggtaatcatcagctgaaaatcccaggcaaccgaaaaaacaatctgcattttaaatatgccgatgcgattgggcatccggcaactgccatgatgggcggaaaaatttcggggtatgcgtgtaaaagtgccgccacgccttttatgccttactttttgagtacgctggacagcctggtttggcggaccggtgtgccagagtcgttttatcccgaagcgcttattccaggcaaacgtgaactgggtaattcgtttcggggcaatatgtggggcaatgtttatccgcgaagcgggtttgtgacacaacaggatgataataaagcggctgcggtggtagcgcaacgggtagcagacattatcacccgtactggacaggggcatgtttatcaatccttgcaagggaaccacaaacagggttactggccaccgggcgaagtcgttgagaatacggttaaccaaaatcatcaatggcaacgtatagcgccgaaaatgagcacctcttgtgctgtttttccggataacagcggggaagcggccaaggacgggaattatgtctttgcattgtggcaaccctacagttgttgtcagcggcgtggacagacttttctttacagtaccgatttttga

SEQ ID NO: 7777 - DNA, 411 bp, Photorhabdus luminescens
atgaatatcagggtattctgggcgcttttcccgttgttaataccggtatccgtgtttgccagcacagtgatatataccgacacaagccatccaccgctcaatgctgatcaaaacgtgcaagttgtgtacctagataagccagagcagttgcaatcacagttattcagtaagctgtctgctgatcctcaacaggcagtcaaacaggcccgtcagattttgcagtctccatcgtggcatcaacaggagcgatatatcagtcaggcttatcaggggttactgaatgcttggactctgggccttaagaagttcccggcagtggtttttgatgatgattatgttgtgtatggtacgacagacgttagacaggcccggttactttgggatacctatcagcaggaaaaccagccatga

SEQ ID NO: 7778 - DNA, 2883 bp, Photorhabdus luminescens
gtgatgtggtcgctgttgaataaagtccgcttgcgtaaatgggataatctatcggaagttttgggtgaaactgaggtcatactaccgtcgtcttctaccgttgttgggcgtgaacctttgaggcgtcccggcaaaatgaccagcacggatgaagctgcgttgtatgacacttggccgtctatcattgattacctgccttgggtcgaatatttggacgatgagaagtgtttgttgctggatgatggtctttcagtcggcgctatttatgctgtttccccggtatcgacagaaggacgcactactgcccgtctggaagatattcgtgaccaggtagaagatgcgttgcaagacagtctggaagacgatgacgtatctccctgggtagtgcagtttttttgtcaggatgaggatgatcccgcgttatatctgacacaacttcgtcagtatattaaaccttgggcgcagggttcagccttcactgaagcttggttggctgaaaccgaacgtcatctgaaggggatagcccgaccagaagggctgtttaacgattcattggtgactggtcagtcctggcggggacagcaacgtcgtacccggatggtcatttatcgttgggcccctgtcggacagaaagaaagcttgctacccattgtgttgcttaatcaggtgtgtgaccgactgacagcttcgctggctagtacaggtattttgtgccaacgacaaaatggtgaacaggttcatcactggttactgcgattattcaatcctgatccagattggatagacaaagcgacgttgtatcaggcagctagttatgctaccccacaggctggtgagaggaagccagataatgatttcacggaaaccttgtggtttaccccgccacgttctgacgtgaaaaacggtgtatggtggtttgataatattgctcaccgagcggtaccggttgaacggctgcgtcgtccaccagagccgggaacgctgaccggtgaaatggtcagaggggagaatatcaatgcactgatggacttattaccctcaggaactattgtttcgctgactgtggtcgcacaagcacaagacacgctagaacaggatttcgaccggttgtcaaaaaatgccgtgggagaaaatactgaatcagggagagtacgttcagacgtaaaagaagctaaggcacatctggggctgagacataaactgtgccgttctgcactgacctttctgttacagggggctgatgttgacgatttgaaccgtcggcatcagcaactggccgcaaccctgttggtatcggggttgcagccggtcaaacccgaatgcgacgtcgcgccgttaaacggttatctgcgtgccttaccgatgtgttttaacccgcaacgagacaaacatcactggtatacccggttgacttggatgcagcatgtggctgggttgttgccggtgacagggcgggcgaccggcacaggcaacccgggtcttagcttttttaaccggggcggtgatgtgctgacatttgatccgcaaaataaacatgaccgtacccagaatgcgcatctgttgctgttcgggccgaccggtgcggggaagtcggctacgctctgtgcgagtttatcgcagttgatggcggtgcactgtccccgattatttgtggcggaagcgggcaacagttttgggctgtttgccgattactgtcaacgcctggggctgagtgtcaacaaaatcagcattaaaccaggttgtggtgtcagtctggcgctgtttgccgatgcccaccaattgcttcaagtggcatcttctcagttggatttggcgggtgaaaggtcggcagaggaaaccgcagatgacgaggccgatgagcagcgcgatatcctgggagaaatagaacttgcggcgcgcatgatgatcaccggtggggagaagaaagaggaagaacgtctgacgcgggcggatcggggcatgatacgtgaagccatcatgatagcggcgagagccagctttgatgacggccgacagatgattgcggaagatttgcaaaatgcattgtctgtgattgcccgggacagccggcgggatgaacaggggagagcattgtgtaccgaacagcgtcgggcccgtgctgaagagatggcgggggcgatgtcaatgttcaccagtggttttgagggggaattgtttaatcgtccgggaacaccttggccagaagccgatgtaacgctaattgatctcggtacgctggcgcgtgaaggatatagtgcgcagatggccttggcgatggtgtctctggtcaataccatcaacaatatggcggaacgtgatcaatttgatgtaagggaaattaattttgttgtggatgaggcgcatgttctgaccactaatccgttattgtcaccttatatgaccaaagtggtcaagatgtggcgaaaattaggggcctggttgtggctggctactcagaatttggcggactatccggatacggctgagaaaatgctcaatatggcggagtggtggttgtgtttgacaatgccgccggatgaagtcgaacagatagcgcgttttaaaaagctgtctgaagaacaaaaatcggtgttgctatcagccagcaaactcccgggttgttacaccgaaggcgtggtgttgtcgaaaaaagtggaggcgttatttcgggtggtgccgcccagtgtgtatctggcgctgggcatgacggagaaagaggaaaaggcagagcgcagggcgattatgaaaacgcttcattgcagcgaattagatgctgcctttgttgtggcgcgaaggctggaccgtgcccgtggtctgatatctggggaagtggcggatgggcgtgatgaggatctcttatccatgcaggagtgcaggctatga

SEQ ID NO: 7779 - DNA, 429 bp, Photorhabdus luminescens
atggtctggactgagaaaacgagcatgaataaagcgcgaaaaatagtgatgttggtggtgataacgatcctgaccggttgcagcacgtctaaagaagagatgcttccgccgggagacagcacaatgctagctctgtggcagggaaaagcctcgtcgtcacagactacaatgaaggtccgtaaaacactgcgccgggagctgagcgaacgggaacagcaggctactctgaattacactgaaagttatagccgtacacaggaaaatgaaatcagtcagactttccctcggttgcccaatccagacatggtgatgtacctctttcctcatttagttgcgggaaacacgccagtaccgggatacagcacggtgttttcgttctacaaccaggtgcaatatgctttgctgggtgaacggacggaggcattgtga

SEQ ID NO: 7780 - DNA, 1479 bp, Photorhabdus luminescens
atgcaaattaagtcaaatggtctggtgaagtgggtcgtgcctgcttttgttattgcggggctggtcgtggggatcaagagttgtcggcaatcagagacgcctgtcagccagacagtgagtcatcaggctttggcggaactgtcttccggggagctgcgggcattggggattgagggggataccccggaagacacgttgcgcaccttgattggagctttgcgcagtatccgtgttcagcaggcggcgctggaaaaacaaaacgcacaattactggcggacaatgagaaatggcgaaacggcagtcagagcatgactgaccagattaaccgggtggtagcgggtacccgtgaggaaacagaaaagcaacagcagctattgaaagcggagcagcaaacgctgttcagccgacttgaccagttgacccgtcagttaggcaataagggcatgaatataaacaactctctggttgagcgtgatattccgctgggattagggttggacaataccggccaaaatacgacctctggcggggaccggttggtctggattaccccacaggatacgttaccggttgattcacaggttgcaatgagcggtcagccagcgtccccccgttttcccgtgtcatttctggaggacaatgcattgagccgtcagaaagtggaatatgacggtataactaaaaatcagcgagccattaccgaggatcatacaaacgagattatccggcccgtttataccctgcccgagaatacgacgctggtcggcagccaggcgatgactgcattattaggccgggtgccagtaaatgacaaagtcactgacccgtatccttttaaggtactgattggtaaagataacctgactgccaacggcattgaattgccggatgtcgaaggggcgattgtttctggtatggctaccggtgactggaccttgtcttgcgtgcgcggcaatgtcacatctttaacttttgtctttgcagacggtaccgtcagaactgtgccgaaatcggataatcgcaccaatggcagccatcacgttcaggataatagcagcggtggtatcggctggctatctgacaacaacggtattccgtgtatcagcggtgaacgtaaatccaatgcatccagttatttaccaaccttatttgctctttctggtggcacagctgcgggcgatgtgttgtcacagagtcagcttaccacccagactaacggttatggcggtgcgacgtcatcactgaccggggatgccggtaaagcggttttggggcaagccgctgccggaggatttaaggccgtatccgaatgggtcaaagctcgttatggccaaacttttgatgccgtttacgtaccgccgggtgccagagtagccgtgcacattacccagcaaataccgattgattatgaagagcggggacgcagggtgaaatataacttaggtcttggacaggaggtccgtgatggtctggactga

SEQ ID NO: 7781 - DNA, 924 bp, Photorhabdus luminescens
gtgaacaaacaggtactcgtcgagttattggcattgaccgcattattattcgccgggctggtgatggtttcacccgttgaggccgtggagttgatgaagtgggagcgtatcccgctgccggttgccttgcatgttgggcaggagcgggtggtttttgtagataaaaatgtccgagtcggttttccgggtgcgctggatggcaaattgcggatacaaagcaccggtggtgcagtgtatctgtatccgagtgaaacgtttacccagacccgactgcaacttcaggatgtggaaagtggggaagtgattttactggatgtgacagctacaaatggaaaagatccccttgagccggttcgggtggtgtaccacggggacgtgattacgttgacggatgaccatcagattcatcatggtgccaaaggggataacacgtcagcaacgtctccctctcttgccggtgaacgtcaggccgcccggcgtcaaaaaccgtcctatacggctccgctgccggtggtcctgacccgttatgctgcgcagagtctgtatgcgccgttgcgtacagtagaagctgttcccggcattcacccggtatcattggcattgtcgccccgattgaccacattgtatccctctgcgccggtaatagtttccccgttagggggctggggggtggataacctcactgtggtggcgctgaaagtgcgtaatacccaccgtgagaacgtagtgcttgatccacgcaggttgcaggggcaattcatagcagcgacctttcagcatcgttggttggggccgtcgggtacgccggaagacacgactaccgtctatttggtggtgaaaggtcggcctgaccgtgcctttctgcctgaaccggtgaggtcaaaaacgcctatgaagcgacaaggaaatccccatgcaaattaa

SEQ ID NO: 7782 - DNA, 378 bp, Photorhabdus luminescens
atggttcagactattcgttttttacctgaccgtcttaacgccgaacctgtcgtgttccggggatttactaccccagaactgggctggacggcattaacgggattgatagctggcgcggtcattggcttgttactggcatcggtaacggggtgggtgatgataccgacggcggcactgattgcgccgttgttattgattgcctttggcggcaaatacctggcccggatgaaacgcggtaaaccggcgcattatctctatcgacggctggaggttaaaaagcggtgctggggtctgggtgacccgttactgattatcacctcacaacgctggtcattgcgccgccgtcaccgggtaatgacccgaatggggcggttatga

SEQ ID NO: 7783 - DNA, 387 bp, Photorhabdus luminescens
atggatctgttaaaccggggatgtcagtcactgttccgcctgtttgcccgtatcaatacctgtgcagtgtcactcagtgtgctggcttatctggtttgtcaacccgtgacagcggcattgccaacggttgaaccgccttccagcgggagtggcggtggtatttttaataccgtcaaaggttacttgcaggacggcatcgtgataggcgggctggtcgttgccgcgatcgcgtttatcaatgtggcgaccgcggcaatccatactttttctgaagttcgcagtgacagagcctcctggactaaatttggcgcgattgtggtggttggcgtggtgctgttagtggcggttatctggctgctgggaaaatcgacgtccattctcttttaa

SEQ ID NO: 7784 - DNA, 237 bp, Photorhabdus luminescens
gtgaacgaggttcaacgcaatgcattcagggcggcttccggcaatctcgatcctcatgtgatgcaatttctctgtatcggtttactgatagcggtgctatttctctgggccgcatggggaatggtagacgtctggcagggctgggccaatgaaaaggtccgtgaagcggcgatgaaccgttttgtcattcgtgtggcgttgttgctggtgatggctatctggatgtttgccagctaa

SEQ ID NO: 7785 - DNA, 276 bp, Photorhabdus luminescens
atgagttggcctgtgctggctggggaaaaagatgagctggccaccacactcaaacagcttgatcaggtgcaggccagtttggaacgtgcccgggttttggccattcaggagggtcaggcagaccgtttttattttgattatctacgtgctaaccgggacctcaatattgtccgtgaaggcattaaccgctatctgaccccctcccgtgcccagcccgggatttctgcggctgcgctggatgtgaccggtcagtatcgtcaggagcgaatacggtga

SEQ ID NO: 7786 - DNA, 234 bp, Photorhabdus luminescens
ctggttcttggacgacaggagcactatccggtcaacagtggctcagaccgaacggcaacggagactggaacaaaccaacgaagggcgaatcgaagccaagggcgtcaggttccgtctataaaccgacaacaggttttgataatgaaagatgagggatttggggcttctgagattgccaggcaactggatattaaccgcttcaccgtctacaagatactgaaagaaacaagataa

SEQ ID NO: 7787 - DNA, 1071 bp, Photorhabdus luminescens
atgacatcagaactacagatttacacttcgttactcaccgatgtaaaggaacggatccgtgggggtcagttcagagccgctcagtccgtcaatgctgaactaatccagatgtactgggacatcggtcacatgctccatgagcgtcaggagcaacaggggtggggagcggggatcatcccgaagctggcacgggatattgttaatgaattgccagaggtcaaaggcttctcagaaaggaacctgaagcgcatgttacgtttctaccgggagtacgccttgccacgaatggagcaacaaggttccggaaagcccgtgtcgacaattgtgccacagcctgtggcacaattgccgtggggtcacaacattctgctgatcgagaggataaaggatcaaaccgagcgattctggtatgcagaacagactcagatacagggatggagccgagactccctgcttcatatgatcaaaagcaatgcctatgcccggcagggctcggttgtcagcaacttcaagaaccggttacccgtatctcaatcggagctggtacagcagaccctgaaggatccctatgttttcgatttcctcaccctatcggaacccttcaaagaacgtgagctggaaacggagcttctcaaacaccttgaaaaattcctacttgaactcggcgagggatttgcttttgtggggcgacaatatcgaattaccgtaagcgaacaagattattaccttgacctgcttttttatcatctgactttgagggctttcgttgtgatcgagctgaaacgaggagagttcaagcctgaacatgccggtaagatgaatttctattgctctgtggtcgatgaaaagctacggcattccactgatcagcccaccataggtttgattttgtgccagaccaaagaccggatactggccgaatatgccttgcgcggtattcaaaaaccaattggcgtttcggattatgagttaacccgtacattgccagaggacttaaaatccagcttgccaagcattgaggaattggaagcagaactcagccataatgatgaaaacacccctagcaaatga

SEQ ID NO: 7788 - DNA, 753 bp, Photorhabdus luminescens
atgacgcaacagaacactaaatcgcagcagatgccagcgaaaaaatcaggtccgttaaaaacggtcctgtgggatatgccatggatgcttattggcttcctgctggtatcgttgttttttagtttggtgattgaataccttgggatagcctttttctggccggaacagggagagagacacagccagcaagtgatgatcacggaaagcggttggttgtctaaagaatttacccgcagcttactgttatcagagcccgctactacgctcagtatcgggttaaaatggagttatcagtgggtgtttgtagacagtggtgcactggactggattaaccaacagcatacagtacaagctcggagccactatgagatggtgagagagttgagcgattggagtgtattactggcggaaagtttgcggaagtacttgctggcaacggtatatgtgaccgtaacctttattatccggctcactattctggtgttgtctttgccattgtttgtgatggttataggcgttgctgtcgttgaaggactaaaccgacgtgacctgcggcgttatggtgccgcttatgagtcgagttttgtttatcatcatgccaaacggtttgtgaaaccggcgttttgtgtaccctgtctgttatatctctcctggccatcggctgtgtatcccaatttattattgttacccgcagctatcctattaggggtcgctattaccgtgatgatgagtacttttaagaaatatctttga

SEQ ID NO: 7789 - DNA, 210 bp, Photorhabdus luminescens
atgccgttgccagcagccgatgatgatgacctgatgccgataagtctgcaaaaaatcgctgatgatatgcgtaaacattaccgtaccagtgaatcctggtggtctgcgggatcaatgccaagtgacagtcagattgatttcaatgtgatgttaaatccagcgttgctgacgcctgatggggaagctgacgatgacgcaacagaacactaa

SEQ ID NO: 7790 - DNA, 1383 bp, Photorhabdus luminescens; identical to SEQ ID NO: 7510

SEQ ID NO: 7791 - DNA, 1959 bp, Photorhabdus luminescens
atgagcgatcgttatgtgattgaagcacggttacgtccggctgttgagttgaataccgctgttgtttcggcggttgccgccggtgtctgtatcgtagcgccgtgggctgtggcattgtcaccatcggtcagtgatgtcatggcggcaggttttggcatgttatcaggtctccgattccggcaggggttacatatactgaactaccggcgcaatatccggcgattgccccgttatgtgatggccagccaccaggtacccgtcagtcatcagagattgtttctggggaaagggtttctttggcaacaaaaacatacacaacgatttctggataccctgcgcccggaagtcgaacgttatgttcaaccttcccggtattatcaattagcgagggcatttgagcagcggtttgagtacccattgccctctttatgtcgtctgacgcaacgtgattctccgtggaacccggtgaggccactgccgccagtaggaggcaatccagcattgcatggcattgaaccagatgaagtcaatgtgtcaatggatttgcgtgagcgggtcgggcacatgttggtcctcggtacaacccgtgttggtaagacccggctggcagagttactcatcacgcaggatatccggcggggtaatatcacgattgtgtttgatccgaaaggggatgcagacctgctcaaacgcatgtgggcggaagcgcatcgtgtcgggcgggaagatgagttccatgtgtttcatctgggctggccggatattagtgctcgctacaatgctgttgggcgttttggtcgggtttcagaagtcgcttctcgtatagcaggacaattgagtggggcgggtaacagtgccgcttttcgtgagtttgcctggcgttttgtcaatatcgttactcgtgctttggtggctctggggcagcgaccagattacaccctgatattacgttatgtcaccaatattggcgaactgtatgaaacttatgctgaaaaaattatcaggcaatgcctgcctgtgttatgggagcaggtagagaaaagtctgggtctgctgacggaagacgatttgccacgcaatatgcaggggcagacgaatgcagtgaaaatctgggcgattgaaatggcactaagctcagaagcggggaaaaaactctacgatccgatactggacgggttgcgcagtgcggttcgttatgatcgcacctattttgacaaaattgtggcgtccctgttgccattattggaaaagctgaccacggggaaaatagctgctctgttggctccagattacacggatatgaatgatccgcgtcccatctttgactggcaacaggtcatacgtaagaaaggtattgtctatgtaggactggatgctttgtcggatgcagaagtcgcttcggcagtgggtaattccatgttcgcggacttagtttctgttgcgggtcacatttacaaatttggtctggatgacggtttaccagaaggtaaaacgagaaaactccccattagcttacattgtgatgaattcaatgagctgatgggcgatgaatttatcccgctgattaacaagggtggtggtgccgggatagaggtaaccgcttacacccagactttgtctgatattgaagcacgtattggcagcagtgctaaagcggcgcaggtaacaggaaattttaatactctggttatgctgcgggtcagggaaaataacaccgccgagctgctaacccgtcaattgccagaggtggaagtgtacactaaaactttggtctccgggattaccgatatttccagtccagagcagggcggtcattttacctctaatactcaggatcgggttagcacgatcagaacgccgttaattacgcctgccgaagtgattaacttgccgaaaggtcaggcatttgctctgcttgaaggctgtctcttgatcagatctccaaatcaactgatttag

SEQ ID NO: 7792 - DNA, 447 bp, Photorhabdus luminescens
gtggctgatttaggtggacaatctacagcagcgtattttgatgccattaacgctcaggacaatgaaccgacgacttcttcaaatacggaggcgaccccgccagatttgaccgaagggggcattttaccggtggaaacgccggaattgtctcccggacctgttgacgctcgtccgttgcaattgccaggaatgggagcgttgttcatgattggggatgatgcccggtcaaaacagtggttgaaggaaaatttggttggccttcggaaaaagcaggcggtggggttgctggtcagtgtgcgggataaagcacaactggatgaactgcgtcagcttgcagagggattagtattagcccccgcttccggcagtgatttggcccggcggttgaatttgcggcattacccagtgttgataaccgatatcggtttaactcagcaggtgcgttga

SEQ ID NO: 7793 - DNA, 573 bp, Photorhabdus luminescens
gtgacagaaggtatggccgcggcggtaaaacaggttgttccgcctgggtaccagcagattgcgcgggtgcatggcgtacccgttgaaatgctttatgcgttggcactggctgaatcggcaaaacgtttgccacaggagaaacatgaacgcccctggccgtggacgctcaatgtggctggaaaaagttatcgttatgcaacccgacaggcggtctggcaggcgttgcagggatttatgcgcagcgtacccctcaaacgtattgatgtggggattactcaagtgaatttaggctggaacggccattattttcgttcttattgggatgccttggacccctatactaatcttcatgtggcagctcgtattctgaaaacctgttatcaatccaatccgggtagttggttgaatgcggcaggctgttatcaccatcccgctggcggtcaacccgcgagtaagtatcggaaaatcgtcgcacgtaaactgagtacgctagagacccgatatcctgttttgtccaccaatattgctgtagttaatacgacacagacctggattgaaccgaaggaaaaataa

SEQ ID NO: 7794 - DNA, 738 bp, Photorhabdus luminescens
atgagaaaagattttttcagccagaggaagggagtggtgctgattggcgttgttatgtctctgtcagcttcggcggcacaggttgctatctctgaacagacagagacgggaatgaaagcgactcagcaacaggtcacgcaggctgaaaaccaccgtattcaggcgcaaatgtggggactgacagaagcagagtttcagcgttatcagcaattgatgcaggggcaacggggcattcagtctcctgggctcgatccgttgagtgcattgggtattgaggccgaaacagtacaagcgcgtcaacgttatgccgaactgtgggttaggcaggaatatgttcgtactgaaaaggaactggcgttccagcgggcggtggatgcggcctggaagcgtctggcgccgaatattttgccggttaatttagggaagggggacggaatcgcacagggtaatcaagggcggctggtgttatttgtgaaagaggattgcgcggcttgtgatgcccggctggctgctgtcttgtcagctgaccgtgaggtggatatttacctggtagatagcgaaggcaacgatgatgttttacgtacctgggcaggtaaacatcatattccctcagaaaaagtccgtagccgaaaaatcacgcttaatcatgacaaagggcgctggcgacaatttggtcaggggaaaatgccggtcgtactacaacatgagaatgacggatggcgtgtggtggcattttga

SEQ ID NO: 7795 - DNA, 801 bp, Photorhabdus luminescens
atgacaactgaaataccttctctgtcgccgtcgctgacgtctgaagctgaaattgacagcttgcggcaggcggtttctcaaaagacccaacccagattgttgtcgttaaaaaaatgtctgaggtatctgtcaatattgcttgttattgtcagcatagtgttgctggcattcgtggtacggcagcaacatcatcagttagtggaatttcagtcattgatgcgaaatggatcattccagcatttgcctgatgaggtgcaaaagttgcacgaacggcttgataaggcagataccggctttgtctcccgtcaggactggcaaatgcaaaatgaccggtttcatcaggcattgatagcgcaacagggagccattaacgaccaacaaaaacagctcgcacagtcagttactgatttaagccgtgctcatcaggatcttaccgaagcagtaagtgtattgaaaaatatcgggaaacagcaggaaatacgcgttgacgcattaatcgcgtggaaatctcagcaggaaaagcatgcgggtaaaaaagcgggcacacctgatcgggaagttcttcgaacgaagaaacggatagtggctcctttcatactttctggtattgaacgtcggggagaacaagtttatgccgttattattccacgagacacagatcctcgttcccaaatatctcagatgcgtttactgactccgggtgaaagcgcatttgagtggacgttggtcagtatctccgatcatcaggctgtgttccaggcacaagggcaccgtcaaaccctgtcagtcaatggagggtaa

SEQ ID NO: 7796 - DNA, 186 bp, Photorhabdus luminescens
atgcctacaggcactgcatttgaatttgatgcttggggtaactcaattttgcatgttgaaggtgatagccatcactcgacaaccggagatatggaaaatcactccaacggtaatatcataaatgacgcaggcaataatttaactgaaacagttgagagcgtaaaaaaccgtggggcaatcatttaa

SEQ ID NO: 7797 - DNA, 318 bp, Photorhabdus luminescens
atgaacacgatcaaacattatctcacctccgataaccgggacttgtatatggagttcctgaaaggtattcgtgaccctatagcgaaatcgaaaatctcgtcacgggttaaccgaatggctaccggaaattttggtgataataaaccttgtcgagagggtgtctgggagcttcgcatagatcaggggcctggctacagagtgtattacagcttagttggtcgtgaagtggtgttattgttagttgggggcgataaacgaacccaagatgccgatatagatcaggcgattgaatgtctgaaggactatttgaagaggtaa

SEQ ID NO: 7798 - DNA, 312 bp, Photorhabdus luminescens
atggccaaagcacgtttacatgatgatgcaatggtgcagcttctccgtgaagatcctgagtttgctcagcattatctgcatcaggcatttgttgatatggatgaagaaggcgggcaggaagcatttcttatggcattacgccatgttgtagaagcacgaggaggaatggcacagattgcagataaggcaggtgtttcacgcgagactctgtaccgaacgctgtcgcctaaaggcaatccgactttgaaaactttgcgtaacgtcgttgcagcaacaggatttcaattctctcatatcgcattaatagcttaa

SEQ ID NO: 7799 - DNA, 246 bp, Photorhabdus luminescens
atgacaattgaagtacctcctctgtcgccgacgtctgaggctgaaattgacagcttgcggcaggcggtttctcaaaagacccaacccagattgttgtcgttaaaaaaatgtctgaggtatctgtcaatattgcttgttattgtcagcatagcgttgctggcattcgtggtacggcagcaacatcatcaagttagtggaatttcagtcattgatgcgaaatggatcattccagcatttgccggatga

SEQ ID NO: 7800 - DNA, 228 bp, Photorhabdus luminescens
gtgagttcaccggaacattactttcgttctcatttgatgcgtcctgctcagatacagctggcctgctcggttctggcgcattacccaacatggcgttaccgaatggttaacgtggtaatccctcgctgggaacgagcaggaattacattacaaaacttactgtatgaatggcgttatgtttcaacggctgcccgtggtgttatggtggtggtgaagcaggaaaaataa

SEQ ID NO: 7801 - DNA, 1506 bp, Photorhabdus luminescens
atgacgctcaatgacttaatcgcgctggatgaccccggccagttccgcctgcgggcactggcgctgcttcagcaacaaggtgattatattcgccagctggaagaggccctgaaacaggcgcaacgctggcgttttggcgcgcacagcgaaaccctgcctgccggtcccaaacgcagtcagtttgaggaagatgccgataccgatatcgcggtgctggaaacccggctgtcacgcctgcatatcaaggaaaacgcgaccccggcccagcctaaacgtcagcctttgccggcgactttaccccgtgaagatatccggctggcgccggagacggagagctgcccggattgcggtcatgccctgcgctttttgcgtgatgaaatcagtgagcgactggaataccgtccggccacgtttatcgtccggcgctatatcagcccgcagtacagctgcgcgcgctgtcagtgtgtgcatgctaaagcccagcccgcccatcttattgaaaagggccttccagagccggggttgctggctcaggtggtggtcgctaaatatcgtgaccacctgccgctctaccgtcagcagcaaatctatgcccgcagcggtgtcaccctggcccgcagcaccctgtcggactgggtggggcaggtggcggtggcgttgcaaccgttagccgatgccctgaagcagacgctgctgacgtccccggtgctgcatgccgatgagaccccgttgccgatactggccccgggaaaaggccagacccagcgagcttacctgtggacgtctgtcaccggccccgatacctcgccggcagtggtatactatgagctgcatcccggccgcagcggccgttatgcccagagcctgctgaaagactggtcgggcggcacgttggtgacggatgactatgccggttacaacgcactgcatgcccgggcggatatcaccgaagcgggttgctgggctcacgcccgccgcaaattctttgaccaatacaaagcgagccaaagtccggtggcgaaacaggcgctggatggcattcgtgacctgtacaagctggagcgaaaaatcaaacaccggccgccggataaacggcgtcagtggcggcagcgttatgcccggccgtggctgaatgagttccggtcctggttgcaaacgatgcagacccaaacggcccccaactcggggttacgcaaagcgatagattacacgctgaagcgctggtcggcgctggtgtgttatctggatgacgggggggtgccgatagacaacaaccgggcggagaatgcggtccggggtgtggcgctcggccgaaagaactggctttttgcgggttcactggccgcggggcaacgggcggccatgataatgagcctgctggaaacggccaaagccaacggacatgagccctgggtctggttacgtgatgtcctcagccggctgcctgtctggccgaacaatcggttgaatgagctgttgccctggcctgagaatcccttccgttaa

SEQ ID NO: 7802 - DNA, 336 bp, Photorhabdus luminescens
atgctgaaaccgcaacagctctttctggtgcgagagcccgtcgacatgcgccggggcattgatgccctgacccagcacctggaggggctgaatttgcgctggcaggacgaagccgcttttattttctgcaacaaggcccgctcccgtctcaaggtgttgcgctgggaccgacacggcgtctggctgtgtacccgccgtctgcaccgggcccattttgtctggccgaagcagggcgagcgcagctgggtgatgacgcccgcccagtttgactggctcatccgcggcattcactggcaacaggtcgagggagatgacctgtccggctggcgaaactaa

SEQ ID NO: 7803 - DNA, 366 bp, Photorhabdus luminescens
ttgttcttcctctccggcccatgcacgctaccgcttccttatcttcacctggagactgacaccatgagccgtagccgatataccccggaacaaaaacaacaccatgtgacccaatggcgccacagtgacctgacccgaaaacagtattgcgaacagcatcagctgagtttttccgctttccgcgactggattgccgacagtaacaacatcccccaacctctcagccagacactgcccgccctcttaccggtttcactccagcctgacgacgcgcgcaccgtcaccctgcataccccagacggctatgccatcgcctgtccattgacgctgttgcctgacgtgatgcgggtactgacccgatgctga

SEQ ID NO: 7804 - DNA, 1179 bp, Photorhabdus luminescens
atgctgggcaccgctgccggactcatgatattgctggtactgtcggcgttgggaacccgcatttacaacgattatctgacagagaagtcctggcaggtcatggcggcgcaaagcagtcgtttcagtgcagcatcgaaagcttatattggccgttattatgataggttgcggaattcagcaacgacaacccaaccggtgatgatcaccccggatatgttgagaaaaaccggactgttgccatccggattcaaagacaccaacagttcaggacagcgctatcagaccgctgtagtgcgcaatacccaggatccggcactattgcaggcaatggtggtgacacaagaagggagtccattaccttataaagccctgcgcctgatatcgatggatatctctaccggattgggaggatatattcgggatggcaagaccgctaccggcgcaatgagcacatggacagtgcctttaaaggattttgggataaacagtggtgaaggtcacctggccgtgttattgagcgcagatgagttatctactgctcgtgaggagagagatcgattgtaccgttttgctgtccccggtcgtccggagctgaacaaaatgcatactgacattaacatgggaggcaacaacctgaacaatacggctaccgtgaatgcacaggctggtcatttcagtggcgatatccgggcgaatgccggccagtttcagggggatattcgtagccacgatggctgggttgtgacgacaaagaataaaggctggttaaatgaaacctatggtggtggttgggtgatgtcggacagcaactggcttcgcagtgtcaataataaaagcgtttatactgaggggcaaatcaaaagcggtaccctccgggctgatgggcgtttgtcgataggagagtttttacaacttgataaagtagcagtggcgggtacggcctgtttacccaatggattggttagccgcgacagcaaaggcgccatattgtcctgccagtctggtctgtggacaaaaggagaggccaccttgcagcagaatcaatgttatcgggatggaaactggggcggacgtgatttcgctgaacaccgatgtaagcctggatattatgcggcgggacttaaatttgtgggtcaccaacgcagcgaatcagcctatgtcatcacctgttgtaaatag

SEQ ID NO: 7805 - DNA, 666 bp, Photorhabdus luminescens
atgaagacactgattgcggttagctttcctacagaatatacccctctggttatgatgacgttatttgtcatcggatgcgtgctgcttagtccggtgagtaaatttttgcaggaatacggtctgttgatgtgttcagtgcatccggtaccaagaatagctatctgtttgtacgtgatgtcgggcacattgatgttgttatcaccagcgccgctgatggaacggatagccgcactgttgctgctgagttttttgctgcaattatcggttatggatgttttgagtggctggcttcctcgtcagtttacattggcttgcctggtgtccggtgtcttggtcaatatttcgttgccgtcagtatcaataactcttttggctacggtgcttatgcttgctgggatgggagtgttacgcgagctgatgaaccggcactctcaatgtgaagtgctggggatgggggatgtctggctgatgggagcactgagtgcctggctgacaggcttaccggcactgataggttgcttgatgggtctgtccggtttcgtgttgtggcatttggcacaattacctcatcaaggtacgaaaggcgggccactggggccttggcttagtttggggagtgtggtcatgttgttggaacgattatatcagccaatatgggtaatctaa

SEQ ID NO: 7806 - DNA, 603 bp, Photorhabdus luminescens
atgcagtacatgatgatacagaaacaagaccgaatggcccgtccccctgaacggggttgggctattttggaaaatggtgcggtggctctggttgtgattgccgtgattactgtagttttggggggcatttatatgttgtatgaccgcaaggatgcggttgtagaaacaacgaatctgcaaactatcatctccagtactcaggggttaatgaaaggcagtggtggatatgaatttagtcacgcagacaagatgaccggcgtcctgattcagttgggtggcgtaccgaagagtatgacggttcgcggcgatacgactgtcggtaatgccacgctgtggaacacttggggtggtcaggttaaggtcggaccgagcagcacagggggatttaataatgggttcacggtaacttacgagagagtcccgcagtctgcctgtgtttcattagcgactgggatgagccggggaggaagtgcatcagagattactattaataatactcatcacgctgatggcaaggtgacactggaaagcgccagtacagcatgcacaaggaacaacggtcgtaccgggaccaataaactgatctttacgattaatggttaa

SEQ ID NO: 7807 - DNA, 1086 bp, Photorhabdus luminescens
atgcgtgaaatgtcatggggcaggcgtctgcgctatgtgttagttcgccacactttcttacccagttatcgcatcattttttatgaggcgttgcgttttttacttgaaaacaagataccgttattgaaagcgttgcggcagatacgtgatgtgtatacgcatttcgatacccattggcatccgtttgctgaactcattgacgattgcatctcggcgctcactgataacagtcaaacgaataccttggaacatgtgctggctgtttggggaccggtagaagaggcggcgttaattagtgcgggtatgcgcagcggtcatttgcctgaagcgctgagtcaggccatgacactgataggttgccgtcagcgtattctgatggtgtcgctcagaatgatgatttatcccttgctgttggtgctactgatggcgggattactggtgatcaccgcaacagaattggtaccaacgctaagaaatattgcagatccggaaaactggcagggggtgctggcatggctgaacggaatggcgacgttctttgagcatgcttttctgtggtgtggtgtcttactgatctcttttattgtgggcgtggcgtattcgctaccgcggtgggtcaaccgtctgcgccgcatagcggatcattttatcccctggtcggtctatagcgatattcagggcgccatttttttactgaacatggcttcccttttgcgtgcccaggttcagacgctggatgcgttaattatcctgcaacgctttgcatctccctggttacagattcgtctggagtctattgctgattgtgtccgcgaaggggatcactttggccgggcattgcatcactgtggctatgactttccgtcaaaggaagcggtgaattttctgtcattactgacggaaggtgatggtacttctgagatgattggacgctatggtgagcggtggctggatcaaaccatcgttcgggtgaacaggcgagctaatttggtcatgttgtgttcactgttgctggttgtcggggcatttatgttgatcctgttggccgtcatggaaatacagagcatggctaatatcctgccgtaa

SEQ ID NO: 7808 - DNA, 1554 bp, Photorhabdus luminescens
atgaaagaaaacatccaggttaatgatgccgtgttgctgttatgtgaagaacaacaggctacggtattaattgacaacaatcgtcggggcgatccccaggtccagacccgggtcatgcaattacttgaagccacgccagaagcagaaattcgctttgtcaatttgtcagaattgcaggcgaaccgccagaaacagaatcagcggacgaatgaacagggcgtgtgtctgtcggacctaactgatgtgagtgaacgccagaagcaggtactgacctgttttgaactggcaaaaaaactgaatgcgtcagatattcacctgaccatcagtccaggactgacccgaattgaaatgcgtattcacggtgaactggaagtcgtcaatgaactgtcggaagaggagggaatggcactggcatccacgatcatcctgtcaatgtgtgatgtcactgaaacgcaattttttccaggccgtcagcaggacgggaggattaaagcggattttctgcgtcgggtacatttgtatggcgcccggtacagccatacaccaaccgcagatgggttgtatgttgtgatgcgcgtgattgctgatgatggtgacaaagtgcctacactgacacaattaggttttttgccacagcaaattaaacgggtttcccgtatcttgcgattgccggagggcttgattgtgttatcggggccaaccggttctgggaagtccacgacattacgcactttttgtcgccagtatcttgaccggactggcggtaaaaagcggttattgaccgttgaagaccctccggaggggaggattgccggtgcgattcaaacgcccatcgtgtgtgacaaaagtgatgaagaggcggtcaggcttgcctggcaccgggcgctcacctctgcgctgcgtcttgatcctgatgccgttatgccaggcgaaatgcgagacctgacttccatgctaacggcaatttatgctgcgcaaacgggacatagtgtcatgacgacgctgcataccaatagcgcagtcggtattcctgaacgcatgataaccatgggggtgaatgcggggctgatcgccgacgcacagcttttgattgcgttgattagtcagcgtttggtgcagacattatgcccacactgtcgggtaccttgggcacagaaacaggcggtactggatgaggaacaacgggcttatctgatgcgttattgccatgctcccggtacctgttgcgtagagaatttatattttcgccaccctgaaggatgtgaacattgttgccagacgattaccctgagcggacggattgttagccggggagtgaccggtcgtagcgtggtggcagaagtcattaggcccgatgcgcgattttttaccttgttgatgactgagggcaaagaggccgcgagacaacactgggtatcgaacttaggcgggattacgcgtcgccagcatctactgcataagctgaatgccgggctgattgatccattggaagccgacttagtttgtccgctggatgaagatgattatttgctgatggagccgtgtgatgcgtga

SEQ ID NO: 7809 - DNA, 465 bp, Photorhabdus luminescens
ttgtggatcagtgtgttaagtgggctaatttttatcagttcacccgtatgggcaacagaagatagcgctctttcggtaacagggatgacagaggcatctgcgggtgtgactgtgggacagttagagcatttacacgcgaaaaatctgctgctggaagcagaattgcagcgggctaaattacaacgccaactgacagaaagtcagcctttggggttgacgggcaataataatatcgatctgccggtgaccgtatcgcctgtgatgacagcgggacaacctgtgacccgtccggtggttcaggagatttatggtcgggggcatgcattgcgggcgagcgtaagcctgccgggccgcggtgtgatggagttagctgtcggtgacgcagtgcctggcactcagttcaaagttaaggtgatcacgctttctgcggtcacactaagtgatggttcggtactcacgttctga

SEQ ID NO: 7810 - DNA, 1317 bp, Photorhabdus luminescens
atgaaaagcatcgatttagaaatatccggtgagatacccgaagtcacggttgtaaaggccgatcgccattgttggatcggtggcctgcgttggtcaccgtacgtgaaagtaaaacggggaccccgcagaaggcaacgtgttcgtccggtagccagtcgatctcaatacatcgatgtacatctggtcgtgggcaatcgttcggggagacgtcagcagactgctcgtatgatggggacgggaataatcaggaaattgtattgccgtcacacaccgtattctttagccatcgcttttttatcgcattccggcccaaacgggtacgggatctatgatttgggcgaagggcaatggttatttttggcaacgcagaagggtttgccgtccgtgatggccgatattgtcggaacccgcgagaatgtcaatgcagcactgtcccgttttttaacgtttaacccggctccagataaaagctggcgggtggtatctgaccctgataatccggcgcattggcgctcaataatttctgctttgtcggctcatcagtatcggatgtgtcgcctgcaacggcggtggcggtcaccattattgttgatggctgtattcatctctttgttgattgtcgtatgggtgttattgcagtcaggaaaatctcccgatgagagattaccgatgactgaaaccgttcaagtcagggcagcacgattgtttgaagaaacgccaaaaccggttgacttacctcatccgtgggccgataagccgttgttacccgcgtttttggcacgttgtgtcatgaccagtcggacgatcccggtgttattggcgggttggcgcttgacggcaggttcatgccgaaaagatggcgtccgccttcactacgagattatgcctggcggtacagcagcgcattttgttcagcgtgtacagagtgtatttaagcagtcaccggtttttgacctggttcagggcgcaaaagaaggccgggtattcctgccgtggaaacctttgccggttcgcaatgaaacggtgcctgctgtttcagtacagttgatgaagatggtttcgaatttccagcaatggcagatccctctgacgttaaatgaacttactcccgcatcggcattaccgggcgacgggcaatctataccttcccaggattggcgagaatacctgttcagcttcagtagtcgggtgatgccagcatggctatttgctgaactggatgatacagggctgcgaatgaacagcctcacgtttaccctgacctcacagggacagttaacctatcagactgagggatacatttatgcccggaaataa

SEQ ID NO: 7811 - DNA, 1704 bp, Photorhabdus luminescens
atgaaaaataaatggtgttcactcaggctttgtacttgccttgctccactggcggcggtaacaggcatggcgctgatgtccggttgtaccttgccggcagtggataatatggcgcgtgaggccagtgtgcaaagtcgggtagcacaacagcatttgcatcaacagcatagcctgaaacaaccgggggtaacctgggtagataaaccctgggtgaatctgaaaccggtagttcagcctgtcgcgtcggtaaagttaccatcctgtcagataacgattattaacagtaaagtcgggctgacattaccggaactaggacaacgcattacccaactttgtggtattcgggtcacggtagcgcccgatgttttatcacgagtatcaaccacggcgggtgggttgacgcgccagatgaatagggcattaccgacagctgatgataaaggacgtatgccattggattggctggatgatcgagatatacactcaattaacgctgatgagcgtcgagagccagaagtcctcacgggtctcaattggcaaggggagctgacggggcttttagacaatattgccagccggttagggattgcatggaagagggataacagggcagtcgtgttttatcggtttgaaacccggacatttcagttgaatgttctcaacacccgtaccagtagtaatgccagtgttgcctcagggtcaaccagtagtatggggacatcagggggcagtggtaatgtcaacaattctgtctctggggaggccagctcttcacagaaaaccacggttgatctgaacagtgatttatacgaagacatccgtaagacagtcgagaatatgttgacgcccgagcgtggtcggttctggttgtcaagctccagtggaacgctgatggtaacagacacgccggcggtactggattcggtatcccgttatgtggaagaacaaaatactgttctcaaccgtcaggttttgttgaatgttcaggtgctgagtgtcagcactagccgtaaagagcaaatgggactggactggggattagtttataactcattgcataatttgggggctacgctgtctggcagttttagcggtatgggcagtgggacaacgtctgcgggtgtcagtattttggaaagtgccacagggaaagcggcaaaactctccggttccagcctgctgataaaggcgttgagcgagcaaggtaatgtcagtgtggtgacctctcaaggaagtgcgaccactaatttgacccccattccgatacagatggctgatcagacggtgtacgtggctcaaagcagtacaacgacggctacggatgtgggagccaccacagctctgacgcccgggatgatcactaccgggtttaatatgactttgttgccgttgatacagcgtaatggggatgttcagttacaagtggcttttaacctgtctgatccgccgactatccgttcattcacatctaaagaaggcaattcttatatcgagatgccgtatacccggttacgttcactgagtcagaaagtgaatctacgtgccgggcaggcgctggtactcaccggatttgaacaggctgatactcgggtgactaagacgggaacctttacaccaggtaatttcctgcttgggggaggacagtccggagagaatcagcgcagcacgttggttattttgatcacccccgtattactggattga

SEQ ID NO: 7812 - DNA, 438 bp, Photorhabdus luminescens
atggggtacgtcattagtgcgtttgccttggtttttctgttgattgcagggggtatacagctgcgacaggcagaacaactgcatatcgatcgtgacaacgcaagggctcgaatactggcagatcaaatgttgctgttagccagtgccattaatcactggcgtggcggctatgcatctaaaaatggcacggtggatctccgtaagctcattctgccttttcagcctgatgcccgtatccggcatgttatcagtcaaggccggctctgggtgtggatgccggaaatacccggtcttgtcaccgctctgcgcgaacgcactaaggggtccatgttgattggtgaagtccgacagggacggttgtatggcttatccggccaggcaataggattcactcttcctgacgggattagcgatggtgatgtggtgtatttcaactga

SEQ ID NO: 7813 - DNA, 1050 bp, Photorhabdus luminescens
atgaaaaaccctgtttttttctcactcagttgggtgctcgtcatggtattagctgggtgtgccggacaaactcaggaggctaccgcatccggtgtaagttttcaccgttctcatcaggcaagtcccgctgtatccgatatctattctctgacaccagaagttacacgctatgatcgctataccttggtgagtgtaggcagccaggctgtgcagcgtgaacccctcaatcaaatcatcaatatcaccatgccagtaccattggtacaacgcattggtgatggattgcactatctgctttttggaacaggttattcgctgtgtgataccaccgcaacccatttcgttaaattgataggcagaccattaccggctattcaacgcaaaatggggccgatacggctcagtgaagcgttacagattgttgtcgggccagcatggcgtatccgggtagatgaggtgaatcgtgaagtgtgttttgttttacgtgatgaatatcgtcagttttccgagacaacggttggccggataacacagcccaaaatgcgggtaccgttgcaaatagcttcttcaccggcgttatcggcatctacattgtccaatagcacattagccacgccgttaccggtgaagcccctgatagctgaaagaccgaaaacagatacccttcaatcttctgtgacaggagggaaatccacaaccatttcttcagtatcacctactcagcccattaaatccctgctgagcggcagtacaccagtggcaacggtaccgataggcaacatctggcgtgcggaaacaggaaccactttgcgtggaacgttggagcggtgggctaatacaacggattgcccggtagggggacactgggtagtggtgtggtcgtcaccgacggattaccgcattgatgcgccgttgatgttcaaaggcaactttgagtccttgttggtacaagtgtttgatctttatcgacaggctgagaagccattgtttgccgaagtcagccgccttcagtgcctgatttcagtcagtgataaaccggtgacccggtaa

SEQ ID NO: 7814 - DNA, 210 bp, Photorhabdus luminescens
atgcatcttcttaccgttgcgccgctacagacgaatcgcctttataatgttctggtagtcatgaatcagatgataaaaacactcggtattaccagcctgaacttttttgacacgattgatgatctgatacagcgatatccggcgattcagccttatctgcgtagctctgggtttgctcataactggcaggcagatctgttctggcattaa

SEQ ID NO: 7815 - DNA, 330 bp, Photorhabdus luminescens
atgccttctatccaaagccgtatcgctcactggggggatcttgttgccgatttacaggctaagtatcttcagtttcagaatactgccgatgcagaacaaattcttagccagataagctatcaccacttcaaaatttacctgcatctgttcctcgatccggctagccccggtggcaagcattaccgtccgacagcgttctttgagcatggcgttcagatttaccggtttgatgaagagctccgagcttacctttttaaggtcatcgtcggactggaagttaaattacgcagccgtctcgatcacacacttgccgcgcacagtaatttataa

SEQ ID NO: 7816 - DNA, 189 bp, Photorhabdus luminescens
atgaaaagccaagaagtaaaattcagccactacgatactgccgattatctccaaacagaagaagatactgcggcgtatctggaagctgtgatagaagatggtgatccttcccttattgcagctgctttgagtgacatagtacgagcccgtaacatcagccaactagcaagaaatgttggaatgaactga

SEQ ID NO: 7817 - DNA, 249 bp, Photorhabdus luminescens
gtgacttcaaaccagaggcttactctatgttcttgtcttaagggattgattgttgttattacgataagttcaaaaagattccctattttgcaacagggaatttgtgtagatagaaacaggctttatgtccgtcttttccacctattctacttcgatcgaaaattagtccaatatgttggagaaaaacaaggtttgatcctattgagtgtgcgttgccggtgttctaatgggttgcataataaaatgtag

SEQ ID NO: 7818 - DNA, 237 bp, Photorhabdus luminescens
atgttactattacaacaacaatgtcctaaggacattgttgttgtaatagctgataggggttgtagcgttgtcagtcagctaaagtggtttattgtggttactatagcgctcttgcaacaaccaagagctgaaatggttttgatattactgtttcggcaggaaaaaatgaccattaaaaaatcattacaccggtggaatttatccaactttaccagaaagacgaagctctctgattga

SEQ ID NO: 7819 - DNA, 894 bp, Photorhabdus luminescens
atgaagaaaacaacttcactgcgagatgcactaaggctcataattcttaactatcatcctaaaccgataattgctcttcatgaactcaatatgtatatctacatgctctaccgtgacaggatgtttgatggtatccgcattggcaaaatccaggcaactgaaccggacaaacgaatcatggatgatgctctggaagacatggttaatcagggaattctgtcacccattattcctagttttatctggcaaatcagtaacaaaaaccaagcgagtgctcagcagattgcctgctgtctcacaccttactcccatcttgcctatctgtccgcaatggaatggcatggcatcaccgatcgtattccacatattgtgcacctgatccaagcacctcttaatactgcccggagcctttatcaggaacatttactgaaggatttccccgctataagcaacatgcaacctctgatgatccgcgggttcactccatacgaaaaaatcgatggcaaggagctgattttccatacccatagaaactacagaaaaaagcaggaactccatgactccggtgggattcgggtaagtaacataggtgaaacctttctggatatgctcagggagccggatctgtgtggcggtttctcgcatgtacaggatgtgttccgtgaatatgctggtgaatacctgcctgtaatcgtcaaaacagttgataaaaatggaaaaggtatagataaagccagggtaggttaccttctggaagaagtctgtggactaacccaccgcacgattgaaacatggaagaagactgttcagcgtggaggaagccgtaaattaatagcatcaaacccttacaaaaagacatactccgaagtatggtgtatatccatcaacaactga

SEQ ID NO: 7820 - DNA, 783 bp, Photorhabdus luminescens
ctgaaaccaaaaatgataatgaaaggcgggatcctgcttggcctgagatatcagagttcaagatttactgaagatattgatttctcaacgaatatgcgacttgccgatatagatcagcagactttccatgaagagctcgacgatgccctagccatttcttccgcagaattgccttatcaagtgacctgtgccgttcaaagtctttccattcagccaaggaataccgaagaggcaacctttccgtccttcagactgaaaataggatatgccaggaacaacaatgacggtgaaatgagacgtctgcgacagggacaatctccccataccgtcaagattgattacagtctgaatgaacacagcctgaatgttgatcacatcaccctaacagatgacaacgatatccaagcttacagcttcacggatcttgtggccgagaaaattcgttcagtgatccagcagattgtccgtaaccgttcacgtcgtcaggacatctacgacctcaatctgcttttagacagcatccaacctgaaaacaaggacaaattggctatactgaccacactactggaaaaatccaccggtcgcttggaagacggaatggtcaaccccgaaaccctgggcagagtggatatacgtgaacgatcctcacgggaatatgaactcctgaaagacgaggtcgaaggggaacttatggactttgataccgcctatacacgtattgtggatttctataaatccctgccttgggacttagtaacaggttggcagaatgttgcaaaatag

SEQ ID NO: 7821 - DNA, 669 bp, Photorhabdus luminescens
atgttgcaaaatagcctgtatctgtgtcatcaggggcaacgagacgagcagctggatagatttttctttatcaacactggtgtatgttcggtctccgtgatggcagatggattcagccactgccatgccagtccgcattatgttgactggctgggtgaacaactttatgcactggaaaataccggaagttgctgcaacgagctgtgcggagaagtcctccggatcctgagctgtaatgactgttatccgggaaaggctagtattgcggttatcgtgtctgatcaagaaaaataccgctatgccactctgggtgatacacggatttactggccctcacacagcttcagaaccaccgaccattcactggcccagcgctgtattgaccgaggaaactgcccagcagaaaaacttcgtgaccacccgctgcgtaaccagctcactcagtttgccggtgctgacagcaaacatacactcacctggtcagaacgggaacgcacatatcatgatgccatcattatgtgtactgatggcttctggtcccatttcgatgataggtttatccacgaaatacagaccgaagcctctctccacaacgcgttcagtgggatgataaacaaaaagacagtacctgaagataatgtctccgtagtcctgctccgagatctgtga

SEQ ID NO: 7822 - DNA, 465 bp, Photorhabdus luminescens
atggcttcacgcggcgtgaataaagtgatacttattggacgattgggacaagaaccagaggtgcgttatcggccagagggtgatacagtggcggtattgtcactggcaacatcggaaacctggcgggacagacaaacgggtgagcagaaagagcgtaccgaatggcatcgggtggtcattttcggcaaactggccgaaattgctggtgaatatttgaaaaaaggcagccaggtatatattgaaggtcagttgcgtacccgtaaatggtttgacaaggcgagtgggcaagatcggtatagcacggaggtcgtgctcaatcagcagggtacgatgcagatgttaggggggcgtagtcaaagtgagccttcccgttcaagtggtcgggaacaatcgcaatcctcttcgtcagtgccgccccgaggaagtgaaccaccaatcgattttgacgagttgatccctttttag

SEQ ID NO: 7823 - DNA, 459 bp, Photorhabdus luminescens
atgtctgcaattaccactgaaaataaatatttcaacctgaatatcaatggattggggtatctcagcaatgtccgcaaggtgaatggtccgaatggcagttttttcagcgcggtcatcaatgcattgagtggaccaacagagaatccgtcttatgttcgctttgatgtcactgttgccggtaaggaaaacagtgacttaatcagccgctgtcagaaagcggttgatgaggacaaaaaagtcttactgggtttcacattaagtcagccgtctaccgggatttttacgttgaacaagggtgagcatgccggtgaacagcgtgtcagtttaagagcgcggttgattaaaattgactggatcaaaatcgggcaggagatggtttataaagctgaaaaacctgaatccgtgccgcctgtacagaataagtcttcgcaaaagcattatgcagagaattcattttga

SEQ ID NO: 7824 - DNA, 2031 bp, Photorhabdus luminescens
atgaaactgtttctgtgtgaaaaaccgtctcaggggcgggatattgcggtggtattaggtgcaacaaagcgtgggcaggggtatttaactgggccgggggtgacggtgacttgggcagttgggcatttattggaaactgccagtccagaagtttacggtgaacaatatggtgctccctggcgggcgtcagtgttgccgatattgccggcctcctggcaaatggtggtcaaaaaggagacggctgaccagtttactgttatctgtcgtctgctgaaacaggcagacgaagtggtgattgccactgatgctgacagggagggagaagtgattgcccgggaattactggattattgccagtttcaggggaaaatatcccgtttgtggttgtctgctctggatgaggtgagtattcgggcggcgcttgctaatattttgcccggtgaacaaacggcatcgttgtatttggcgggactgggacgagccagagctgattggctcattggcatgaattttacccgactctataccgtgaaagcccgtgaatgcggatatagtgacattttgtctattgggcgtgttcagacgccctctttggcactggttgtctttcgagatcgggagattatcgcctttacggctaaaccttattggcaggtggtggctgaccttcagtttgacggacgaattttccgggcggattgggtacccgctgcgacctattgtgatgaagaaaaacgctgtattcatcagaatgtggcacagacagtggttaagttatgccaacaaactggtacggctactgtcctggaaatcaatactaaacgggaaaagcatgcggctccgttggcatttgatcttggtagtttgcaacagttgtgctcgaagaaatggagcatgggggctcagcaggtactgaatattgcccagaatttgtatgagacgcataaagctacgacctatcctcgtacagattgtggttatctgcctacggccatgcaggcggaaattccgcaagtattggatgctgtggttaaaagtgatccggctatgcggattgtggtagatagtctggaccggacgttgatttcgcgtatctggaatgacaaaaaaattacggcgcaccacggtatcattccgacaaaacagccctgtgatatgaataagatgacggatgatgagcgtaaagtgtatcagcttatccgtcagcattatttgctacagttccttcctctgcatgaaatggatataactgaagcgacttttgatatcggtgggcaattgtttcgtacccggggcaatgtagtgattgttcctggctggaaggtattgttttcagcgggtaaagatgaatcggcatccatcgggaaagacgattctttgggagaaagtttgccgtcgatggtcaaaggcaatcaatgtcaggttaatgaggctactttacgaatgttgcaaactcagccatccgctcacttcacggagggcacactgattgcggcgatgaaaaatgccgctgcttttgtcagtgacccgcaacttaagaaggtattgaaggacaatgccgggctgggaacggaggctacccgggcaggggtactggatacgttgtttaaacggggttatctgacaaaaaagggcaagtatatccacgctacgcagattgccagcgagttgatagccgcgttgcctaccgcgttgaccaaccctggattgactgcattgtgggaacaggcgttggatgatattgctcaggggcaagcggaattgccggattttatggctcgtcaggtccaatggacccaatacttggtggagcaggttcaggcgcagaaagtcgtgatcacgccgccgccttcattgccttgtccggtgtgtggaggcgtaacgcgtcaacgccagggaaaaaacggtgttttctggggatgtataaaatacccggaatgcagtggggtagtcagcaccgtcgatggaaaaagaaaaaccagatctgcccggcataagaacataccgaaaaaaccggcaatgacagggtga

SEQ ID NO: 7825 - DNA, 699 bp, Photorhabdus luminescens
atgactgaaactaaagagacacatgctgttcgctcaggcgcactgcattcctcacttaccattgagttgcatactcattacgctatcagcctgtggaatggccgccgggatgaaagtagcaaaaagaataaaccggtgattattagcatgccgcgatttttctcactagccggtcggatcagccaggattccctgatagataatccgtatgccgatatggcgatgttggcactggaaactaagcttgcttctgctcatgaccagatgcaggcggcgttagcggaactggcggctacactctcgggggtacctgctcaaatccatttatctgagattgcctctgtcgctccgctcaatattggtgtttacagtcgcactcctttgggttaccgctgtgtttggttattagtgggttacgatcaactggtgatgaaagccttgcaggcgcaccattatgcgctgatttcccgtcaacaatgtgacgggtttttaaaaaaagggggacactgggtacgccaaatctacggtgctgtccagccgtaccgtagttttgctgttactcgtgacgatatcctttcccaaacccctgccggcagggaagctattacccgtttggggctaccggatgaggccgttatgcggggcgaaaaacgttctgttttttctcctgaattaaaaagtacggtaaagcagaaataa

SEQ ID NO: 7826 - DNA, 1236 bp, Photorhabdus luminescens
ttgtcatctgatagcctcattgcttttacgttggagcaaatgaatgcccgactggcagctcaagctgaaggtgatgaaaaaaaacagttgcgcagtgggctgttgtatctggggaacgtgcatgatgctattccccgtcagttaattctggatacccgattatctccgctcgataagatggcctggataatgatacggctgtatgcacaacaaaatgcgggagcggtcttccctacctatgatgaactgcaattgcaactggcctctccgcacagcggtaaagcctcccgggaaaccgtcagccgggtattgctgatgttgcgaataaccggctggctaagtttgtgcaaacgcgtcagggatgaaaaagggcgcgtgaaaggaaacatctacgcccagcatgatgagcctctgacatttcatgatgctgaagcgcttgatcccaactggctggacacggtgggggaggcgtgtcgccacaaaaaccgggtgattagtcagactgcttggtcagtattgatggaagttaaagatgatccgatgatgcggcatcgccgttcccgaattgctttactggaaaatcggttaggtcaggtacaaacgccgcagcaaatggcggcgttgcaagcaataagtcagccaagttcggtaaccgaacttaatcccaaaggccagaacagactaagttcggaaaccgaattcaatacaaaaacaggggatagtaatccgagttcggcaaccgaacttagtctaaaatcaacgagttatgacagagttcggcaatcgaacggttacgtacgtcatttcacacacagtgtgaataaaaatacgtacgtagccccatcggatggcgacaacccgattgttgagcatttgttgcctgtagcgttacgaaatcagctttctgatgacgacatcagaatgctgacggaacaactccaggcacttccgtctgatcagaggcatttggtgttggatagcctgcgagttccattggaaaatggctcgttaaaaaatccggtgggttacctactgacactgatgaaacgtgccagacagggagagttgagaagccccggtacagcaaatcagggggaaaaccccggcatgaaaaagcctgttcctgccagccgtcagaaagacagacctgttttgccagaggtgcaaagaaaggccaatcctgccgtaatgaaaaaagtgattgctgaaatccggcagaatttgatgaaaagataa

SEQ ID NO: 7827 - DNA, 264 bp, Photorhabdus luminescens
gtgaaaaagacagagatcactcaggggttgttggccccctgttctgtaccactcgtctatagaaagaaagcggtagaacaattgaaacgttatcgacagggtagcaaaaattacactcggatcagggcgaaaggcaaaggtaaagtttctcatcgttgcctaaaaattgatattggcatgttttggcggttgttaagtcgtaacggaggacgagattgggaaatgatgacacatgagcggtacaacaatgaaatctggaaataa

SEQ ID NO: 7828 - DNA, 591 bp, Photorhabdus luminescens
atgagccagatatcccaggtaaccaatgccttgttaactcaactggtcatggagttgaaatcgggttatctccgccgctgtgaagcactgggtttgatggacgaagaaatgcggatgttacacagtttgactgtggaagacttgcattatctgatgaatagcccggtgtcagtccttacgctgcgtatccatcatgaaaattttgcgttaatgctgcaacaagcccgacgtgagcaaaaacgtctgcaacgtcttgatcgggcactgatgttaggcggctcaattgaattgatgcaacactactttgggttgacttctgttgaggtgagttcccgtcgtcgtatgttagggattgaagctcgccagggtcgatgtctgatgctgacagataaagacagtgctgaggtctggcgactgtggaaagcgaatgtcactgatctggatagtgcggatgggctggatgtgatgatgcaggccgctgaacagctggtcgtgtcactgacggcagtctggaatgctgtacgtggctggattgaagacgaaaagaacacagtaaaacctgaagttggtcagggacggcaagacaggtga

SEQ ID NO: 7829 - DNA, 252 bp, Photorhabdus luminescens
atgtctgatgatattgatgacacgagggctcaggctgttaccgcgatgtggctggaagagcagatcgctgttgtacggcgtgagatgcataccggtagggtgtcactgaaatattgtgaaggatgtggtgatcggattgatgagcaacgtcggcagattttgccgggggtccagttgtgtgttggatgtcaggaagttgctgagcattgggaacaggtcagatgtattaccggaggtcatcgtggtgggtaa

SEQ ID NO: 7830 - DNA, 1731 bp, Photorhabdus luminescens
atgagtaagcataaaacctctctaagcgatgcaatacttcaacgtggcaaaacaccacaatcaccaatcagtactgttgttttgcctatggcagaaatgccaatggtattaacgttggatgagttacagccaaacccggataatcctcgcctcagccgtaatccccgttttgacgatattaaagcttctgttcgtgccagaggactggattctgtaccgaaagtgacgcgagatccggaagacagtggaaatgtttacattttcagtgatggaggcaatacccgttaccaaatcctatgtgaattatggaaagaaacgggtgaggaacgttttttccgaatcccttgtttgtttaaaccctggcctggtcggttgcagtgtgtcattgggcatctggcagaaaatgatgttcggggggatttaacgtttatagagaaagcgcttggtgtttttaacgcaagttctatgcatgagaaatgtttgggaagaccgatctcacaacgagaattgacagatttattaaaacaagaagggtttccaatatcacaaaccagcatcagtcagatgcataacacggtgcaatatttatatcctcatatgcctaatttgttgatatcgggtatggggcgtccgcaagcagtaaacatattgtctttacgagttgatgctcaaaaaacctggaatagtttttcttcagaggcatcgtgtgggaaggacttcgattcagtttttggtgaggtatgtcagcgctttgataatcctgaactctattcttttgacatgctacgggatgaactgattggggaattaataaaagctttgccacatcctgcccttaattatgatcgctggttattggagctcgatcctaaagagcgaaaccgtcgtcagttgtttggtgagccccctcctattgctgaacatttgcgcgatgcggatagacaagccgctgaagtgcctgaaaagtcggtacctcttgtgactaaaagcgctgcctgcgtttcggcagtggaacctgagtcgcatggggatgttatcgaatgtcaggaagataaaaagaccgaggaatatgaagtttgtccgcccaaagttgaagttcagcctgatgtgtatgaaactcggccaactttatccagtgagttgtcgacaatacaggataaggaagatattgcgcctttagtatcagcacctttatcgcagatagttccctctactttaagtgaatttaatcactgtcttccaacaccaccacaaacttcattattaacagagcctacgccatctgatggattgagttttgcacaaactggtctggagccagttagtgatatctggtctatctcaccggtacgagatgatattgagcatttacaagatatggcgtttcgtttggcattcgagttagccgaagaaatgggaggagcggatgagcttgaggaagctaaagatacggcctgtgaaatgggttatcgattagcttattcccatacggcatcacgttttgtacaggtgctgttgtcgttgacgggggagagtgaccataacggtgaattggcagatacaggtataggcatgttgggaacctggtttgtcgggtctgacaaggatactccagtattgcctgatgtcgcagtagtgaaatttatgcgtcttattcgggtgttgcgccggttacgtgaactgcaacgtgagttgtcggtagtctcagcagaagggaatggcaatgtctga

SEQ ID NO: 7831 - DNA, 1380 bp, Photorhabdus luminescens
atgcgtaaccctttttctttaccggatggtattgaacaaccgtattcttgcgatgctgaacaagccgttcttggtgggttgatgctggataatgatcgatgggatgaaatcgtaccactgatacatgctgatgattttttcctgcccgctcatcgacggatttatggcgctgtcgcaaccatgtttgcggccaatttgcctgttgacgtactaacgttgtctgaaattttagagcaaaaggagcagctaaaacaggttgggggatttgcctatttagctgaacttggcaaaaacaccccgagtacggcaaacattgttgcttatgcggaaattgttcaggcgaaaagtcgcttgcgtcagttgataatgctgggaaatgagatgagcgatcaggctggccatcctcgtgctgattttactgacattaccgaaatggcggagcagcgtttatatacgctgtctgagcagaaagctgtgcgccaagatattagcttgaaagaagggctgggtttgctgattgaaaaattagagcaggccaatggaggtaatgggataacgggtacgccgacaggctttagggaactggatacaaaaacctgtggtcttcagccgggcgaccttatcctgctggccggtcggccttctatggggaaaaccgcactggcactggctttctgtctgagcgcactggagagtgctcctgatgctgttgctcagatttttagtctggaaatgccgatggatcaattattgatgcgtatggtgtccatgttggaacgtattccgcttgaacgcctgcgtagtggattaatggatgatgaagattgggcacgggttagtagagcaatggagacgctaattcaatgggaaaatcggctgataattgatgacaacagttatcagactccggctttattacgcgcccgtgcccgcagaaatgtgcgcaagtatggtcgaccttcattgattatggtggattatctgcaacttatccgaagcccggagcaggaaaaccgaacccaggaaattgcagaaatttcccgtagcttgaaagctctgggtaaagaattgggttgcccagtactggcgctttcacaacttaatcgtcaactagagcagcgtacagataaacgtcctaataacggtgacttacgggaatcgggggcgctagagcaagatgctgatctgatcttgtttgtttaccgggatgaagtgtatgacgccaatacatcggatattgggatagccgaaatcattattggtaaacatcgtcaaggatcgattggaacagtcaagatccagtttgatggtgcctgtacccggtttagtgatcttacagagaggtattatgatcttggtgctaaaaggggaaatatatga

SEQ ID NO: 7832 - DNA, 885 bp, Photorhabdus luminescens
atgaagatacttcccgtaatttctcctaaaggtggcgaaggtaaatccacacatgccgccaatgtagccggttttcttgcagatgccggattcacaactctccttcttgacgctgattattctcaacccacttcaagcagtatttttgcacttgagtatgaagccccagctggtttgtatgaacttcttatgcagactgctgacctgggtcagaaagaccagattatttcccgttctgttataaataatctggatgtcatcatttccaatgatcctgatgaactcctgcctacggccatgcttcatgcgcctgacggacgtttgcgtctgaggaatatattgcagcaccctctgttcagtcagtatgacgctatcatcattgattcaaagggcgctactggtgtgatggccgagctggttgtgctgacggccactgaatttgtattgggtgtgattaagcctattttgccagatgttcgtgagtttctgcggggatcgttgcgtatgttgacgcgactgcaatcgtttgagaattatggtattcgattacctttaattcagatattggcgaatggtattgaaggcactaatcttgaccgcgatacgttgaatgaactggcccatattatcgagcataaacgttacgatacgtcctcttttggtgggcgaagagtataccaactgctgaaaacccgcatcgacctgctggatatttataagttggggcatgtgcgtgcccaacccgttcaccgtcttgaatacaaaacctcccgtaaaagccccgctgccgcgcaaacaatgcactgtctgtcctgtgagttgttccctgaatggcatgaacagtttgatgcactgatggcgaataagggggtgaagaatgcgtaa

SEQ ID NO: 7833 - DNA, 1002 bp, Photorhabdus luminescens
atggacagtatgacctgggataacctgctggatgagtatttttttgctagaattttgcggccggatacggagtcgagttatcgcaaggtggtgaatacatttaaggtgtttgcaggtgtcagcaatcggccggctcaagtgacccgacaacaggtcctggcgtggcgcagatatgtgttgcatcagtctggcctgaaaggtgtgacctggaacagtaagattgcgcatatgcggtcagtgtttaatttggcgatagaagaaaaaatactgccccaaacggaaaacccatttattggtgtagaggttaatgagaacaaaaataaaaagaaaacattgaccaaaaaacaactgacaaccttgtatctcacgatggggcaatttgaagagcgggaacgacggacaggggataatcatcgtgcccgctgtgcattatatccgacctggtactggctgacggtattggatacgttgcgttataccgggatgcggcaaaatcagttattacatatccggctcggggatattgacctggatgtgcgccggattattctttgctctgaggggagtaagaaccattatgaacaccaggtgccggtggtgaaatggttgtatccgcggctggagattttgctggaacgtgcgcaagccgctggggcaaaacccagtgatcccctgttctgtgtgaactattttaccgccaaaacagacagaggaagtgaaactgatcaattacagacgataaagtcattctttcgtcgtttgtcaaaggagtgtggatttgatgtgggcccccaccgtttccggcatactttggcaactgaactgatgaaagcgcctgatcgtaatttgcaaatggtgcgcggattactgggccatcgcagtattgccacaacgatggaatatattgatatcaatctggatattgccgggcgcgcgctggagcgtgagttgatgctgtatattgatgttgagccagaaagaggcgaaatgctaatcggataa

SEQ ID NO: 7834 - DNA, 1542 bp, Photorhabdus luminescens
ttgggaaaaaagaggagattaatcgtgttgaaaaaaattaaaatcctgctggcgggaaccgccgcaggaaaaaagtcacttccacaacccaccgccatcccaaaaacggtcaaagcaggctactttttgccgtctgagtccaggctattgctggatatttcccggcgacggcagtgtttacagtgtctgtgggacaacagtgcattacctaaaacacactatcaggcattgtggctggctccgttacatgagtgtgttgcattgatgcaacaacttccggcagcaccgcaggggccttatgcccacccaggcggcttgatagatgtgactctgcaatgtactgcctctgccgtacgtctggcgaaaggacagatgttaccgccgggggtggcccctgaaacgcaggcagaacaaagtgtgatatggaacacggtggtgttttacgctgcgttatttcattttttacctgttttggcccagtttgacggggaactggatgaaggccaaccctggtacccgggatgggttgtgccgcaggggccgtatcgtttccggttcaaaactcctcccgtggagacgagggttgcctgtcatttcgggggggtactcgccgggcggttgttgccggctaaggcgttgacctggctggcgtcagtacctcatgccttgcctgcgctgttctgtattttatccggtgacatgaaggaagatgacgcaatcaatcagataattatagaagctttgaataaagcgggtgcaccgacaatatcagaaatattctctgtcacggcagcatccccgcaaatgattgtttcaggcaatcccgatgtttctgctacgcctttatcaaccgcaatggacagtgttctgccttctcagagacgacaggaagataacccgatgactgaaattgtttcatcagccgtgaggccggttgatgagatttcttctgccgtcatgacagtcgcaccggagaaagggggacagtcggatgggagcacgcaacagctattgtcattaatggggatgaatgtcgcgggcacagtgacagaacagattatggcgagtgaagcggaaatcgtaccgccatacacatcaatgccttcacaacacgcggttcaggcaacatggcagaacgaaaatgcgattgagacaccctgtattggagagcaattctgggactggctgtccgctggattaaggcatggggtaatgaccattaatacgccggaagcccggatacatctggtcagtggttttgtgtttgtgagtgcgctggccattttcttccagtttctcagtgagaagaagcaggtggatggcaaggaggttagcgaaaaatggaaacgggtacaaaccgcatttgagcggttgggacgacatcgagtcagtggtggaaagtatttttgttgttgtcatctttatgattcggctgatcggactggctcctatcaacgtattcatggctacttaatcaaaaacacgttgctttatcgtgaccgttctgtaccagaggatagcccttttctcatgatttcctga

SEQ ID NO: 7835 - DNA, 105 bp, Photorhabdus luminescens
ttgccggcggatatgacgccggcgatttacccattggggaatatttcctctgagggggcgtgttccccccttttctcaggaacacgttttgtctgtattgattaa

SEQ ID NO: 7836 - DNA, 924 bp, Photorhabdus luminescens
atgtcgaagtggtacgctaatcgtttgcatatcactggccaacctgaccaactggatgccctgcgacaatggggattgggagacaaaattccctattacgggcaggcgatccatcaaagtattaagctgtttgtcgcgggctgtgctggtcttctgcaaccgactgaaacaatagattacccactttatccagcgctggtagcgggtggagtgggtgaaatgtcaccggaaaattgggcatttgagcaatggctggccttgttaaaagagaatgttgcgcttgatgaagtcactagccaacagattgacaggctataccaacaaagtggtctggccgagcgaaaatgggagacgttgctcccgacagcgcagaaaaccatcatggctttatttaaccaaaagtcctgtgactggttcggtttggttgattggaacggagaacgtgacacggaaatgctatggtctcatcttgatgacaggctgacagagacggttccttgtgacttgtttctgctgataccgacccgtcttgcgagtgaaatcaatggattttacggtggattgttaaaggatcacgagacgactcatgagttgtatttccgattatacggtatgacacggccgcgaggttatgatatagcctggaagcaccatgatgatggcagtctgaccgggcattttgacaaaacactcagggagccgtggtatgaaaaaatcatagttcctttatccaggcaatatcactgccgtatcacccattattttaaggaggtctgtggctgttgtggttacgacaaatacctgaatgggcagtgggaagcgggtattattgatgaactggaatttggtgaggaagatgaggacggtacccgtaaagtggtcggaccggactacattctcggcaatatttcacatgacggttag

SEQ ID NO: 7837 - DNA, 249 bp, Photorhabdus luminescens
ctgacgggcgttatttcccgtcaggggataacgcccgtttttattttcggagcgttaccgatgaaaaagattaagaccaaaacattcccaaaaactgtccgcaagaacaaagctgcccatcgtcacggcaggcgtttccggcctgatttgtaccgggtgatgacgggcaggattatcgcggcgtttggaaagagaaagcgctctgatgtgcaggccacaaaattgtggagaccggctgtccggttataa

SEQ ID NO: 7838 - DNA, 1014 bp, Photorhabdus luminescens
gtgaatgggttcctgaagaaggatattcagattttagaaaagcctttcgctcaatcacgaattatatacagggggaaccccgtcaatcacgagatttcccttatgtctttattacgtttttatatccggcatcaattcgcagagcgaatggggctggcgctggatgacgacgcgattttctatctgtttcatgagagccagggagattacgtcaatacccatataaagtttaccaaagagttacttttgcccatcatgactcatcttttggacagtttgtctgaggatccggcaaaccgggccagatgcagaaatagtgagcgtatcctgacgttatggatacggggaatggaggcgatatctcatgtttatcaggatccgatgctgatgccttatacccatccggaaagcagtggtcgtgtggatacccttatccggccggataccgccgtgttactgaatctgacggcagagcagtttttgcgtctgacggcgcaggacagcctgccggaagatgagcaaattgggctggaacagttcagcaaaacacaacaatactggacacgttttatggactatttggataagcagttgacagaaacgtgtcggtattgttttgaacgtttgggtcaatttcttcgttacttacaggttgaaccccgtttaatacggcgtttttccttcgctatcggttacatcgatgtcttaatggggccacaggatttgcacaatattgaggcagaggaatttgagtcagggtatctcgaagactatatcgatgcggtctccgatggattgatgacacccgtccagtttcgggttgatgtggtatacaaaaatgatcgtgtgatagcgagttttcgatcagatgtagacattgaagatgttaacaacccaacagtcagagattatcgggatgtggtggatgaggcaatcacctgggtagatgagcagtttgtgcggaaaacccaccgggagagcactattacccccatacgaaagttagcggcttga

SEQ ID NO: 7839 - DNA, 828 bp, Photorhabdus luminescens
gtggctttcctttgccaactgttcggggtttatcgtagcagctatcaggcctggcaccatcgagtgaaaaagcccgatactgagcgcatcaggttaaaaagtttagtccgggaagcgtttaatgagggcaagggctcagctggcgcacgaacgattgccgccatggtgaccgccaaaggcataccattaggccgatggcgggcaggaaaattaatggctgaactggggctggtcagtcgtcagcagccaaaacaccgctattcacatcaggaacaagaacatcttgatattcctaacgatcttgaccgtcagttcacggtcaccgagcccaatcaagtttggtgtggtgatgtgacctatatctggacaggtaaatgttgggcctatctggccgtcgtgcttgacctgtttgctcgtaagcccattggttgggcgatgtctttctctgccgactctgagttgacaaagagagcgttggaaatggcgtttgaatcaaggaggaagccacaaggtgtcatgtttcaccgtgatcaaggtagccactatacccgcaaagcgttcagacggttattgtggcgttatggtatcaaacaaagcctgagccgccgaggtaattgctgggataatagcccaatggagcgctttttcaggagcttaaaaagtgaatgggttcctgaagaaggatattcagattttagaaaagcctttcgctcaatcacgaattatatacagggggaaccccgtcaatcacgagatttcccttatgtctttattacgtttttatatccggcatcaattcgcagagcgaatggggctggcgctggatga

SEQ ID NO: 7840 - DNA, 303 bp, Photorhabdus luminescens
atgatgaaaagaagttttagccctgaattcaaactggaatccgcccagttagtccttgatcaaaattacagtgttatggaagccgctaaagcgatgaatgtcagcaaatcagccttagggagctgggttcgtcagttgagacaggagcggcaaggtaaatcttctaaagccatgcccatcacgccggagcaaattgaaatacgtgagctgaaaaagaaactgcaacgtattgaaatggaaaatgaagtattaaaaaaagcttctgcactcttgatgtcggactacttgaacagttctcgttaa

SEQ ID NO: 7841 - DNA, 189 bp, Photorhabdus luminescens
atgagccgtagccgatataccccggagcaaaaacagcaacatgtgacccaatggcgccacagtgacctgacccgaaaacagtattgcgaacagcatcagctgagtttttcctctttccgtgactggattgccgacaataacaaaatgcaccaacctctcagccagacactgcctgatgtggcacagtaa

SEQ ID NO: 7842 - DNA, 270 bp, Photorhabdus luminescens
gtgaacaaaacagaaaacaatgtggcggaattgatggagggaaggctcccgaccaaggggaacagccaacagtgcgcccgtatccggacacagagccggggaaatacgacgttacgcctgctggctgtgcgaaaagcagcaaagagggataggaaacaacagtttactcacctttttcatcacatcagtgaagaacttttatgtcagagttttcagcaacttaaacgtcagtctgccccgggctgcgagggtatcacatgggaaaactag

SEQ ID NO: 7843 - DNA, 780 bp, Photorhabdus luminescens
gtgcagcaggcggctgtcacggtcttaaatcaaatctacgagaccgattttctcggcttctcgtatgggttcagaccgggcagagggcagcacgatgctctggacgcgctgaatgtggccgttatggagaggaaagtcaattgggtgctggatctggacatcagtcggttcttcgataccgtggaacatgactggctcatccggtttattcagcacaggataagggacggtcggatggtgcgattaatcaggcagtgggttacggtggggatagttgatgaacacggtcaccgacagaagtcgcattgcggcacgccgcaaggtgctgtcatatcgccactgctggcgaatatctatttgcactacagctttgatctctggctcaacgcatggcgaaagcgggtgcaaggagaggtggtgatgatccgatacgccgatgatgcagtcctgggcttccagaaacatcaggatgctcgggcgtgccaatccctgctacaacgacgtctgatgcagtttgggctgaaggtacacccagcgaaaacccggctggtacgatttggccgctttgcgttaaagcaatatgaggagcgaccggagaggggcaagccggggacgttcgattttctgggatttacgcattatataggacgattacacacgggcaaggatgcggtgatgcgcaaaacccaacgaaaacggcgtcaaatacaactgaagcgaataaaacaggggctgcggcaacggctgcaaaccgcccggaagaaacgggccggtggctga

SEQ ID NO: 7844 - DNA, 585 bp, Photorhabdus luminescens
ctgaaacgagtggtagaaggacacatcaattactatggcgtccccttcaacagtagagcattgtgtcaatttgtggaagaagtgaagctgatgtggctgaagtcactgagacggcgaagccagcggcacaaaatgacgtgggctcgttacagtcagcgggtgaaaatggataccgtccccccgaactgtgcatccttatcctttgcagcgcttttacgccaaacacccgaggtaggagccgaatgcgttagtagcgcacgtccggatctgtgcgggggggtagccggtaacggctattcctaccgcgaccataaccactcacaaaatacccaggcccatacaccaaaagaaacttttaccgggcctcatgcccggtttaccctttatgttaaaaaatggtcttctgattatcttaactcctcattaatggcctgccgaacaatcaacttggcagcccaactcgttaagttgatgattccgtcgttttctaaaccaaaagtgtctttcagaatagtcatagcctctgtaccatataaaactgaaatcaacataataatcttatgtattgtgtcatctttaagctga

SEQ ID NO: 7845 - DNA, 735 bp, Photorhabdus luminescens
gtgaacactatgacgcgatttgtggttgtcgttggcacagcagacacaaaactggacgagcgggtctggttgaaatgttgtttacacctcgcaggagttgattcaatcatcattgatgtgtctacatcaattcctgggaaaaatcatcagaataaaaagatagatattcattcacttcaggtggctgagtatcatcccgccggcgctgacaccgttttttgtggcgtgcaaaataaagcgataaccgcgatgtctgtcgccctcacgaatttcctgaacagttcaatcgacgatatcgcggggatgattggtatcggcggttcaggcggaacagcgctgattatgccggctatgcaaagcctgccgatcgggttgcctaaaatcatggtatcaacgatggcgtcagggaatgtctcggcctacgtcagggccagcgatattgccatgctttatacggtaaccgatctcaacggactcaaccgtatttcccgttcagtcttgtctaatgctgcaaatatgatagcgggctctgtcaattattttacgccattggctgatattcataaacccgctttagggttgacgatgtttggtatgacgactccgtgcattaatcagattaacattaaagattatttggctgttgtttggattattgcctgtgagttaagtttgattgttgaacctaaattaataagaaataaagtgtggaaacaagctgaacgcactttttaa

SEQ ID NO: 7846 - DNA, 219 bp, Photorhabdus luminescens
atgggatccccattcttgttaaaatatcgactgggccaaatttctgaaggatgtactcctagtctgtccgcaataatcctctcccctttaggccaccggcgtattaatgcattagatagtgtcgatggactcagtcccgattcccttgataatgcggcaagtgtggtgccgcgtttacgcaatgcagcaataatatctgccggatgccagtcattttga

SEQ ID NO: 7847 - DNA, 93 bp, Photorhabdus luminescens
gtggatcccgaggtctggttacgccatgtcattagtcatattgcggactggcctgcaaaccggatgcatgaacgggtcgatctcacttcttag

SEQ ID NO: 7848 - DNA, 621 bp, Photorhabdus luminescens
atgattctgtttgatgaagaaaatctgtcgccagtccggcgtcgtaccctggaacgtatcactcattcagctctgaagttatatcgtgaaaaaaaatttccgtctcctgaagagattgctaatgaagctgaatatgcgaaggccacgttgcgcagctacttttcaacccacagtgattttgtcgaatatgttgtaaaacaagtcattggatcattcgttatcccccctatgggcgatgatgcagaggaaaatatcgagaaattattaagatggggttatgaagaaatagaagccaatgaggcactgatgagggatgctttacgcatttctcagttacgctggcaggaatctttatccggtgaagataaccacaaacgacctgttttgaagaaaaaaagtaaccgcaaagagacactttctacggcgttagcgccgctaaaaggtcagctcaaagatgacacaatacataagattattatgttgatttcagttttatatggtacagaggctatgactattctgaaagacacttttggtttagaaaatgatgacatcatcaacttaacgagttgggccgcaaagttgattatccggcaggccattaatgaggaactaaaataa

SEQ ID NO: 7849 - DNA, 1245 bp, Photorhabdus luminescens
atgacgcgatttgtagttgtcgttggcacagcagacacaaaactggacgagctggtctggttgaaatgttgtttacacctcgcaggagttaattcaattatcattgatgtgtctacatcaattcctgagaaaaatcatcagaataaaaagatagatattcattcacttcaggtggctgagtatcatcccgctggtgctgatcccgttttttgtggcgtacggaataaggcgataacagcaatgtctgtcgccctcacgaatttcctgaacagttcaatcgacgatatcgcgggagtgattggtatcggaggctcaggcggaacagcactgattactccggctatgcaaagcctgccgatcgggttgcctaaaatcatggtatcaacgatggcatcggggaatgtctcagcctacgtcagggacagcgatattgccatgctttatacggtaaccgatctcaacggactcaaccgtatttcccgttcagtcttgtctaatgctgcaaatatgatggcgggctctgtcaattattttacgccattggctgatattcataaacccgctttagggttaacgatgtttggtatgacgacgccgtgcattaatcaactcactactgagttaaatactcaatacgattgcctcgcttttcatgctaccggcaatggtggaacaagcatggagaaattagctaaggacggcgaattggtttgtgttttagatattacattaacagaaattgccgatctgttatttgggggtgttttgggttgtcctgacacacggttagacgtcattgcaaaaaaaaatattccgtggatcggcagtgctggtgctttggacatggttaactttggtgcaaaggacacagttccagaacgctacagcaacaggctgtttattgagcataattctcaggtgacattgatgcgaaccacacctgaagaaaactatcagcttggtatctggatagggaataaacttaataagtgtgatggacctattcgattcattattccggaaggcggattctctgcgctagattgccctgaacaacctttttatttacctgcatcaacacaggctttctgtcatggattaaaaaaaacaataaaacaaacagaattgcgaaaagttataaaaacaccttttcacatcaattcaccacaattttgtgctcttgtaatacaacaattcaaggaaattataggactccagggaattcctcatgaagaaaaaatataa

SEQ ID NO: 7850 - DNA, 831 bp, Photorhabdus luminescens
atgaagaaaaaatataatcagattattgaaactctaaaacaaaaagtcgaacgtaacgaaactattattggggcgagtgcaggtagtggtctttcggcgcgttgcgaggaagccggaggggcagacctcattatcgtatataattctggacgcttcagaatggctggcagaggatcattggccggattaatgccatacggtaatgcaaatgaaattgtcagagaaatgggtaatgaaatattaccgatagttaaggaaacacctgtattggcgggtgtctgtggtactgatccattctgtaatttatctcttttcctggatgaactgaaggcacaaggttttgctggtattcagaacttcccaacggtaggacttattgatggaaagttcagaaaaaacctggaagaaacaggcatgggctatgcactggaggtgaagctaatccgcctggcgcatgaaaaaggaatgatgaccacgccttatgttttcaatgaaaaagaggctgaggctatggcacaagcaggtgctgatatcatcgtcgtacatcttgggctaaccactggcggtgatattagtgctaatacatcatatgatctgaaatcttgtataccaatcattaacgcttgtgcttcggcagctaaaactatccgaaatgacattattactttgtgtcacggtggcccaatttcggaaccggaagatgtcgcttatattttggctcattgtcccaattgtcatgggttctatggagcgagttcaatggagcgtttgccaacagaacaagccatcaaacacactatccagaaatttaaagaaattaatcggagttaa

SEQ ID NO: 7851 - DNA, 249 bp, Photorhabdus luminescens
ctgttacggtatgacgacgcattgttttcttttcctcaaaaatacgggaagatgcccaatatgtcatcctaccggtccgcaacaactcagtctcgcttgtctccgggggcttactcagcgatgttaatgaaaaaatggcgggcaactggctggacagaagcccctacaccagatggcattcaatacttttttgaacgtgctgatcgaggcaaaaacagccctcaatattctacgtctagtgcgtgctga

SEQ ID NO: 7852 - DNA, 459 bp, Photorhabdus luminescens
atggctaatgtgaatagtaacatatcctcatactcaaagcgttatacatttgcgcaatctaatgtagaaaccgaagcacataccgtgcttacaggcttttctttggttttaattttttgtaaaccaattgggaagcaatatgatgtgaatatcctatggtctggcatgtcggatgcgattgcatcactggatctctcatgtgttagtgatactgtactgtgtcagctaattgaatcatccaaagaaaatactatgggcatttgtcatggaataacttttcttggtgactcaatgttgtcgtttgccagtaataatatccatgaatttactccagagagtttgtgtcggctcgggcatagcctatcagcgctgagttctctattaccgatgctgtttaccatgcatgaaaaagcgagtggtgaatatcgtcgtagaacttcgaaaaacgagataaaatag

SEQ ID NO: 7853 - DNA, 225 bp, Photorhabdus luminescens
gtggagaaaaaagattggcattcggcagatattatcgctgcgttaaaaaagaaaggaatgtcattggcggctgtttctagagaagcagggctggcatcgtcaacgttatctaatgccttgcaaagaccctggtgtaaaggtgaaacaattattgcaaacacactgggacagaagcctgatgaaatctggccttcccgttaccagaaaaggaggaagagatattga

SEQ ID NO: 7854 - DNA, 141 bp, Photorhabdus luminescens
gtgtacatcctgactgagtattaccacgatggagatgtgaatgggtggaacgcggtttattacctgaaaacgaaaaggttttctctgttgatagtgatgaatggacgcctgaacgacgattttgttttaacctgtttttaa

SEQ ID NO: 7855 - DNA, 528 bp, Photorhabdus luminescens
atgagtaagctgattcttccctctgatatgttgttgaaagagggacaaactgtttcgttgacccaggtagatctaactaaagaagattcatctctgctggagttactacaacagcaaattgaagccgaggacagtctcgcgcaactagccggaccacgttggtatcgctctggtttaggtcctaaaccaactcaaggcggggtgtatgtttctggtacaaccctggctcccggacagacgcctccagtaggaattgtgagcaccattctgtgtaactatgaccgactcaattgggctggctggcaaaatcaaatcacgttgcgtcttctcatcaccaccccgaataattctgctgcatgggaagcatttctggatgtagccagcgactcggccactgtcaatgcggctggatcgaatgttccagcagattgcaggattaccttgcaaatgaaagtcggaaatatcacgggcgggttgtatcagccgccgtacatttcgtcctatgactgctgggtaaactacaactaa

SEQ ID NO: 7856 - DNA, 204 bp, Photorhabdus luminescens
gtgagaactactcagcaaatgagtattaccctccccaacaacatggcggacgtggtcaagtctaaagtacgcactagtgaatacgcgaacgaaagcgaggtgattcgtgatgggttatgggcactgatggcgcgggatcgtactgtggaaagctggcggcacaatcaacttggatcagcggggcatttgacggtttcgcactga

SEQ ID NO: 7857 - DNA, 1353 bp, Photorhabdus luminescens
ttggttaataaaatgaattctacaataaagttgagtgtccaagacacaattagatttgcaaagatatcatctttgcatatcaaaatattatttttatgtttgagcattcttattttagatggtttcgatactgctctgatcggctatattgctcctgctattgttgatagttgggggatttcaaaaacagaccttggaattgctatgagttcagcattggttggtttatctgtgggagctgtaacatcaggtcctatatcagacaaactaggacgtaaacctgttattgtaatttctgttttcatgtttggaatttgtagtattgcaacgatattttctacaactgtttaccaattatcattctggcgtttattaaccggaataggtattggagctgctatgtctaatgccttgacattgatttctgaatatgcaccagaaaatagaaagtcacttatggtgaactctgtattttgtggatttcccttcggagcagctatgggcggtattcttggctccttcatgattcccaagtttggttgggagagtatgctagttattggcggaattatccctatacttttagttgtcccacttattttcattcttccagaatcagttttattcttgattaataaaaacaaatcagaagataaaataaagagaatttgcaagaaaatagttggtgaaaattataataaaatagatttttcaagattaaaatttatcgaaaagcaaaaaattaaacctattaatgaaattttatcccatggacacttatcatcaactttgcttctttggaacgcatattttatgggattattaatattctatgttgtcacaaattggatgcctatacttatcaaagactctggttttgaattaagttatgcaactattttaactgctttatttcctttaggtggtggaattgggacgataatatcaggaattatcatggataagctatctcctcataagatagtatcatttaactatctcataacgggtattttgctcttctctatagggtatgttgataatataatcagtttaggaatattaattctcttagccggaacgacaatgaacagtgcacaagcatctatgggaacaatagctacacttcattaccctacaacctccagagctacaggtgtatcgtggatgcttggtattggtcgtgcaggagggatattaggtgcgatgtttggagcatggctagtgcaattaggattaggctatcgaggggtacttatgactttattcattccatcggctattgcatctatttcattacttagtttactcatggtattaaataataaaaaaattaaaacattttcatcataa

SEQ ID NO: 7858 - DNA, 948 bp, Photorhabdus luminescens
atgagtgataaaattgaatataccatacgtaaactaactccatacttttgtgcagaaatacgtgatatcaaactaaatcagccattaaataaagatataataaaaaccattgaatcagatcttgaagagcatgaagtattggtatttccagatcaagatatcacatcagaagatttaatgcgtatagggagatattttggccagttaactgtacatccttttgcagagaacagtgaaaaaaatccagagttaatagtatttgattataagagtggtaatccacctgtattaaccgatcgctggcattcggatgaaacatataaactttgcccccctatggctacaatgctctattcaagaattgttcctgaaataggtggtgatacttgttttagcagtatgacaactgcttatgattttctttcaataaaaactcaagatttcattcgaggattggaagctatacatgacttttcatcgtataaatatctttttccagacacagaagaaggtaaaaaattattgcaaaagaaagagttggaatatcctccaatcgcccatccagttgttcgaattcatccaaaaacgagaaagaaaaccctatttgttaacccaaattacactcgttatataaaaaatatggatcaacgagatagtgatgcactactggcacaattatttaatacaacatcagtacttgaatatcaatataggcaccattggaaaccaaacatgttagtaatgtgggataatcgctctgtacagcatgctgctgttcatgattactatccaaatcgccgatatatggagcgggtgactattggaggtgatcaaccaattagtgagtcggaacctgcaagccctgaacaattgcgtaaatttaaagtaccagcatataaccatgacgattcacgccgtgctaaacgtcaattcgagattgaaagttag

SEQ ID NO: 7859 - DNA, 1212 bp, Photorhabdus luminescens
atgaatgcaccgtacactgaaatatataatttttggtcaataaaatcttttataaggctatttttattatggctagctggtgcaggaacgcgtttgacaatattggctaccccacccatcatttctgacattcatcatgatctaaatttaactgaaactcaagttgggattatttctggcttgccagcagtattatttgcaggtaccgcaattctaggctctctattaattgcaagaacgagcgcaataaagactcttatccttggtttgctgattaccagtttaggttctgcattccgtggagccgccgatgatataattatcatgtatatggcgacaatgataacagggttgggagttgcttttatgcaacctgcattaccttctattgtgaaggattggtttccaaaacatattgtgattgcgacggctatttatgttaatggccttcttcttggaggagaagttattcctgttgcagtgacaaaatctattttattacctatgttgggatcttggcgacttacatatgttttttgggctgcgataacattaataattgcagtttttatatacaaattagcacctaaaaataaacatgaaataatatcgataaataaaaatataaagtgggtgccagaatggaataacattatattatggaagttaggattaatgatgggatgtgtaaatgcaacatattttgcaaccaatttttttattccacgttacttacatgaaactaattttgaggatttaacatctatttctttggttgctttaaatttaggacaaatccctgcttctattattcttatgatgacaagcgccactgtagcaaaactacgatatccatatttgatatcaggaataggattaattgcatcttttagcagcattatgtactttggtactgaatatatagttattagttcagcattcatcggttttttttctgctattgttttaatactaatgttaggactacctagtatgattagcgagccacacgaggtacatagatctacttcactaatgttgacagttggttatacttgtgcagttataacaccagtaattagtggtttatcatgggatatttcaggaaatccaagttatgtatttcttcctatgatgatatgttcagtcatcctgcttatttcagcaataaaaaaaccaatagtaaacaaagtcataaaaaataaaatttaa

SEQ ID NO: 7860 - DNA, 1185 bp, Photorhabdus luminescens
atgacggccttaccattatcaggaattgttgttgttgatttaacgcggcatagggcgggcccagtcacatcacgactactgggtgactggggagccgaaattatcaagattgaggaacctaccgataaaggtgacagtatggggggcgctcgtgaaagttttgattaccaaaaccttcatagaaataaaaaaagcttatcagttaatttgaaaacaaagcaaggacaggagattctccagcgtttggtttgtaaggctgatatcgtgcttgaaaattttaggcccgaagttaagtttcgtttaggtgtcgattatgaatctttgaaaaaaattaatcctcgtattatatgtggcagcattagtggctttgggcaaaatggcccttatagttctcgaccagctgttgatcaaatagtacaaggcatgtcaggacttatgtctgtgacaggtactcaagaaagcggtgcactcaggactggtgttgctatcgctgatattagctcaggcatgaatctagctcaggcagttttactggcactatatcatcgagaaaaaacaggtgaagggcagtgggtatatacttcacttcttgaatcaactttagctatcatggatttccaagtcgctcgatggcttgcagatggcaaaacacctgagcttatgggaaatgaccacccgacattaatgcctactggtgtcgtaagaactaaggatggtgaaataaatattgcggcagcagaagatgaaaaattccgaaagttatgtcatctacttgatatagaggaagtttatttgaatcctcaatattcagatatttataatcgttcaaaaaacagaaagcagcttatggatgaaattcaagctgtaacacggaaattcgagagtaaacagctaatacaaattctaaacgagaatgggataccaagtggttacatctatgatatagcacaagctatgtccgatccgcaaattcagtatttgaagatgaaatgttctattaagcacccattattaggcgatttgactctggtaggtcaacccatgcatctaagcgctttctctgactttgatacagtacgtaatcctgctccagagcatgggcaacacacagaaaatttattaaaaaatttccttggttttgatagtgatgaaattgcattgtttcgcaaaatagaagttatttag

SEQ ID NO: 7861 - DNA, 450 bp, Photorhabdus luminescens
ttgtatagcttatacaacaaaaatttagactcaaaaatattagataattgggcatcatattttacagatgattgtatataccgaattacttcaaaacagaatatagataatggatgggatctatgctttgttttttgtgaaggaaagaaaatgctcatagaccgtgcatccgcgttatctgggtcaatttactttagagacagagtacaacaaaggataacatctaatatattattgacaaaactcgaacactgtggagagaaaatattagccaatacagaaacaatatttacaattcatgaaagcatatgtggtcaagaaaataagttgctaataagtggtataactaaggatattatcgaatacaaaagtggtactgctttatttaaagagcgtctctgtatttgcacagcagatattattacagattcaattgtgtatccgatctaa

SEQ ID NO: 7862 - DNA, 1209 bp, Photorhabdus luminescens
atgaaccttcaatgggctaaagaaggcacccgaagggtgccctccaaaatttatatctgtaaccagatatatgaacaagaaattaaaaatatttttctgggaaacacatggaattatgttgggctttcttcagaagttgaaaattttggtgactatatacaaacatttgtgggaaatattcctgtcattttaatccgtgatagaaaaggaatattgcgcgtatttgtaaaccgttgtccccatagaggagcaaagatctgccataaccctcagggtaatactaagttacttgtatgtccttatcatgagtgggcatttagtttagagggtaacttagctgggatgccttttagaaaagggattaatggaaaaggtggaatgtctgaattttttcatcctgaagaacatggtttgcaagctcttaatgtgactgagagacatggtgttgtatttgcgagtttttcatatgatattgaaccatttgaaacatatttagaccctgtcatgctttcatactttgatcgtgtttgtgatggtaggaaactaaaagttattgggaaaatgcagcatagagttaattgtaattggaaacttcaaattgaaaatgtaaaagatccatttcatgcagcacttctgcattcattttttaaaaacttcggtatttggcgttcagatcaaaaaactagtgtaaaagtttgttcttctggcaaaagcagtgtattagtgtcaacagcatctttcaccaaagctgaaattaaaaaaaatgcagagacaaaaacagagttatcacttttagatccgagaattatcgaccatcagcgtgaatatgaccatggtacaggcgcaattatgactgtttttccaaatcttatcctgctgcaacaactcaattgcttagctatgcgtcatgttattcctgatggtacagatagttgtattaaaatttggactttttttggctatgaaaatgaatctgaggcgttgacgaaacggagattatttcaagcaaacctactcggtccttcaggattggttaccatagatgataatgagattttggctgtaacccaagaaggggctaaaagcatgccagactccgaaatcattttagaagctagtgttggtgagtcgagtgaagaccacatgatgacagaagcggctatccgtggattttataaatattaccgaggagttatgaatcttggatga

SEQ ID NO: 7863 - DNA, 1095 bp, Photorhabdus luminescens
atgaaaaaactatctaaagtcacattagtaaaacgagatcatattccatcgattcgcactattgaagtgaatggtgtggaacattggttaggacacgtaaaagatttcatgaaaaacaaccaattgagcgattttttaccagatgataaccgtatatccatggcatgggttcgtcttgaagctggtgaagaattagtaccacatattcatccagtagaatcaatgattttgctctgtgaaggttctgctgaatcaacaggggatatacaaacagctatggaagcaggtgatgcgcttttagttccacctggtcatctccacggtttcaaaggtggttatcccgatggtttctggggattatccattcaattcgattctcgtggcctttacgaggattttactgacccttgggcaactttccttcctgagcaagttaataaaaatttagctactacaattgcggaacaattattttctcgtaatgagatttatatggaacgtttcgataaacataaactttttgccttagtaaatcgtggactattaaaaaaaacacaagcaaagaaaagatttctcgattgtttccaagtttggtctgaccattttcagaaaatggtgttaactcgtgctgcaacattacacaacgctgtttttgaagagattacaatgtcccatctagaagaagaactcggacataatcgtgctctcaaaaataaccgtgtagattttgaacctgtatttgatccagttcttgaagccgcaagttcatggtttgcttataaaatgacaacagcaactgaattagaaaaagttgttttagtccatttagtagttgaagcctcagctattttcttctacaaacatattaaacctgtaatggatgatacgactcctaaagctcactttgacgttcatagtattctagatgatgaacatgtacgtatgggctatgaatttatatctaactacaatattgcagatggaaaacctttatttgagatccaaaataaaggctgggctatgttaatgactgtaatgtcacgtatcgctgatttaacagtatacgaaagtagtgcaataggaaatgaatcctag

SEQ ID NO: 7864 - DNA, 294 bp, Photorhabdus luminescens
atgttgttatttcaacagatattattttttcactacacgatgattatcctaattgctgaaatatcatcaggggcctgtttgttatccataggaaatgatgatagcgattacataacgccatttcccacagtcaaatctggtggagtatgggggaagtatttacgctgttttcctccgagtagctattttgctttgccttatttgctgaaaagcaaaggatgtattgtcaataatgcgcctgtgtcgggactaggcgctgattgggaaggcctacactattccccagtcatatag

SEQ ID NO: 7865 - DNA, 510 bp, Photorhabdus luminescens
atgaaaaagaattttattttggcttctttagtgacggtattagcagttttcagtagtttcagtgcgttatcttatgatggaacaattaaattccgaggtacgattattaatgaagggtgtacgataactaccaaagatgttgcagtagacttcggtaagttgtcaaaaaacgcatttggaggaaaggcaaatatagttggtataagtaaagatttttctatctccttaacatcctgtgatgtgacaggagctctaggtatctcatttgacggcggacctgacgctgataataaaaatgtttacagttcaggacttgccggcgtaggtattcaaatactcaaaggaagtgatggaaacaacatagcaccaggaacaaatgtccctgggattgcaacaattgcaagtaacaccgccactatgaatttcagagcaggactaatttcaacaaaaaataatgtttcgattggctctatagataaaactttcaatttcacaatcatatatccataa

SEQ ID NO: 7866 - DNA, 669 bp, Photorhabdus luminescens
atgcttcgctttattactccctttttgcttgtcttttttatgggacaagtacaagcagggattactttaggcggaactcgcctgatctataatggctcacaaaaagaagccacgatttctattaccaactcggatacagaaagaccttatcttgtacagtcgtgggtagataatatcgataacaatcaaaataaagtaccgttcgttattactccaccattgtttaagatgtcgaaagagagcgaacaccagatccgtgcttcatatatcggcaatcatctgcctgtggatcgggaatcgatatttttacttaatgtcaatgcgatcccggccgttgaaaaaaatgacaatagcaagatgatcatcacgataaaaaatattatcaaattgatttatcgtccatccgggttatctgataacgaggctaatgatgccattaatcgtttggcagcatcacgtaatgcccatggtgttcaattaactaaccccacagcttattacgttaatcttaatgagatgaaaattaacggaacattaatacctaaacccggatttattcccccttttagtcataaggtattttcaaccaaaaatgacataaaaagcgtaactctgactgctatcaacgattacggtggcacaacagaagagcgccagtttaatttctga

SEQ ID NO: 7867 - DNA, 2514 bp, Photorhabdus luminescens
ttgtctgatgagtgtattgtgaaaaaaataattagctttgctttaatgatttgttgtttatcgttgccagcatatgcagagctgtatttcgatatcaatgcattacaattatcagacgaagacagagaaaatattaatctggagagtctggcaaaaacggacgcccatattccaggtatctataaagttaacgttatcgtcaataaaagggatattggcattaaaagcctgtcctttattgactgtggtgagaaactttgtcctgaattatctatccgtttactgaaagaaatcggggtaaaaatagcaagcttcccagaattagcatcccttgctgaacaagagatcatttctcaacctgagaaatatattaaacaagcgtcagcagagctggatctaagtgctctgacgctgatgctaaattttccgcaagctgccatgcaatcgcaaatcaggggcgatatctctcctgagcagtgggatgatggtttgccgatgtttttcaccaattatcatttaacaggaatgcaatcttggaataaaaatcaaagtgaacagaatcaatatctgaatttacgtagtggctttaatttaggtccgtggcgaattcgtcataatagttactacaaccatacgggtacaacatctgaatggcaatcgcttaaagcctatgctgaacgggatattcgcccattaagatctcgtctggtattgggtgaaacatccaccgatagcatggtattcgatagtttcacttttaatggcattaaattgatgtcggatagccaaatgttgccagatagccagcaagggtttgcgcctgttgtccgcggtattgctatgactcacgcaagagtagaagtgcaccaaaaagataatattatttatcagacttttgttccaccaggcgcgtttgaaattactgatatttaccccagtaacctgaatggtgatctggaaatatctatttatgaagaaaatggcaatatcagaaaatttactcagccctttgctgcctcaccattaatgatccgtgccggccaaatgaaatattttgctaatatcggtaaattcagcggtggtaaacaggccagtaaaaaaagatttattcaaacagaagctatttatgggttatgggatagcaccaccatttatggtggagtgattatttcctctgactatcaaagccatgcattaggtttagggcataatctgggaaaaattggtgcggtatcaatcgatgtcaccaatgcagcaacccatttcccaaacggagaaaagaaaagcgggcaatcttatcagatacgctacagtaaaggttttactgaaactaatacaacggtgacattagccggttatcgctacaataccaatggttattacagctttagcgatgccaataataactattccaataataacgacccatttgctgatcatagcagaaatagtgcgcctaaaaaccggatgcaaataacgatgggccaaaatttaggacaatatggtaatctttcattatcggcctggcagcaagattattggcaagataaaacccgtaagaatcagtcatattctatgtcctataacactaatattcatgatatctctttatcattaagctacaattatcatcgtaatcgctcaagtattaataatgatcaagttttttcattcaatatcagtattcctctggataaatggctgccatcagataatcacagcgcatcggtagattatgataccgcttataacaccaacggtagcagccagcattcaatgacattatccggctcgttactggaacaacaaaatctgaactatatgatttctcaggattacagctacgaaaaatcagagaaagaaaaacaatcaggtaatgccgccagtctatattaccgaggctcatatggttcaattaatgtaggttataccaccgatcatagaaaaaatcagcgagttaattatggattagagggagctattattgcccatccctatggcgttactctggcacaaaatattagcgaaagcggtgccagcgccttaattcgtgcccccggggcaaccaatgccaaggtactgaataatacctctatcagtacagattggcggggatataccattgtgccttatatatcgcaatatcgggaaaatatgttatcccttgataccaatacattcggtgatgacgtagatattgataacccaaccactaaggtcattccaaccaaaggagctttggtcttagcggattattctattcgtgttggtcatcgagtatttttaactttacaacatcacggtaagaaactcccattcggcacgataattacaggcccagataatgtcaatggcatggtgaatgaaaaaggcgaagttttcctcagtggtgtgagcgacacagcaaaattaaccgctgatttaggcgagaaacaaagttgtcatattaaattcgatagtaaattatatcaaaaaattaatggtattattctgacttcattacgctgtcagtaa

SEQ ID NO: 7868 - DNA, 981 bp, Photorhabdus luminescens
atgagaaataaattaattattttagcaacgttattactaacattactcaatattacaaaatcaattgccacatgtaaattaagcaagaattttaaatcaattgatttaaatgttgagataaatgaaattatcaattcacctaataaccataaagcacatattcttatcgcgcaatatggaccaatggaactagctagcaaaataggtattaaagccgatgcagctattgctaattgcgatagtaatgcaacagttctctttaaaacagcaccaaataaaatagcacctgctaataatcctaacaatagcggcttgataaaaacaagtgcgaataatatatctttttacgtaaaataccttggaagtggaaaaagtaatcctaaaaataagaaattaagtttaaaagatataggtgaagtacaggtgtacctttaccaacatggagatttaacaccaaaagataaattaaaaaaaggattaatttcatctttatctacatatgatgataaagagttaataagaatcaaatataaaaaagaaaatgtcattaaaaataccggttgtatgacatcaacaccataccggaaactggttttaggcagccataaaatttctgattttaatgggaaatggcaagcagcacgtaaatcgtctccctttaatatatcgattgaatgcaaaggtaatattcttcctaccatagttttttcaggagaaaccattgcagaagtacctgacaaagataaggatagtgttattagattaaacaaatacggttcaggaaaagaagctaaaggcgttggtgttcaaatgatccataaaggaatacctgttgctatgcaaaaaccgattacagtcacgccttccggtaggatcggggtttattctattccccttttcgctcattactatcaaactgatgataccataacaggtggaaccgctaatgcattagtgcaatttacaattaaatacaaatag

SEQ ID NO: 7869 - DNA, 1011 bp, Photorhabdus luminescens
atgaaatattatttacggttattaatttctgctgttttacttttcaatatcaataaaatacatgctgcttgtatttcagaatccacaacgggtaacggcactgtatattttgatttaaattcacttaaattaaacttaaacacatcaaatactaaaagtattcatgttgtcagattcagtgctgaacaattagctagcagcatggggctcaatataaatgatcctattttttcatgtgatgacaacggatatttggtttttggtgaaagtgtttatcccagcatggccggtaacacggagcatgggacaggaaagttaacaacaggtatagataacctctatttatattttgttgctgctactggaaatctaaataatatgaaatatcccacaattgatggtagaagttatatctattacccgccagaaaagaaaaaaattacctggaaagatatcggtgatattgatgtttatctctataaagagggtgaaattaaatcaggaaaatcattacacgctggaataatttccctattacaaacatcgaacggcatccgtctaataacaataagaaacaaaacaagatatcatgttactgctcaaggttgcatggcgctatctggcgatcaaaccgttagatttcatgatgtttacagctcttcgtttaaaggaaaaggaacaactgccggccatgctgattttaatatcaacattgaatgtacagaaagaatcaaacctacaattacattttccgcaagaacaatcagtgatgccccagagagtattattcaattaaacagaactaatgcaacaaatacagccaaaggggttggtgtgcaaattttatatatgggaacgcccgttcctattgggaaaccatttgctgtaggctattctgacaggaattctcgttataatttacctttcaccgcccgttattatcaaaccgatgatagaataacaggtggaaaagctaacgcaatagcacattttaccgttcaatatgagtga

SEQ ID NO: 7870 - DNA, 744 bp, Photorhabdus luminescens
atggaacagacagttatacacaccaatcaagcatcactgccagaatatgacaacggatttatcactcaaatcgagtatggaacggttgttaaacaccctcaagtacatttctggcatgcccgctttgatctttcttattatcacgatgaactcttcgaacagttaaatctccccttccctgctaccttaactaaagccgtcaagaaacggcgggctgaatatctggcagcacgttattgtgccagacaacttttagcacaattaggacaaccagcatttaatttgatctctggtcatgatcgcgcgccaatctggccgcagaatatttgtggttctgtttctcattcatctcattgtgcaattgtgctggctgcaccgcaaactcataaccgattaattggtgttgatatagaagctatcgtcgatcgtcaaaatatagatgaaatcacaaaaatgattgtgaatgacaaggaaattcaacttctgaaacattgccatttaccacttgaacaagcatttacccttgccttttctgtaaaagagagtttgtataaagcactctatccacaagtaaaacggttctttggctttgaagcggctgaaattattgccctatccctggaaaataatgaaataacattagcgctgcgggaaacactcacccctcattatccggcaggtacactatttcgtgggcaatttattatctacccacaggaaatattaacgctaattattcaataa

SEQ ID NO: 7871 - DNA, 447 bp, Photorhabdus luminescens
atgcatgaatctctgacaattgcattacttcaagcgcgagaaaccgcgatgggtttttttcgcccaatccttaaacgtcataatttgactgaacagcagtggcgtattatccgtgtactgtctgataatcggtcgattgatttttatgatttatcctgccagacctgtattcttcgtccaagtctgaccgggatattgactcgcatggaacgtgatggcttgatctttcgtcttaaaccgatgaatgaccagcgcaaactttatgtttctttgacgcaggatggtcagaaactttatgaaaaggcgaaagagcaggtggaacagggatatcaggcgattgaaaaagccttttcgccggagaagatggttcagctttcagtattgttggaggaattaattgctgttggtaagaactcactgataaatacaggaaaggatattaaataa

SEQ ID NO: 7872 - DNA, 633 bp, Photorhabdus luminescens
atgaaaggcactgtcttcgccgtagccctcaaccaccagagccaggtagatttctggcatggctcatttcagcaaacaccttataacactctgcctaaaacaccagtatggttcattaaaccccgcaataccgttatcacctccggtgaagcaattccccacccggtaggtgaagaggttcaaagcggtgcaacgctggcattaataataggtaaaaccgcccgcaaagttgccattgaaaatgcggccgaatatatcgcaggttatgcattagctaatgaagtcagcctgcctgaaaccgctttctatcgtccggcaataaaagctaagtgtcgcgatggtttttgccccataggccagatgactcatcctgaatccattgatgcgttagatatcattaccgaaatcaatggtcaggaagtcgatcgctggtcaacagccgatctggtgcgttcagccacggaattagttgcagcattgagtgatttcgcaaccctcaaagagggggacgtgatcctgcttggaacgccacaccaacgcgtggctatcaaaccgggcgacaaagttgttattcgggcagcaggttttccatcactggaaaatcaggttgtgcaagtgggagaaaaagcatga

SEQ ID NO: 7873 - DNA, 906 bp, Photorhabdus luminescens
tttcgcaaccctcaaagagggggacgtgatcctgcttggaacgccacaccaacgcgtggctatcaaaccgggcgacaaagttgttattcgggcagcaggttttccatcactggaaaatcaggttgtgcaagtgggagaaaaagcatgaaacacgcaagagttcactatcaaggtcgcgatttgattgttactgtcgatgaacaggaaaatgtctgcctgcctgatggcagtaaaatcaacagcgaatccgttcaatggctgccacccgcaaacggtaccctgtttgccctcggtttaaattatgctgatcacgccactgagctggaatttaagccccccgaagaacctctggtttttatcaaggccgccaatacgctaaccggtcatcgtcaggtttccgttcgccctgatcatgtggaatatatgcattatgaagccgagctggtggttatcatcggcaaaaccgcccacaaagtgactcaagaacacgcgatggattacgttgccgggtacaccgtctgtaacgattacgcaatccgtgactatctggaaaactactatcgtcctaatctccgggtaaaaagccgcgatacactgacccccatcggtccgtggttcgtcgataaagaagatgtccccgatccgcataatctgacattaagcacttgggttaacggtgaattgcgtcaacgcggtacaaccgctgatctgatcttcaatattccatttttgatcgcttatctaagcgacttcatgacgctgcaaccgggagacatgatcgccaccggcacgccaaaaggattatccgatgtggtaccgggagatgaagttattgttgaagttgaaggtgttgggcgtctggttaaccgtattgtcagccagcaagagtatgaggagagtctgtaa

SEQ ID NO: 7874 - DNA, 1467 bp, Photorhabdus luminescens
atgaccgtcattagccattggatcaacggcaaaaacatcagcagtaaaacctattttgaaaccacaaacccggctaccggcgaagtgctggccgaagtcgcttccggcggtcaagaagaggttgatcaagccgttgccgccgcaaaggcagcctttcccaaatgggctgatctgccgatgaaagagcgtgcacgcttgatgcgccgtttgggtgaattgatcgatgagaatgtgcctgaaatcgcggcaatggaaaccaaagataccggtctgcccattcatcagacacaaaatgtcttgatccctcgcgcttctcacaatttcaacttctttgctgagatttgtcagcaaatgaacggccgtacctatcccgttgatgacaagatgctcaactacaccttggtgcaacccgtcggtgtttgtgcactgatttctccgtggaacgtgccatttatgaccgccacctggaaagttgccccctgtttagcactaggtaacaccgcagtgctgaaaatgtcagagctctccccattaaccgccaaccgtttaggcgaattggcactagaagcgggtatccctgcgggtgtgctgaatgtggttcagggatatggtgctaccgcgggtgacgcgctggtgaaacatcacgatgtacgcgcggtttcgtttaccggcggcacagcaaccggtcgtcagattatgaaaaatgccggcctgaaaaaatattcaatggagctagggggtaaatctccggttctgatcttcgaagatgcggatattgagcgcgcactggatgccgcgctgttcaccattttctctatcaatggtgaacgttgtaccgccggttcacgcattttcattcagcaaagtatctaccctgagtttattaagcgttttgctgaacgcgctaatcgtttgcgggtgggtgatccacaagatccaactacccagatcggtgcacttatcagcaagccgcattgggagaaagtctccggttacatccgtctgggaatagaggaaggtgcaacgctgctggcaggtggaccagacaaaccgattgatttaccggcacacctaaaagacggccatttcctgcgcccaacggtgctggcggatgttgataaccgtatgcgggttgctcaggaggagatcttcggccctgtcgcctgcctgctgccattcaaagatgaagcagaaggtctgcgcctggcaaatgacgtggagtacggtctggcttcttacctctggacgcaggatgtcagcaaagtcttgcggctggcccgcaatattgaagccggcatggtatttgtcaacacccagaacgtccgtgacctgcgtcaaccattcggcggcgtgaaagcctccggcaccggccgtgaaggcggtgaatacagttttgaagtgtttgctgagatgaaaaacgtctgtatctcgatgggggatcatccaatcccacgttggggggtataa

SEQ ID NO: 7875 - DNA, 879 bp, Photorhabdus luminescens
atgggtaagttagcgttagcagccaaaattacacatgtgccatccatgtatctgtctgaactaccggggaagcatcacggttgccgtcagggagctattgatggtcacaaagagatcagtcgccgttgtcgcgaaatgggtgtcgataccattattgtgtttgatacgcactggctggtgaatagtgcctatcacatcaattgtgccgaccatttctccggcatttacaccagtaatgaattaccccacttcatccgggatatgagttatgaatatgacggtaaccctgaattgggacaaatgatcgcagaagaggcacgcaatgtcggcgtgcgtgctcaggcgcatgaaatcccaagcctgaaactggagtacggcacgctggtaccgatgcgttacatgaacagtgaccgacattttaaagttatctcagtctccgcattctgcactgtccatgcttttgaagatagccgtcgtcttggagaggcaattctgacagcgattgagaaatatgatggcaccgttgcggtattcgccagcggttccctttctcaccgttttattgatgatcaacgcgccgaagagggcatgaatagctacacccgagaatttgatgaacagatggatcatcgggtggttcaactttggaaagagggcaaattcaaagagttctgcaagatgctgccggaatatgcagattattgttatggcgaaggcaatatgcacgacacggtgatgttattaggtctactcggttgggataaatatgacggtaaagtggaatttctgactgaactgtttgccagttccggcaccggacaagtcaacgccgtatttccactacctgattacatcaccgataaacccgcgatcccctga

SEQ ID NO: 7876 - DNA, 387 bp, Photorhabdus luminescens
atgccacatttttatgctgaatgtacggaaaatatccgcgaacaagccaatttgccggagttgtttgccaaagtgcatcaggcgctggcagataccggcatttttccattaggcggcatacgcagccgtgccatctggctggatacttggcaaatggccgatggtcaacatgattacgccttcgtccatatgacactaaaaatcggtgcaggacgcagccttgaaagccgtcaacaggttggtgagatactgtttcctctgatcaaacaacattttgcctcgctgatggcacaacgttaccttgccctctcttttacgatggaagaattagacccggtattgaactacaaacaaaacaacgtccacgccttgtttcgtaaggagtag

SEQ ID NO: 7877 - DNA, 1230 bp, Photorhabdus luminescens
atgccgaagccctttcatcagcatcctcctcgttggttaatccctttattaggtgcgctagtggccttcgggccgctgtcgattgatatgtacctgccagccttgccggaaatggcaaggcaattacaggcaacacaagggcagatgcaacatactttaggcgcatttttcgccggtttctgtattggcatgctgttatacggcccactgagcgaccatttagggcgcagaaaactgctgctcagcggtatcgcattattcgtcgttgccagtgcgttgtgtaccttggtgacacaagttgaacaactgattttactgcgcgcattacaggcatttggcagcggtgccgcggtggtcatgggccgagcgatcgcccgtgatatctacggcccgcaggaattaccacgcgtgctatcactcatgactttggtgaccatgatagcgccgcttatcgcgccattactgggtggcttactgttaacttatttcaattggcaggccatatttacgctattgggcctgttcggttgtatcagtggaatattattactatttttcttgccagaaacgctacccgcccagcataacggcggaaaacttatcactgcgtttaaaaattacggcaagttactgactgacggtgaagctatggcaactatcggcacattggcattcacttgtgccgccatgttcgcatttatcagtggttcccctttcgtctatatcaactattttcaggttccggcgaattactacggcttactgttcgcctgtaatgcgctaggcatgatggcagtagtgctgctcaatgtccgtttactaaaagtctacgatgtttcccgtctgttatttatccaaaccagtgctcaattactgttcggcatcttattggttatcttttatcagcaaagtctgacggtgatcgtcattttggtcgtactgtttatctcgctggttaatgccattggtactaacagcctctctttattacttcaacatcgcggtcaacttgccggcagcgccagtgcgctcgctatttccgcacaatttgctatggcggcattcgccagtgttgccgtctctttactacaagatgaaaccccttttgctatggcccttgtaatgactgtttgtgctggattgagttggttatgccagcagctagccactttctaccggcgaaaacccctcacacaagtgtctttaggagaaaaaaatcatgacaaataa

SEQ ID NO: 7878 - DNA, 1473 bp, Photorhabdus luminescens
atgacaaataatgtaaataccgaattactgcgtcaacaagcttatatcaacgggcagtgggttgatgccgacaatcaagcaacttttaaggtgactaacccagcaaatggtgaagtgattgcccacgtcagtaatatgggtgcggccgaaacagaacgcgcaattgcagccgctcaacaagccctaccagcctggagaaccatgacagccaaacaacgcagccagattctgcaacgttggtttcagttaatgatggcaaatcaaccggcactggctgaattgttgagccgggagcaagggaagtcacagacagaagcgatgggcgaaatcgcttatggtgccagcttcatcgagtggtttgcggaagagggtaaacgcacctacggtgaaaccattccaagcccattgcctggtcgccggattgtcacgatcaaacaacctattggcgttgtggcggccatcacaccgtggaacttccccaatgccatgatcacccgcaaggttggccctgctctggcagcaggctgcacggtgatcctaaaacccgcctcggaaaccccactttccgctctggctctggctgcgctagcggaacaagccggtattcccgctggcgtattcaatgtggtgaccggcatcgatgcgaaagccatcggcggagctatgacccaaagcccgattgttcgcaaactctcttttactggctcaacccgtgtcggtaagctcttgatggcacaaagtgccgacaccgtgaaaaagctatcattggaattgggtggcaatgcgccatttatcgtttttgatgatgctaatattgatgccgctgtacagggagcattgatagctaaattccgcaacagcggtcaaacctgtgtttgcgctaaccgaattttggtacaggaaaccatttatgacaccttcgccgaacgtctggcacaagccgttaatcagttgcaggttggcccggctagcgacgctaaatcacaacaaggccccctgatcaatcaagccgccgtcgataaagtcgaggaacacatcagtgacgccatttcccacggtgcacgcatattggccgggggtaaaccacacgctctgggcggtctgttcttcgaacctaccgtactggctgatgtcaataaatccatgcttatctcccaagaagaaacattcggccctattgctcccctgttcaaattccgtgatgaagcagaagccatccatctggcaaatgagactgaatttggtctagccgcttatttttattcccgcgatatcggccggatctaccgtgtggcagaagcgctggaaagcggtatggtcgggatcaatgaaggtttaatctctaatgaagccgccccattcggcggcattaaacaatcgggcctgggacgtgaaggttctcgttacggtatcgaagattatctggaagtgaaatatctctgctttggtggcatagaagacacaggagtttaa

SEQ ID NO: 7879 - DNA, 804 bp, Photorhabdus luminescens
atgttacagaaagaagtcgtatcacaggttgcacatcgtctgcatcaggcagaaaaaagccgtgaacaaatacgccagatctcattggattaccctgaaatcaccatcgatgatgcttatgctattcagcgtcactgggtggagttgaaaattgccgaaggtcgggtactcaaaggccataaaattggcctgacctcaaaagccatgcaagccagctcacaaatcagtgagccagattatggcgctttgctggacgatatgtttttccctgatggcagtgatattccatgtgatcgctttattgtgccccgtattgaggtcgagctagcattcattctggcaaaacctttgtgtggcccgaactgcacactgtttgatgtttacaacgcgaccgattacatcattccagcgttggaattgatcgacgcccgttgccataacatcgatccggaaactaagcgcccacgcaaagtgttcgatacgatttctgacaatgccgccaacggcggcgtcattatgggcggccgtccgattaagcccgatcagtttgatctgcgctggatcagcgccctgctctatcgcaatggcgtgattgaagaatccggtgtcgcggcggcggtacttaatcatccagctaacggtgtcgcatggttggcaaacaaactggccccacatggtgttcagcttgaggcaggacaaatcattctcagcggctcttttacccgcccggttccagccaataaaggggataccttccatgtggattatggccccctcggtgctatcagttgccgttttgtttaa

SEQ ID NO: 7880 - DNA, 807 bp, Photorhabdus luminescens
atggatcggttaaccaataaatttaaacaggcattaaaagcaggccagccacaaatcggtctatggttggggctttgtaacccctacagtgctgaattagtggccggagccggtttcgactggctacttattgatggcgaacatgcaccgaacgatattcagacgattctaagccagttgcaagctatcgccccttatccaagtcatcccattgtgcgtccgccctggaatgatctggtcatcattaaacaactactggatatcggtgcccaaacgttattaatccccatgatacaaaacgccgaacaggcttacgaagcggttcgggcaacccgttatccaccggcgggtatccgtggtgtgggtagcgctctggcaagagcttcccactggaacagaattcctgattatctgcatcgtgccaacgatgaaatctgcgttctggttcaggtagaaacccgtgaagcactccgtaacctgccggagatcctcaaagtagacggtgtggatggtgcctttatcggtccggcggatctcagttccgatatgggctttaccaataatccgcaacatcctgaagtgaaagacgcaattgagcaagccatcgctcaaatcaaagcggcgggtaaagcgccgggcattctgatgtccgcacccaatgttgccgagcactacctgaaactcggtgctctattcgttgctgtgggtattgatacaactttattggctcggacagcggaagcgctggcagcacgatttatcgcggataaagagccgccggtagcacctttatccggtgtttattaa

SEQ ID NO: 7881 - DNA, 1377 bp, Photorhabdus luminescens
atgagcgattcatcaactgttgtgcaacagccggatcttccggttggtcaacataaaccgctgacggcacaacagcaatccgtcattaataagctattccgtcgcctgattattttcctgttcgtcttatttgtattttcgtttctggatcgaattaatatcgggtttgccggcctgacaatgggtaaagatcttggactgaacgcaaccatgttcggtctggcggcaacgctgttctatgtcacttatgtcattttcggtattcctagcaacattatgctaagcattgtcggagcgcgacgctggatagccacgattatggtgctctgggggatctcctccactgccaccatgttcgctaccggaccaaccagtctgtatatcttgcggatgctggtcggtatcgccgaagcaggtttcgtgccgggcatcctgttatatctgacttattggttcccggcttactatcgcgcccgtgccaacgcactgtttatggtggcaatgccggtgacgatggcgtttggttctctggcttccggttatattctggaaatggatggcctcatgaaccttcacggctggcaatggttattcctgctggaaggttttccttcggtactactgggaattgtcgtttggttctatcttgatgattcacccaaacgcgctaactggctgacagatgaggacaaaaaatgcttacaagagatgatggataacgaccagcccgctctggttcaaccagcaagctcatcaactcatcaggcaatgcaaaaacccagtatatggcgtgaaattttcgcgccgatcatgctgatgtataccctggcttacttctgtttaaccaataccttgagtgcgattaatatctggacgccacagattgtgcaaagcttcaatcagggcagcagtaacatcatgatcggtatcctgaccgctattcctcagttttgtaccatcatcggcatgatttactggagtcgccgttcagaccggttacaagaacgtaaaatgcatacagctctaccctatctgttcgccgccgtgggctggatattgacctcattgaccaaccacagtgtcattcagctcattgggattattatggcttcaaccggttcatttaccgcaatggcggtcttctggacaacgccggatcaagctatcagtttacgtgcaagagcgatcggcattgcggttattagcgctacaggcaacataggttcagcactcagcccgttattaatcggctggctgaaagatcagacaggaagctttaataccgggctctatttcgttgccggattgctggtcgttggcgcagccattatctggttgatcccaatgaaacacgccagacagagaacagcgccgtaa

SEQ ID NO: 7882 - DNA, 891 bp, Photorhabdus luminescens
atgactgagcctatcattgccaatattgatatcagcaaggattatgatgaaacccaaggcactgatgatgtgcactatcaaacctttggtcggatggcagcattttttggtcgtaatatgcaagctcatcgtcacgatggtttcttccaacttcattttttgatcaccggccatattgaattacagttagatgctcaacactattctgtacaggcaccgctgtttatcctgacaccgccctccgttcctcacgcttttttcactcaagatgacagtgacggatatgtccttaccgtacggcaagatctgatattaccgttattggaatcactctatccagctaataaagatattcttgatattccggctatttgcttatccgtcgtcgataaaccggaagaattggccgcttttaatcactattgggcgttaatcgcccgcgaatcatcgaataactttattggtcgagagcaatcgctgacatttttagcacaagccatatttacccagttattgcgcaatattcctcttgatgatcacccggttaatggcgtgcgaggagaaattaaattgtttcagcgctttaatcaattaatagacaatcattatcatcatcatctttccgtaccggaatatgctcataagttagatattacagaatcgcggttaaaagatatgtgccgtcggtttaccaatcgtccaccaaaacgactcatcttcgatcgtcaactgcgtgaagccaaacggctattattattcagtgattgcccagtatttgaagttgcttatcagcttggatttaaagatcccgcctattttgcccgcttctttaatcgattagttggctgctcacctagttattggcgagaaagaaatattcacgaaaaataa

SEQ ID NO: 7883 - DNA, 312 bp, Photorhabdus luminescens
atgagcaaatcagctatagttttaaatatcacttatgctatcttttgtgcgttatttatatatatgatgtcatacttagaagaagagcattatatcggtggtcaggatatagataatctctgtactgtttacagagagctgatagatgataatcgtgatgtatttgctccaacatgtttactgattatgtcccccttaatttatgcaaccgtgaagaaaagattcaaatcactttctcttaatgtcattacatttgctttgctaggatactggatgtggcgattttttatcagattaatcgtatgcgtttag

SEQ ID NO: 7884 - DNA, 321 bp, Photorhabdus luminescens
atgaccggacaatatccatttctagatattttaatgcatgcttactttaatcaggacttcgatataatatcaggtcccgagcttgatgatgttatcaatgattttcttaatgacgcatctcagggaatgagaaaagggttaatagaagaaatcaacgaccttattgactcttctgaagatgtagagagcacatttgattatcattaccatgatgctgacgttctccccgaagggtggggtatgacagcacttgagtttttaacgcatgtgtcaaacaagtcacaagattatttaaacgagcatactgaacaagatgagtaa

SEQ ID NO: 7885 - DNA, 324 bp, Photorhabdus luminescens
atggaaataagagaacaattgcagtacatagataagctgacaaatgctattgataggaatgattttgaatcatttcaaaaaatattcaatgagctgcaaggaaattatattaatattgcaccgccaatgttattggaaactatttccgccgtattagaacatctgaatcagtcatcaaaaataatgcaaagttatacccgtcatctttcaagttgcttctttgttggctgcactcactcaccccggtcacatagttatctatgctcccggggattcgctcccttgccgccgcgatgcatcttgaaatccatagggtatatataa

SEQ ID NO: 7886 - DNA, 747 bp, Photorhabdus luminescens
atgcaaaaaattacattaattaccggcggatcacgtggcattggtcgcgcaacagctttttatctggcaaagaaaggacaccacatttgcattggctaccacaccaatcaagagcaagctcaggaagtcatagaaatcatccataatatcggcggtaaagctatcgccattcaggtcgatgtcgctgatgaaaaacaagttgtagaactcttccaaagaattgataccgaactcggatgcatcacaggtttggtaaataacgccggaatacttaaaccacaagcatcgattgaacaattaaccgctcatcgcttgcatgatatttttgccaccaatgtcataggcagttttctctgtgcacgggaagcggttaaaagaatgtccttccggcatggtggtcacggtggatcaattgtcaatgtttcatccgcagcatctcgactgggatcaccgcacgaatatatagattatgccgcatcaaaaggagcgatcgatactttgactattggcctgtctctggaagtggcagatcagggaattcgggtcaatgccgttcgtcctggattcatctataccgatatgcacgctgatggcggcgaaccaaatcgagttgatcgggtgaaaaattccttaccaatgaaacgcggtggacaaccgaaagaagtggcacaggctatcgtctggttgctgtcggatgaagcctcatatgtaaccggaaattttattgacctcgccggagggaaataa

SEQ ID NO: 7887 - DNA, 126 bp, Photorhabdus luminescens
atgggctggcatattgataacaggactcatcgctattttctggataaagaatatgcccaagtgcccattcggttgaacgcaggccaaactgcaacaaccaaaatcctcaatacaaccaagaggtaa

SEQ ID NO: 7888 - DNA, 2880 bp, Photorhabdus luminescens
atgaaaaacattgatccaaaactttatcaacatacgcccacgattagcgtctacgataaccgtggcctgaccattcgtaacatcgactttcaccgctctgtcgcgggaggggatacggatactcgtattacccgccaccaatatgatgtccgaggacacttgagtcaaagcattgacccacgtctatatgacgccaaacagctcgacaactcaataaatcccaattttctctggcaacacaatctcaccggcgatactttgcgaacagaaagtgccgatgccggccgtaccgtcgcccttaatgatattgaaggccgtcaagtattaattgtaaccgcaaccaatgccattcagacccgacaatatgaagctaacaccctgcccggccgtctattgtccgtaagtgaacaagctgccggagaaaagatacccctcgttactgagcattttatttgggcaggtaatacacaaacggagaaagatcataaccttgccggccagtacgtacgccactacgacacagcaggagtgacgcaactgaaaagcctgtcattgacagaaaatatcttatctcaatctcgtcagttattggccgatggtcagcaagcagactggacaggtaacaatgaccccctctggcagaccaaactcagcagcgaaatttatacaacacaaagcacctttgatgctaccggcgctttgctaacccaaaccgatgcaaaaagcaacatacagcgtctggcttacaatgtagcaggtcagttaaaaggtagctggctgacattgaaaaaccaaagtgagcaagtcattatcaaatccctgacctattccgccgcaggccagaaactgcgtgaagaacacggtaatggcgctatcactgaataccgctatgaaccggaaaccctacgattgatcggtaccaccactcgccgtcaatcagataacaaggtgttacaagatctacgctatgaacatgatccggtcgggaacatcatcagtattcgtaatgatgcagaagccactcgcttctggcgcaatcagaaagtggtgccggagaatgtctatacttacgattccctgtatcagcttattagtgcaacaggacgagagatggctaatatcggccagcaaagcaaccagcgtccttctccgatccctcttcctactgataacaacacatataccaactatacccgcacttatgattacgaccgtggtggcaatctggctcaaattcggcacagttcacccgctagccaaaataactacaccacggatatcacagtctcgaatcgcagtaaccacgcagtgctgaattcactgacgactgatccgacacaggtagatacattgttcgatgctggcggccatcagaaaaaactactaccgggacaagatctgagctggaatgcacggggggaactgcaacaagtaacgccggtaaaccgggagaataccagtgatcgagaatggtatcgctacggcaacgacggcatgagacagttaaaagtcaatgaacagcagaccggtaacagcacacagcaacaacgagtgacttatcttcccggattagaactacgtacaacgcaaaatggcacaactacatcagaagatctgcatgttattaccgtaggtgccgccggtcacgcccaagtacgggttctgcactgggcaactacaccaccagccggtatcagcaataatcagctccgttatagctatgataatttgattggttccagtcaacttgaactggataacgaaggacaaattatcagtcaggaagagtattatccatttggcggtacagcgctgtgggcggcaagaaaccaaacagaagccagctataaaacccttcattactcaagcaaagagcgagatgctaccggactctactactacggctatcgctattatcagccgtgggtaggcaggtggttaagcgccgatccggcgggaactgtggatggtctgaatctgtaccggatggtgagaaataatccaattactttatatgataatgatggtttggcgcctccacgagtgagaccccgtcatcctgattcagagggggaatcagaaagcgaagacagtagcattggttatcgtgccttgagatctgatgagcatccctctatacatggccttcgtcctccagaaggagcaaatctaaatatttctgcttatgctcatgttagagcagggacaagtgcaaaggtcaaatccagttggatctcctatagtcgttctttgaaagttgcagcaagctgggcagcctcaagtggtagcggtagagttgttaaattccgaataaagaaaaataaccgatcttttgatctaacaaataaaagcgatcagattagaatgcttcaggaacaagctacttcatctcatagcgaaataaatcttgatcctaataaacacccagcaattaactttgctaaaggatctcaggagggacttgtttacggaaaagttgataaatcacaaattatcgctgaatatcaggctgaaaaaactacagaacctgaatattctgaatataagagcttgaaagaaaaaaatactcctgatgatacgtggaagttaataaaatcgcggacaacggttatgaaaaagattgatggagtaaaagttaaaaccacaccaaaacctgtattaataacagagacttacaacgagaatagttttttaaatcaagccagaggagaatgggatgaattacagaaaaaagcatcaccgttattaataggacatttagaaagtgaaggattatcaccatacgaaatggattatatttcaaataaatctgaatataaaaaatatcgtgaagatgttcgtaatagtattgctaaatatagaaacaacctacgtaactaa

SEQ ID NO: 7889 - DNA, 1563 bp, Photorhabdus luminescens
atgaaaccagaagattttcgcgccgacaaaaaacgtcctttcaccggtgaagagtacttgaaaagccttcaggatggccgcgaaatttacatttatggcgaacgcgtaaaagatgtcactacacatcccgcattccgcaattctgctgcttcaattggtcagttgtacgatgccctgcacgccccggaaacccatgataccctgtgctggaataccgataccggcagtggcgggtatactcacaaattcttccgctttgctaccagtgcggatgatctgcgccaacaacgtgatgcgattgctgagtggtcacgtcaaacctatggctggatgggccgtacacctgactataaagcggccttcggtaacgcactcggcgcattccctgaatattatggccagttcgctgataacgcccgtgtctggtacaaacgtattcaggaaacaggcgtttactttaaccatgccattatcaatccccccatcgatcgccataaacccatcgatcagacacgcgatgtctatattaagctagaaaaagagactgatgccggtatcatcgtcagcggcgcaaaagtggtagcaactaactcagcactgactcactataactttattggttttggctccgcacaaataatgggagataaccctgatttcgctttgatgtttgtcacgccaatggatgcggaaggcatgaaactgatctcccgcggctcctatgaattggtagcaggtgtaacaggttccccattcgattatcccttatccagccgtttcgatgaaaacgatgcgattctggtgatggataaggtccttattccttgggaaaatgtcctgatttaccgtgattttgaccgctcacgcaactgggcagttcaagcaggtttcgccaatctgttcccattacaggcttgtgtacgactagcagtgaaactggattttattactgccctgctacaaaggagcctggaatgtaccggcgtgatagaattccgtggtgttcaggctgacctgggtgaagtggttgcctggcgtaacctgttttggtcactgagtgatgcgatgtgggcagaagccaaaccgtggaaaggcggcgcttatatgccggatacccaagcaatacaaacttatcgcgttatggcaccaacggcttacactaaaattaagaatattattgaaagtaacgtcaccagcggcctaatttatctaccatctagtgtacgtgatatgaataatccagaaattgataaatatctggcccggtatgttcggggttccaacggaatcgatcacgttgagcgcattaagattttaaaactgatgtgggatgccattggtagtgaattcggtggccgtcacgagttgtacgaaatcaactacgccggaagtcaggatgaaattcgtatgcaatgtctgcgtcatgctcatggctctggcaatatgaaaaaaatgatggatatggttgatcgctgccttgctgattatgatcagcatggctggcggaggccacatttatacaacaataacgatattaaccagttagataagctgctgaaataa

SEQ ID NO: 7890 - DNA, 519 bp, Photorhabdus luminescens
atgtccttagaaaatgaacatcgcctgcgtttcagagatgcgatggcgagtctgtcagcagcggtgaatatcgtcaccaccgatggtcatggcggatgctgcggcatcacggccaccgcagtatgctcaatcaccgatacgccacccacgctgatggtatgcattaaccgtagcagtgctatgaataccgtttttcaggaaaatggccgcctgtgtgtcaatattttaaaccacgaacaagaattgatggcacgtcactttgccggtatgaccggagtcagcatggaagagcgctttcgctggaatatctggcagaaaggaatattaggtcaaccggtgttaaccggcaccctcgccagccttgaaggtgaaattgaacaggttcaagaagtgggaacgcataacgtgtatctggttcagattaaacatatcacggtgagcgaacaaggccacggcctcatctattttaagcggaatttccgtccagttatgttggaaattgaaaccgctacagtttaa

SEQ ID NO: 7891 - DNA, 1470 bp, Photorhabdus luminescens
atgaataaacccgcatccatcggtttattacaacaacccaagccgttctttatgattttcttcgtcgagctttgggagcgattcggctactacggtgtacaaggcgttcttgctgtctattttgtacagaaattgggattttcccaagaacaagcgtttattaccttcggtgcatttgccgcgctggtttatggtttgatctcgattggcggttatgtaggtgaccacttactaggaactaaacgaaccattgtgttgggtgccattgtcctggcaattggctattttatgactggactttctatcctacaccctgatttaattttctacgcattgggaacgatcgccgttggtaacggcctgttcaaagccaacccggccagcctgctgtctaaatgctatccccccaaagatcctcgtctggatggggcttttacgctgttttacatgtcaatcaacctcggctcgctgttctcactcgctctcgcgcctgttattgcggaaaaatttagttatgccgttacctacaatatttgtggtattgggctgattattgctttgttagtctatattttatgtcgcaatacagtacgtaatattggttctgaacccgaccatcaaccaatcaactataaaaacctattcctggtattagcaggaagtgttgtgatggtttacgtctgtgcatggctgatgcacaacgtgaaaatagccaatattgtgctgattaccctatctgctatcgtggtgtttatcttcttccgtgaagcattaaaacaggataaagctagccgtaacaaaatgtttgtggctttcattttgatgcttcaagctattgtgttcttcatcctgtatgcacagatgccaacttctctcaatttctttgccatccataacgttcaccaccagttgcttggttttgacattaacccggtcagtttccaagcgcttaacccattctggatcgtcgttgccagcccgatactcgccgccttatacactcactggggcgctaaaggtaaagacctcacaatgccagctaagtttgctgttggtatgttcctgtgctctttaggtttcctcactgccgccgctgccggtttgtggtttgcagatgaacaaggtttgacctccccttggtttattgttctggtttatctgttccaaggtgtcggtgaattgatgatcagtgcattgggcctggcaatgattgcagcccttgttcctcagtacctgatgggttttattctgggaatgtggtatttaactcaagcaacttcctccttactcggcggctatgtcgcagcccttaccgccgcaccgaaagggattactgacccattgcaaacattgccaatctataccagcgtattcggcaaaattgggattgctaccttcattgtcgcgatcatcatggcggtcaccgtgccgtggctaaacagtatgatgaatgaaaaacaaaaaatatga

SEQ ID NO: 7892 - DNA, 720 bp, Photorhabdus luminescens
atgaatactaactggatgaatgaagaggcttcaaatttattcgatcaatatgatgattatttggaggacagacttgggtacacgccgttgattgagaaccttaaggagagcttggggcaaaacgtatcggttcttgattacggttgtggtggtgggaaagtgtcacgtcggctaattgctggcggcataaagacggtaacgggagtagatatttcacaaaccatggtggacaaagccgccagcaatatcaatcgtggcaatagttcttatcatcaaattacaactgatgtccttaacttcaatgataatactttcgacgcagctatatgctgttacgtgttcgtcactaacagtgaaaagtctgatcttttgaaaatcgctaaggaagttcacaggacattaaaacctggtggtattttttatgtattggatactaatccagattcttgtgggattaaattcaaatcttttatgagtggcgatctaaataaaaaatacaatgatggagaaatcaagccagtgtatttagagctgtcaaatggaactatttttaagatttcagatacgcattggcataaagatacatattaccaaatcttgaacgaggccgggttcaaaactattgagctttttgaacacaatgacgcggatgctttagaggatactggagatctacgatgttacccaccttttgccatgttcaaagcgactaaattctag

SEQ ID NO: 7893 - DNA, 6648 bp, Photorhabdus luminescens
atgagcacagtcacgccagaacgccctgaaatgacacaacaggaacaaaaagctaaccaactgcatgaagcgagtatcctcaaacgtgctaatcctcaattacaaaatgcggtacatcttgctttaaccacacctcatgccgatcaacaaggttataacagtaaatttggtggccgtgccagccagtatgtcgcccccgacgcagttgcttccatgttctctcccgctgcttatctgactgaactttaccgtcaggcacgggatttacacgcagaaagctccatttatcatctggataaacgccgcccggatctaaaatcactgatactcagtcagcaaaatatggatgatgaaatttctacactttctctgtccaataaagtgttgctggaagggattcagacgcaggccggacagcaaggccatactcatgtgatgaaagcgctatcaacctttcactcttcgggctctctgccatatcacgatgcttacgaaaatgtacgtaaggttattcagttacaggctccggtatttgagcaattcaatacttccccagaaacaaccatcgctaaactgaaataccaaacttccctattggggattaatatttccatctctccagaactatttaatatcctaacggataaaattacagatgacgaagaggaaattaaaagactctataaaaaaaactttgacgatattcagccctctttaatggcaacgttagaatatctaaaaatctattataacttaactgatgaagaaattaatcagtctattaatcaacgaaatattgaacgaatacataatgaaatgaattcaaaatatggcagccaacaacccgctcaatattatctcctcaagcttaataagattattcttgtgtcacgagccacagacatggcaccagaaatccttaaaaaaattgcctctagtagaacttatcacgcaatatcccaacctatggaagtcatcctagaatataaccctactatatacgatgagctgaatgacataccagacatcaatacagagatattaaagaaaatatttcgcgttaaatactatatgcaacgttacaatattgatgctgaaactgcattgatactgtgcaatgcaccaatttcagaagactactatagccctagccccaatcaatttaatcgtttatttaataccccaccattaaatagccgggatttctacgcttcagatgaagagattgatttaagccaaaacagtgctgatagccggcaaaaagaggtacttaaacgtgcttttaatgtcgatgatatatcactttatcaattactcaagatgactcatcgtgacaatggaaatggaaaaataatcaataacttaactaatatttcttatctctatctgaccaaattactagcagatgtccatcaattaactgttaacgagctgaatttactgctaattgccataggtgaaggatcaaccagtttatctgggatcagtgatgataatctgtctgttctgattgacaaactttataacgttacccagtggttgcatgcacagaaatggaataagtgcctgttgtttatgatgaccaccaccgactataacaaaaccctgacgccagaaatccaaaatctgctagatgctgtctacaatggtttgcaagaccttaacagcgaaaacgaggcaaatcttctgttgaagatctctccctatatcgccgccgctctgcaattaccatctgaaaatagcgcttactatatgctcacttgggcagatcaattaaaacccggctctggtgcaatgacagcaaaaaaattctggaaatggttgcaatctcaacacaccccagaacaatcaactactgagacagaagaacaagccgtccaatattgtcaatgcctggcacaactagcgctgatttatcattccatcggccttagcgaaagtaccttacgtctgtttgtcacaaaaccacaacactttggtcttaccgcaggagcaacgtcaacacacaatgcattatcactgataaaactgacgcgttttgctgactgggttaactctctgggtgaaaaagcctcttctgttctgaccgaatttgaaaagggaacattagagaccaaacagttggctgatgccatgagtcttgataaaaatctactggaacaagccagtactcatgtacaagttaatttctccaactgggcatctctcgacaccatccaacaatgggtgaatatcgcgcgtcaattaaatatctctccacaagatgtttctacattggcgcaagtattagacatagaaccttccactgactatagccaatgggaaaaaatagcggccatattaaccgccgggctcgatacccaacaggccaacaccctgcacacctttctggatgaatctcgcagtactgcattaagcgagtactacattcataaggtcgctaacgcagaggcaaaaattaaaaaccgtgatgatctgtaccagtatttattgattgataatcaagtttccgccgccatcaaaaccaccccaattgcggaagctatcgccagcatccaactgtatattagccgggcactgaaaaacatggagggaaacgcagtttcgcaggttgccaaccgaccattctttaccgattgggataaatacaataaacgctacagcacttgggccagcattgctaagctcatttactaccctgagaattacatcgatccgacaatatgtatcgggcgaacaaaaatgatggatacgttgctgcaatccatcagccagagtcaattaaataccgatacggtagaagacgcctttatgtcttatctgacgtcgttcgaacaggtggctaatctggaaattgtcagtgcctatcatgacgacatcaatagcaatcagggattaacctactttatcggacacaataaaacagaagtgaatcaatattattggcgtagcgtggatcacaataaattcaatgacggtaagtttcctgctaacgcctggagtgagtggtacaaaattgactgtccaataaatccctataaagacactatccgcccggtaattttccaatctcgcctgtatctgatctggctggaacaaaagaaaattgctaaacagacagataataatcaaaccatcgaatgttattattatgaactaaaactagcacatatccgttatgactggacctggaatacaccaataaccttagaagtacatgacaaaatatccgctgttttgaaaacatcagatttattggaccaattgcaagagtaccaaaagcaattagaagataaactgaaagaacagcaggaagaagtagagcgactaaaaccaatcgcaccactaaatccagtaagtccaccacaacctatagcgccactaaaatcattacaactattgccaccgctaatagaacaacggaaaaaacaactggcgcaatgggagagagagttgaatgaacagggacaatcaacgacagagataagcgtaagggaaaaacagctggaattgaaccaacaggatattcagaaggagttggatcgattagaatcagagctaataagaaaacaaccagggttctactgtgcaaatcaccaagacaataagttgttagtcatattttatcaaaaacaggatgcactggataaatacacaacagatgcgcccataaaagggctatatatctcctcaaatatattacccgaagatatcaatctcggagattacatacctaacattcgtaaccagtttgataccgatattggcgtcaacggtattattaaggtgaataaccgatatgaagtctcttcatcaatagagataagtgaccataatatcctgaccctttaccacgacacaaacggagcgcagtatatgcagtggggagcctatcgtatccgccttaataccctgtttgcccgtaaattagtcagtcgcgccatgtctgggatcgatactattttaagtatggaaactcagaaactatccgaaccccaattaaaggcagggtttttcgctaattttactcttcctaaatacgaccaaaacatacacggcaatgaacgctggtttaaaattcacataggtaatattaatggcgataattcaatgaggttatattaccaaggaacactaacggataatgaaaccagcattaccctatttgtcccctataaaaaagacctctatactatggaaggcgtcagaataggtgtgcaatacaagcaaaaattttatcaagattggtgggaaccagctttcttctatttcaacgaaactcagcaaaaatttgtactcattaatgatactgctcatgactcagctatgacgcatggaggcgaacgatcaccagtcaaaaaataccaaggcttttctaatgtttctgttctatccgagcacacggaaccaatggatttcaacggagctaatagcctctatttttgggaactattctactatgccccgatgctgattgctcaacgtttactacacgagcaaaacttcgatgaagccaaccgttggctgaaatatgtctggaacccatccggttatattgaacatggtcaaattcagcactaccgctggaatgtccgcccattattagaagatacccgttggaacgacgatccactgaattccgtcgatcctgatgctatcgcgcaatacgatccaatgcactataaagtcgttacttttatgcgcacccttgatctgttgctggatcgtggagattacgcctatcgtcagttagagcgggacacactcaacgaagccaagatgtggtatatgcaagcactgcatctgttaggcgataaacctcatctatcgttcagttcagagtggtgtaaaccgagtttaggtgatgctgccagaacggaaaaacaggaggaacacgcccaggcaatgaccgccttgcgacaaggtgatattagccgtcacagcaacccgacagatcttttcttgccacaggtcaacgaagtgatgcaaaactattggcagaaactggaacaacggctgtataacctgcgcaacaacctctctatcgacggtcaaccgctacatctttctatttatgctactccagcagatccaaaagcgttgcttagcgctactgttgccagcgcacaaggcggaaacaagttaccgacaccatttatgtctctgtggcgtttcccacagatgctggaaaacgcgcgcggtatggtgagtcagctaacacagttcggttccacgctacaaaatattatcgaacgtcaggatgcggaagccttaaacacgctattgcagaatcaagccgcagaactgatattgaccaatctcagcatacaagacaaaaccatcgaagagttggatgcggaaaaaatcgtattggaaaaatccaaagccggggcgcaatcacgctttgacagctacaaaaagctatacgatgaaaatatcaatgcgggtgaaaaccgagtgatggcattgcatgcctccattgctggcctcagcaccgccctgcaagcatcgcgtctggccggtgctgcccttgatctggcacccaacatttttggtttcgctgatggcggcagccgttggggggctattgccgaagcgacaggtaatgtcatggaattctctgccagtgtgatgaacaccgaagcggataaaatcagccagtccgaagcctatcgccgccgccatcaggagtgggaaatccagcgtaacaatgccgaagcagagataaaacaaatcgacgcccaacttcaatcgctggcaatacgccgtgaagcggcagtgttgcagaaaaccagcctaaaaacccagcaggaacaaactcaggcacaattgactttcctgcaacgtaaattcagtaatcaaacgttgtaccactggctacgtggtcggctagcggctatttatttccaattttacgatttggccgtagctcgttgtctaatggccgaaatggcttatcgttgggaaactaatgataccgccgcaaactttatcaaacccggtgcctggcaagggacacatgctggtctactcgctggtgaaaccttgatgctgaatctggcacaaatggaagatgcctatttgaggtgggatcaacgcgctctggaagtagaacggaccatttcactgacgcaattctatggagcactgccagaaaaatcgtttaatttggcaacacgtatttctgccctgctagcaggtggtacaactgaccccgttgaccatccccctgttacattagaaaacgaccaactcagtgccaaaatctcactgtcagatctgtcactgcatagtgactacccagaaggcaacggcgtaggcaacattcgacgtattaaacagatcagtgtcaccctgccagccctgttaggaccataccaagatgtacaagccattttgtcctacggaggaagtgaaaccggattagctgaaagctgtaaatcactggcgatttctcatggaattaatgatagtggtcaattccagttggattttaacaatggtaagttgctgccatttgaagggatagcgattaacgatactggcacattaacactcaatttcccgaatgcgactagcaaacagcaagccatgttgcaggcattgagcgatattattctgcatattcgctacaccatccgccagtaa

SEQ ID NO: 7894 - DNA, 7335 bp, Photorhabdus luminescens
atgaacacactcaagcccgaatatcaacaagcgttaggagcagattttaatctaaccgatatttgccatctctcttttgacgaacttcgcaaaaaagtgaaggacaaactctcatggtcacagacccagagcttatatcttgaagcacagcagatgcaaaaggataacctgctgcatgaagcccgtattctgaaacgcgcaaaccctcaattacaaagtgcggtacatcttgccctgacaactcctcatgccgaccagcaaggttacaatagccgatttggcaaccgcgccagtcagtatgcagcccctggcgcaatttcctccatgttttctcctgcggcttatctgactgaactttatcgtcaggcacgaaatttacatgctgaaggttccatttatcatctggatacacgtcgcccagatctaaaatcattggtactcagccagaaaaatatggatacggagatttccacactttctctgtctaataacatgttactgaacagtattaagactcagactaatttggacagccacgctgaagtgatggaaaagttatcaaccttccgcccttctggctcaatgccatatcacgatgcttatgaaagtgtacgtaagattattcaattacaggctccagtatttgagcaattaagtgtattcccagaaacaacactctctcaattgaagtatcaagcttccctgttggatattaatgcttccgtttcaccagagttatttactattctgacaaaagagattaccgggtctactactgaaactctttataataataattttggtgatattaaaccttctctgacaaaaaaactggaatatctgaaaagttattacaatctgagtgatgaagagtttagcgacttccttaaaataagaactatacttctcccagaagaagaaataacaattactgagcctgcatcgcatactactaatacacaacaaactatcgaaaagactgattatcgtgctctgttgaaaattaataaatttatttatctattcaaagctataaacttatcaccaacggtattaagtggaatcctccgcagtatcagtccagaattcaacatcaatgaagaagtgttaaaaaaaatcttctgtattaaatactatatgcaacgctacggtattgatgctgaaactgcattaatactgtgcaaagcaaccatttcacaacatagcaatgacggtcatccaagccagtttgatcgtttatttaattccccaaaactaaatggtcagggtttttccaccaatggcactccagagattaatttaaacctcagcaataccaatgacagaaacaaaactgtacttaaacttgcttttaacctcgatgatatttcattaaatcgactactaaaggttaccaatccggtcaatactaccgaaatgataactaatgatatagagaatctttctcatctctatcggacaaaattactggcagatatccatcagttaactattgatgagttaagtttactactaattaccataggtgaagaaaaaaccaacttatctaccatcaataatactgatctggtcaccctgattgataaactctatgccgtcactcgctggctacgtacacagaagtggagtgtctatcagttatttgtgatgaccaccaccaactatgacaaaaccctgacaccagaaatccaaaacttactggatactgtatataacggtctgcaaaactttgacaagaaaaaggcaaaaaccaaagaagagctattaaaagccatatctccttatatcgccgctgctttacaattaccatctgaacatgcggcatatttcatactcacctgggcagataaactagaacccggtacaggaaacatgacagcggaaaaattatggaactggttgcgaataaatcccgttaccgctcaaccagaattccaaaaacaagctgaactcgtggtccagtattgccagtgtctagcacaactagcgctgatttaccgttccatcggccttaacgaaaataccttacgtctgtttgtgacaaagccacaacactttgttattaaaaccaaaaaaaccgaaacaattgaggcaactgaaacaaccgagacaataccagcacatgatgtatcaacactcatgtcactaacgcgttttgctgactgggttaactcactcggtaaaaacgcctcttctgtactgaccgaatttgaaaagaaaacattaacaacagagctattggctaaggccatgaatctcgatgaaaagctgctgtcacaagctaagacccaggcagaaactgatttatccaactggtcatctatcgacagcctattacagtggattaacatctcacatcaattgaacatctctccacaaggtgtttcagcactaacgcaaatattaaatacagaatcctcctctgactatacccaatgggaaaacgtcgctgcgatattaacctccgggctgaacacccaaaaagccaataccctacatgcatttctagatgagtctcgcagtgctgcgttaagtacatactctatttattctcataaccaaaaagatcgagaagaaagaaaacatacggtaattaaagaccgtgatgatctatatcaatacctactaatcgataaccaagtttcctcagctatcaaaaccacggagattgcggaagctatcgccagtatccaactgtatattaaccgcgcattgaaaaatatggaggaagataccgacacaagtgtcaccagccgttcattcttcaccaactgggataaatacaacaaacgctacagcacctgggccagcattgctaagctcctttactacccggaaaattacattgagccaacattgcggatcggccagacaaaaatgatggatgcgctactgcaatccattagccagagtcaattgaataccgataccgtagaagatgcctttaaatcttatctaacgtcattcgaacaggtggctaatttagaagtcatcagcgcctatcatgacaacattaataatgaccaaggattaacctattttatcggacgcagtaaaacagaagtgaatcaatattattggcgcagtgtagatcacaataaattcagcgaaggtaaattccccgctaatgcctggagtgagtggcacaaaattgactgcccaattaatccctacgaagatactatccgcccggtaattttccaatcccgcctgtatattacctggctggaacaaaagaaggtaactcatcgatcagaaggagaaactctaccaaaagtagaagctctatcagaaataaaaactgacaaacaaggaagcaaaaccaccacaagctattattatgaactaaaattggcacatattcgttatgacgctacctggaatacaccaattacctttgatgtagataaaaaaatatctgatctcaatctagaagcgaataaagtgttagggctctattgtgcgagttatcaaggcaaagataagttattggtgatgttttaccaaaaaggtcctgaacaggcgagttatataaatgctcccatgcaagggttatatatctcttccaatatgtcacaagaagagatgaatcctaatgattataaacttaatattcataaacagcttgatacccatactgcaaccaatagtgttataagagtcaataaccgctatgcagaaagctacgaaatcccttcatcggtaaacaataataatggttatgattggggagaaggctatctgagtatggtatacggcgggagtattctaattacccgcaaccaaagcgataattcaaaaatccaaatctcaccaaagttaagaattattcataatggatatgaaggtcgacaacgtaatcagtgcaatctgatgaaaaaatatggcaaaccaaaagataaatttattatttataccacgctaggcattaaccaaaataatttgtcaaataaaaaattcatctaccctgtttatcaatatgaaggaaatgccagccagcttagtcaaggaagacttctattttatcgggatagtgccactaattttgtaagagcctggctccctaaccttccctctggctctcaagaaatgtccataaccaccggcggtaacattagtggtaattatggttatattgataataaacatagtaacaacaatccattcaaagaatatttctacatggatgaccacggcggtattgacactgatgtttcggggccaatgtttattaatacaaatattcagccttcaaacgttaaaatcacagtgaaaacagtgaaggaggatggaaaattaactagtgagccatatacagcgaacgacaaagtttcagttaaaccaccactcaacttcgaagaaatgtgttaccagtttaatggtctcaaagaaatagacgtctccaaactagtatttaaaaataatgaagcaagtattgatatcacctttacagcatttgctgatgcatttgaaagtggtcagaaagaacgtaacctaggcgaagaacattttagtattcgtattatcaaaaaatcggagactaataatgtcctatcccttcacagtaattcaagcggggcacaatatatgcaatggggagcctatcgtactcgccttaatacgctgtttgcccgtaaattaattagccgcgccaacgcggggatcgacactattttgagcatggaaactcaaaatattcaggagctacaattaggcaaaggtttctatgctacattcgtaatacctccctataacccatcaactcatggtgatgaacgttggtttaagctatatatcaaacatgtctctgataataactcacatattatctattcaggccagctaaaagatacaaatataagcatcacattatttattcctcttgatgatattccattgaatcaagatttccacgccaaggtctatatgaccttcaagcaatcgccatcagatggtagctggtcgggtcctcactttattagagataataaaggaataataacaataaactccagctccattttgacccattttgaaagtgtcaatgtcctaaataatgtgagtagcgaaccaatggacttcaacggcgcgaacagtctttatttctgggaactgttctactataccccgatgttgattgctcagcgtttgctgcacgaacaaaacttcgatgaagctaaccgttggctgaaatatgtctggaacccatcaggccatattgccaatggtcaaaagcagtatccccacacttggaatgttcgcccattacaagaggacacgagttggaacgatgatccgttgggttcatttgatcccgatgccatagcgcaatatgatccaatgcactacaaagtcgcttcctttatgcgcacccttgatctgttgatcgaacagggagattacgcctatcgccaattggagcgggacacactcgccgaagccaaaatgtggtatatgcaagcattgcatctcttgggtgataaacctcatttatcactcagttcaacatggaatgatccagaactagaagaggccgcagatcttgagaaacaaaagacacatgccaaagcagtagcagatttacgacaaggccagtctacaggtggaagcaacacagatcttttcctgccacaggtcaatgaagtgatgctgagctattggcagaaactggaacaacggctgtataacctgcgccataacctctctattgatggtcaacctttacatttgcctattttcgcaacaccagccgatccaaaagcgctgctcagcgccgctgtcgccagttcacaaggtggaaataatcttccgtcagcgtttatatcagtttggcgtttcccacacatgctggaaaacgcccgcagtatggtcagtcaactcacccaattcggctccacgttacaaaatattatcgaacgtcaggatgcggaggcattaaacacgctgttgcagaatcaggcggcggaactggtattgaccaatctcagcatacaggacaaaaccattgaagagctggatgttgaaaaaactgtgctagaaaaaacccgcgccggggcccaatcacgttttgatagctacagcaaattctacaatgaagacatcaacgcaggtgaaaaacaggcaatggcgttgcgagcctccgtcgctggcatctctacggcccttcaagcatcacatctggcaggcgctgcacttgatctggcccccaacatctttggcttcgctgatggtggtagccattggggggcaatcgcccaagccacaggtaatgtcatggagttttccgccagtgtcatgaacaccgaagcggataaaattagccagtctgaagcctaccgtcggcgtcgtcaggagtgggaaattcagcgtaataacgccgagacagagctgaaacaaatcgatgctcaacttggttcgctggtagtgcgccgtgaagccgccgtgttgcagaaaaccagcctgaaaacgcaacaggaacagactcatgcacaactgaccttcctacaacataagttcagcaatcaagctttgtacaactggctgcgtggtcggctgtccgccatttacttccagttctatgatttaacagtagctcgctgtttgatggctgaaatggcctatcgctgggagactaacgatgccgcagcacgctttatcaagcccggtgcctggcagggaacccatgccggtttgctggcaggagaaaccttaatgctgaatctggcacaaatggaagacgcgcatctgaaacaggagcaacgcgtactggaagtagaacgtaccgtttcactggcaaatatctataaagagaaaggtcaattttccctgactgagaaaattgcagaactgatgaagaataaattagtcactgccggtagcggaaataacaccctgaagtttggtaccggaaatgcccaaacgtctctgcaagcatccatttcgttagctgacttacaaattcgtcacgattacccagaaaacagtggagtcggtaacgttcgccggattaaacagatcagtgtcaccctgccagcactgttaggtccctatcaggatgtgcaggcgattctgtcttacagcggagatgtcactggattggctgaaagttgcaaatcgttggcggtttctcatgggatgaatgacagcggccagttccaactggatttcaacgatggcaaattcctgccatttgaaggaatcgacattgataaaggtacgctgacattgagcttcccaaatgcaattggtgaaggaagcaaagaaggcaaacaaaaaaccatgctggagagtctaagcgacatcattctgcatattcgctacaccattcgccaataa

SEQ ID NO: 7895 - DNA, 4428 bp, Photorhabdus luminescens
atgcaaaattcacaagattttagtattacagaactatcattgcccaaaggaggaggcgctatcacgggaatgggggaagcgttaacccccgccggaccggatggtatggccgcgctatctctaccattacctatttctgccgggcgcggttatgccccgtcactcgccttaaactacaacagcggtgccggtaacactccatttggtctgggttgggattgcaacgttatgaccatccgccgccgcacccattttggtgtcccccattataacgaaaccgatactttccttgggccggaaggcgaagtactggtagtcgcggatcaaccgcgtgatgaatcgacattacagggtatcaacctaggcgctaccttcaccgttaccggataccgttcccgtctggaaagtcatttcagccgattggaatattggcagcccaagacaacaggcaaaacagatttttggctgatatatagcccagatgggcaggtacatttattgggtaaatcaccgcaagcacggatcagcaacccatcccaaacgacacaaacagcacaatggttgctggaagcttctgtatcaccacatggtgagcaaatttattatcagtaccgggccgaagataacttagattgtgaaactaatgaaattacgctccatccacaggccacagcacaacgttatttacatatagtgtattacggcaaccggacagccagcgaaacgttacccggtctgaatggtcgcgccccatcacaagcagactggttgttctacctggtatttgattacggcgaacgcagtaacaacctgaaaatgccaccagcatttacagcaacgggtaactggctttgtcgtcaggaccgtttttcccgttatgaatatggctttgcattacgtactcgccgtttatgccgtcagatactgatgtatcactgcctgcaagcgctggataataagataaaagaacacaacggaccaacgctggtttcacgcctgatactcaattatgacgaaagcgcaatcgccagcacgctggtattcgttcgtcgagtaggacatgagcaagacggtactgccgtcaccctgccaccattagaattggcgtatcaagatttttcaccgcaacataacactgactggcaaccgatggatgtgctggcaaacttcaatgccattcagcgctggcagctagtcgatctaaaaggcgaaggattacccggcctgctatatcaggataaaaacgcttggtggtaccgttccgcacagcgtctgggtgaaattggctcagataccgtcacttgggaaaaaatacagcctttgtctgttatcccttccttgcaaagcaacgcctcgctggtggatatcaacggagacggccaacttgattgggttatcaccggaccgggattacggggatatcatagtcaacgtccagatggcagttggacacgttttaccccactcaatgctctgccggtggaatatactcatccacgtgcgcaactcgccgatttaatgggagccgggctctctgatttagtgctgatcggccctaatagtgtgcgtttatatgccaatactcgtgacggcttcgccaaaggaaaagatgtggtgcaatccggtgatgtcacgctgccagtaccgggtgccgatccgcgtaagctggtggcgtttagtgatgtattgggttccggtcaggcacatctggttgaagtgagcgcaactaaagtcacctgctggcctaatctggggcatggacgttttggtcaacccattaccctgccgggattcagccagccagaggctatatttaacccggctcaagtttatctggccgatctggatggcagcggcccaacggatctgatttatgttcacaccaaccgtctggacatcttcctgaataaaagtggcaacggttttgccgcaccgatgacattgcgcttcccagaaggcttgcgttttgaccatacctgtcagttacaagtggccgatatacaagggttaggtgtcgccagcctgatactgagcgtgccacatatgaccccccatcactggcgttgtgatctaaccagcgcaaaaccgtggttactcagcgaaatgaacaacaatatgggagcccaccacaccttgcgttaccgcagttcctcccagttctggctggatgaaaaagccgcggcactggttgccggacaaacaccggtttgttatctccccttcccggtacacaccctatggcaaacggaaacagcggatgaaatcagcggcaacaaattagtcacaacactgcgttatgctcgtggcgcttgggatgggcgtgaacgggaatttcgcggatttggttatgttgagcagacagacagccatcaactggcccaaggcaacgcgtcagaacgcaccccacccgcgatgaccaaaaactggtatgccaccgggctaccggtaatagataacacattatcaacagagtattggcgtggtgataatcaggcttttgccggtttttcaccacgctttacgacttggcaagatggcaaagatattctgttaacaccggaagatgataacagccagtattggctaaaccgggcactgaaaggtcaactgctacgtagtgagctgtacggattggacgacagtacaaataaacacgttccctatactgtcactgaatttcgtccacaggtacgtcgattacagcaggcagataaccaatacccggtactttggtcatctgtagttgaaagccgcagctatcattacgagcgtatcgccagcgacccacaatgcagccaagatattacgctatccagtgatctatttggccaaccgctaaaacaggtttcggtacagtatccacgccgaaagcaaccagcaatcagtccgtatcctgatacgctgcctgatgaattgttagccaacagctatgatgaacagcaacgccaattacggctcacctatcaacaatccagttggcatcatctgactgacaataccgttcgggtgttaggattaccggatagtacccgcagtgatatcttcacttatgaagctaaaaatgtacctgctggtggtttaaatctggaactactgagtattaaagatagcctgattgcggataataaaccgcgtgaatatctcggccagaaaaaaaccatttataccaatgggaaaaatgcagcgccattgcaaacgccaacgcgacaagcgctagttgcctttaccgagacaacggtatttagtcaatccacactatcagcgtttgatgggagcatcccatctgctcaattgtcaacgacgctggaacaagccggataccaacaaacaaattatctatttcctcgcaccggagaagataaaatctgggtagctcatcatggttataccgattacggtacagccgcacagttctggcgcccgcaaaaacagagcaacacccaactcacgggcaaaattacactcacttgggatgcaacctattgcgttgtcacacaaacccgagatgctgctgggctgacaacctcagccaaatatgactggcgttttctgacccctgtgcaactcacagatatcaatgacaatcagcaccttatcatgctggatgcactgggccggccaatcacactgcgcttttggggaactgaaaacggcaagatgaccggttactcttcaccggaaaaagcaccgttttctccaccgtccgatgtgaactccgctattgagttaaaaaaaccgctccctgtagcacagtgtcaagtttacgcaccagaaagctggatgccagtattaagtcagaaagccctcaataggctggcagagcaagatcggcaaaagttatacaatacccgaatcatcaccgaagacgggcgcatatgtacactggcctatcgccactggtcacaaagtcaaaaggcaacccctcaactcactagcctgttaaacaacggcccccatttaccccctcacagcctcacattgactacggatcgttatgatcacgatcctgagcaacagatccgtcaacaggtagtattcagtgatggctttggtcgcttactgcaagccgctgcccgacatgaagcaggtatggcttggcaacgcaataaagagggttctctgatgataagtgtcaagcatactgagaatcgttgggcagtgactggacgaacggaatatgacaataagggacagccgatacgcacctatcagccctatttcctcaatgactggcgatacgttagcaatgacagtgcccggcaggaaaaagaagcttatgcagatacccatgtctatgatcccgttggtcgagaaatcaaggttatcaccgcaaaaggttggttacgccgaaccttgttcactccttggtttactgtcaatgaggatgaaaatgacacggctgctgaggtgaatgaggtgaatatgtaa

SEQ ID NO: 7896 - DNA, 132 bp, Photorhabdus luminescens
ctgcctaacaggcgggaaacagagatggaggtgaaaggtgttgctcataataccgtcagatactcaacttatcatctggttgatcattggttttattgcggcctggggcggcctcgtaaggtacctcattga

SEQ ID NO: 7897 - DNA, 321 bp, Photorhabdus luminescens
gtgttgctcataataccgtcagatactcaacttatcatctggttgatcattggttttattgcggcctggggcggcctcgtaaggtacctcattgatatgcaaaacaaacaatataaatggagttggatcaacgtattctgtcaactcatcatctcctgctttaccggtgtactaggaggattgctgagttttgaaagtggcggcagtatctatatgacttttgcaattgcaggtttattcggcacaacaggaagtaccggactgaactggctctggcgccgcctcattacgtatcatcatgatcatggaaggaagcaataa

SEQ ID NO: 7898 - DNA, 2913 bp, Photorhabdus luminescens
atgaaaaacattgatcccaaactttatcaaaagactcccgtcgtcaatgtccaagacaaccggggtctgacaatccgtaacatcgattttcaccgtaccactgcaaacggtgataccgatacccgtattacctgccatcaatacaatactcacggacacctaagtcaaagcatcgatccacgcctatatgaggccaagaaaaccagtagtacgatcaaacccaattttctctggcagtatgatctgaccggcaatcccctacgtacagagagcattgatgcaggtcgcactgtcaccttgaatgatattgaaggccgtccgctgctgacggtgacggcaacaggtgtcatacaaacccggcaatatgaaacttcttccctgcccggccgtctgttatctgttaccgaacaaacaccagaggaaaaaacatcccgtaccaccgagcgcctgatttgggccggcaataccgaagcagagaaagaccataaccttgccggccagtgcgtgcgccactatgacacggcgggagttacccgattggagagttcgtcactgaccggtactgttttatcgcaatccagccaactcttgctcgacactcaagcagctaactggacaggtgataacgaaaccggctggcaaaacatgctggctgctgacatctacaccatcctgagcaccttcgatgccaccggcgctttactgactcagaccgatgcgaaaggcaacattcagaggctagcctatgatgtggccgggcagctaaacgggagcgggttaacactaaaaggtcagacggaacaagtaattatcaaatccctgacctattctgctgccggacaaaaattacgcgaggaacacggcaatggtgttatcaccgaatacagttatgagcaggaaacccaacggcttatcggtatcaaaacccgccgttcgttagacaccaatccgtcagacaccaaagtgttgcaagacttacgctatgagtatgacccggtaggcaatgtcatcagtatccgtaacgatgcggaagccacccgcttttggcacaaccaaaaagtggtgccggaaagtacttatatctacgactccctgtatcagcttatcagcgccaccgggcgcgagatggcgaatataggtcaacaaagtcacccatttccctccccggctctaccttctgataacaacacctacaccaactatacccgtacttatacttatgaccgaggcggcaatctgactaaaatccagcacagttcaccggcgacgcaaaacaactacaccacaaacatcacggtttctcaccagagcaatcgcgcagtactcagcacactgaccgaagatccgacacaagtagatgctttatttgacgcaggcgggcaccagaacacgttgatagcaggacaaaacctgaactggaatccacgcggtgaactacaacaagtgacattggtgaaacgggacaagagcgccaatgatgatcgggaatggtatcgttatagtggtgacgggagaaggatattaaaagtcaacgaacaacggaccagcaacaacgctcaaatacaacgaataacttatttgccgagtctggaactccgtctaacgcaagacaatacgaccacaaccgaagatttgcaagttatcaccgtaggagaagcgggccgggcacaggtacgcgtattacattgggagagcggtaaaccggaagatatcgacaataatcagttgcgttatagttacgataatcttatcggttccagtcagcttgaattagatagcaaaggagaaattattagtgaagaagagtactatccctatggtggcacggcattatgggcggcaaggaacaaaacagaagccagttataaaaccatccgttattcaggcaaagagcgggatgccaccgggctatattattacggttaccgatattatcagccttgggtaggacgatggttaagcgccgatcccgcaggaacaatcgatgggctgaatttatatcgaatggtgaggaataatccaattaaatatcatgatactgatggtagagcccctgaaattaaagatgtcgaacacacggtgatatatggtttcagtcatcaccgcggatcagaaatggggaaggcattcgcggctaataagaatcctgttaccatcgatgaatataatgctgggcttggtatcatgggtgaattaagtctgtctgattattttagaatttctcaaaatcttaaagaagacagtccacctaaattgaatgaggaaaatataagaactaactcaagtaaatatctggtagcaatgggtatagaggaaagttcagctactgataaaatcaaacaggaagcctatgaacaacaatatgcttacactgcgtcatggagttttcatatggtagaaaataaaggaaaattagatattcaaagtaaagtaaaaaatcttctcccctcaaaaagtcttttcagtgggttatccggccaaaaacgattccaaaaattagatgcatttattttaaaaaatagtgatggtagcgatttcactattcaaaggcagagagatatattaacgaaatttgcttccgcaggaaatacaggagaacttgaaagcaccttatcagcagcagaccaatcatggctaaaaaatactattgcaacggcattctttagacaaacaagtaaattaggtatggattggtttataaaacaactagcatcacctgatttcagatttgttatggctggatataacggggaaaaattgactatcgagcaattaaaatcagaacaaccctggaaaacaggaaaaagaaggaaagaaggtccgaatgaatatgccgaagcaataactttctctgaaattcgtcacgcctatagaaaaaaatacgacagtacaataaactttatccagaaataa

SEQ ID NO: 7899 - DNA, 912 bp, Photorhabdus luminescens
atgatattttgttcaaagcaactaaagtattttatggaatcagcgaagaaagagtcattcacgttagcagcggatacactttgtattaccccctctccacttagcaggctcgtatatcaactggaacaacgtgtggggtgccaattattcgagcgactaccgggaaaaaccaagctcacagaagagggcagggcgttatatcaagagttgttgccatgttatgaaagaattcagaaagttgaggataactggaattgtcgtagaaattgcaaatcatcaagcagagataaactggttattggcaccagtggagaatatgttaataagatatctacggtcgtaaaaagagcggtgcaacgttatcattaccgcgatatttgtataatcaacaatttcctcattgatgatttaataagacaagatgcagtattttcttccttaatgaaagaggatataacggtttatgtgaccactgaatgttatccagataatgatgatatcatcaggatagatggtgcttatcaaaagttgtctcttgctgtatccaatgatattttagaaccagagagtcatgttgatgaaataatatatagttttcctttggttcagcataatagtgcctttttaaaacaatgcgataattttatgccattgaattatccacctgaataccaaaatttagcgttattaacgatccctgattttactaatagattggaactgataaaagcaggggtcgcgataagtttaatgacccccaatgaaatgcgctattctgcccatattgataaaggtataacatttctgaattttgaatcatatccagaaccatcggtaagatattgtgcttatgctctcagaaataaatataaagaaccattaaattcattaatttctgatttgatattttag

SEQ ID NO: 7900 - DNA, 7377 bp, Photorhabdus luminescens
ttgctcatcaatcatgatgtaaacaataacagcttattccctccagatttgatcaaaaaacaattgcaaattttgcggctgctttttttgcaacagctatttaaagaaaacagtgacatagtgatgatcctcatttcctatagaacggaatcactctcttctcttattgtatcgatttgtatcgatggtacagaaatcacacggatgttttatttaccttatgatttaaaaggaataaacatgaactcatacgtgaaagagatacctgatgtattacaaagccaatgtggtattaattgtctgaccgatatttgtcactattcttttaatgaattccgtcagcaagtttctgatcatctctcctggtcagagaccaaccgcttatatcgtgatgcacaacaggaacaaaaagagaatcaattatatgaagcaagtattctcaaacgcgctaacccacaattgcaaaatgcagtacacctcggaattaccctccctcatgctgaattgcaaggctataataatgaatttggtggccgagccagccaatatgtggcaccgggttcggtttcctctatgttctcccccgcggcttatttaactgaactctatcgtgaagcacgtaatttacatgccagtgactccgtttatcatctggatcaacgccgcccagacctccaatcaatgacgctcaatcagcaaaatatggataccgagctttccactctttctctgtctaatgaaattttgttggaaggagttaaagctaatcagcctaatctggacaacgatactaaagtgatggcaatgttatccactttccgtccttccggcacaataccttatcacgatgcttatgaaaatgtgcgtaaagctatccaattacaagatcctcaacttaagcaatttcagcaatcaccggcggttgctggattaatgcatcaagcttcattgttaggaattaataactctatctcgccagagttatttaatattctgaccgaagaaattaccgaggctaatgcagaggatgtttacaaaaagaattttggcgatattgatcctacctggctggcaatgccagaatatctgaaaagttattataatcttagtgatgaagagctcagccaatttattcgaaaatatccaaacaatgaactaaatactcagaaaatacatttattaaaaatcaataaaattattttattatcacgatctgtaaacctgccatttgtaaaattagatgaaatcattccagaacagagtattaatccatcggtattaggaaaaatctttctagttaaatactatatgcagaaatacaacattgatactgaaactgccttaatactatgtaataattccatttcacaatattcctatcgtaatcaacctagccaatttgatcgcctatttaataccccaccactcaacgggcaatgtttcgttaccgaagacaccaatattgacttaaatctgaacagtaccgataccgataactggcacaaaacagtacttaaacgtgcttttaatgtcgatgatatttctctttatcgattgctccatattgctaatcatgaaaataaagatggtaaaattgctaataatataaaaaatctttccaatctctatatgactaaactactggcagatattcaccaattaacgattgatgaactgtatttactcctgatgactatcggtgaagataagagagatttatataccattgatgataaagaactggagaaactcataaacagactcgatagcctaagcaattggctgcgtacacaaaagtggagtgtctatcagttatttttgatgaccaccaccaactatgacaaaacgctaacgcctgaaattcaaaacttactcaatacggtctacaatggtttacaaaactttgatgaaaataaaaaagatcttttgactaccatatcgccttatattgccgcaacgctacaattaccgtctgaaaatgtcgcacattctattcttctctgggctgataaaataaaaccaagcgaaaagaaaataacaacagaaaaattctgggactggttacaaaataggggaattttagaattatcaaaaccgccagaaatgcaggaacaaattattcagtactgtcactgtctggcacaattaacaatgatttatcgttcttccggtattaatgaaaacgctttccgcctgttcatagaacaaccaaccatttttggcatttctgatgaacctgataaagcgacaccagcccataatgcaccaacattaatcatcctaacccgctttgctaattgggttaacacactaggtgaaaaagcctctcctattctaaccgcttttgaaaataaaattttaaccgcagaacaactggctaatgccatgaaccttgatgctaatttattagaacaagccagtattcaggcgcaaaattataagcaggttactaaagaaaatacattctccaattggcaatccatcgatattattctgcaatggaccaatgtagcaaatgattttaatatctccccgcagggtatttcatccctgatagcattggattatatacaaccgtctcaaaaaacaccgacctattcccaatgggaaaacgcagctatggtattaactgccgggttagatactcaacaaatgaatactctacacgcatttctggacgaatctcgcagtactgcattaagcaactattatattagcaagattgctaaccgggcagcagcaattaaaagccgtgacgatttataccaatatttactcattgataaccaagtttctgctgcaataaaaactacacgcattgccgaagccattgccagtattcaattgtacgtcaaccgggcgctggaaaatatagaaacccatgccatttctgatgttattactcgtcaattttttatcgattgggataaatataataaacgttacagcacttgggctggcgtttcacaattagcttactatcccgaaaattatatcgacccgacaatgcgtatcggacaaacgaaaatgatggatacgctattgcaatccgtcagccagagccaattaaatgccgatacggtagaagatgcatttaaatcttacctgacctcgtttgagcaagtcgctaatttggaagtcattagtgcttatcatgacaatgttaataatgaccaagggctgacctactttattggacacagcaaaacagaaattaatcaatattactggcgcagtgtcgatcacagtaaattcaacgatggtaaattcgctgctaatgcctggagtgaatggcacaaaattgactgcgcaattaatccctaccaaagcaccattcgcccagttatctataaatcccgcttatatctgatttggttggaacaaaaggaaatagctaaacaagataaagataataaagtcattactgactattactatgaattaaaattggctcatattcgttatgatggtacctggaatacaccaatagcctttgatgtgaatagcaaaatatcagcattagaactggcaaaatctcaagctcccggactctattgcgcaggttatcaaggggaagatacactactggtcatgttttatagaaaaaaagagaaattggacgattataaaactgctccaatgcaaggattttatattttctccgatatgtcctccaaagagatgaccaatgagcaatgcaactcttatcgagataacggttatacacatttcgatactaattctgatactaatagcgtcataagaataaataaccgatatgcagaggattatgaaatcccttcattgatcaatcatagcaacagccatgattggggggaatataatctgagccaagtatatggcggtaatatagttatcaactatgaagttgcatcaagtgatttaaaaatcaagatttcaccgaaattaagaataattcatgagggaaaagaaggacgagaacgtattcaatgtgatctaatgaagaaatatggcaaactgggagataaatttattatttatacaaatataaataaaaacccaaatcactctaaaaatgaaaaacttatctatcctgtttatcaataccgcaataatgacaaaggatgtttgctgttttataggagcaacacaactggtactataagggcttggttcccaacaactaaagaagaaataaccgcgactacaagtagtaaccaagattgtattatcgatacgattaataatatagatctatttaaagcatatttctatatggaagataaagaaggccagattgccaccgatattagtggagcaacagatatcaacacgggaatctcttctgaaaaggttcaaatcataatcaacgctggcaaagaatactctcttacagcgaataaagatgtctccgttcaaccatcacctagctttgaagaaatgtgttaccaatttaatgctctcgaaatagatggctctagtctgaattttactaacaattcagccagtattgatgtcacctttatcgcactggcagatgatggacgcaaactgggttatgaaattttcaatatccctgttattcaaaaggttaaaaccgataatgctctaacgctttttcatgacaagaatggcgctcaatatatgcaatggggagcctatcgcgttcgtcttaataccctatttgctcgccaattagttgaacgcgccactacgggtattgatacgattctaagtatggaaacacagaatattcaggaaccgatgatggggataggggcttatatagaaatcgttatggataaatataatactgatatccacggcactaataaatcatttaagattatgtatggtgatatttttaaagcaggtgatcattttcctatttatcagggaacattaagcgatattacacaaacgacagtaaaattattcttacctcgtgttgataacgcttatgggaataaaaacaatctctatgtttacgctgcctatcaaaaagcagaaacacatttcattcgattcgttaaagaggataataataaacccgctacattcgacactacctataataatgggaccttcccagggcttgcatcagccagagtaatacaaactttctcggaaccaatggatttcagcggcgctaacagcctctatttctgggaactgttctactataccccgatgctggttgctcagcgtttgctacacgaacaaaatttcgatgaaactaaccgttggctgaaatatgtctggagcccatccggttatattgttcgtggtcaaattaaaaactatcgctggaatgtacgcccgttcctagaaaataccagttggaacagtgatcctctggattccgttgatcccgatgcggtggcacagcacgatccaatgcactacaaagtagccacctttatgcgcactctcgatctgctgatggctcgtggcgatcacgcctatcgccaactggagcgggatacgctgaacgaagccaaaatgtggtatatgcaggcactgcacctgttgggcgataaaccctatctgccgttgagttctgcatggaataatccacgtctggacaatgccgcagacacgaccatacaaaaagcatattcctacgcaataaccaccctacgacaaggcacgcaaacaccagcattattattgcgctccgctaataccctgaccgatcttttcctgccacaaatcaacgacgttatgttgagctactggaacaaactggaactgcgcctgtataacttgcgtcataatctctctattgatggtcaaccgctctatctgccgatgtatgccacaccggccgatccgaaagcgttactcagcgccgccgttgctacgtctcagggaggaggctctcttccacaaccatttatgtccctgtggcacttcccgcatatgttagaaaatgcccgcagcatggtcgctcaactcacacagttcggctccacgttgcaaaatattattgaacgccaagatgctgaggccctaaatgctctgctgcaaaatcaagccaaagagctgatattaacgacgctaagcattcaggacaaaaccattgaagaaatagatgctgaaaaaaccgtactggaaaaatccaaagccggggcacaatcgcgctttgataactacagcaaattatacgatgaagatgtcaatgccggtgaacgtcaagctctggatatgcgaatagcttcccaaagtattaccagcggattgaaaggcttgcacatggctgccgccgcgctggagatggtacccaatatctacggctttgcggtcgggggaacacgctttggggcaattgccaatgccattgctattggtggcgggatcgccgcagaaggtttgttaattgaagcggagaaagtctcgcaatctgaaatatggcgccgtcgtcgtcaggagtgggaaatccagcgtaataatgccgaagcagagatgaaacagatcgatgctcaacttcaatcactaacagtgcgccgtgaagcggcggtattacaaaaaaccagcctgaaaacccaacaggaacaaactcaagctcaactggctttcctgcaacgaaaattcagcaatcaagcgctgtacaactggttacgtggtcggttagctgccatttacttccaattttacgatttagtcgtcgcccgttgtctgatggcagaacaagcttaccgttgggaaaccaatgatacctctgcacgctttattaaaccgggagcctggcaaggaacctatgccggtctgcttgccggagaaaccttaatgttgaatctggcccaaatggaagatgcgcacctgaaacaagaacaacgtgcgctggaagtggaacgcacggtttctctggcgcaggtgtaccaatccttagagggaaaaagctttacattgaaagataaaattgaagcgttgctacaagaagataaagagacttccgtcggtaataacggtaatcaattgaaattaaccaacaatacgctatccgcgacgctaaccctgcaagacctgaaactcaaagatgattacccggaagagatgcagttaggcaaaacacgccgcattaaacaaattagtgtctccttaccgtcactattgggaccctatcaagatgttcaagcggttctgtcttatggtggtgacgccaccggcttagctaaaggttgtaaagccttggcggtctcccacggcctgaatgacaatggtcaattccaactcgatttcaacgatggcaaattcctgccgtttgaaggaatcgatattaatgacaaggggacattaacgctaagtttccccaatgccaccagtaaacaaaaaaccatattacagatgctgaccgacattattctgcacattcgttacactatcctcgaataa

SEQ ID NO: 7901 - DNA, 2817 bp, Photorhabdus luminescens
atgaaaaacattgaccctaaactttatcaccatacgccgaccgtcagtgttcacgataaccgtggactcgctatccgtaatattagttttcaccgcgctaccgcagaagcaaataccgatccgcgtattactcgccatcaatataatgccggcggatatttgaaccaaagcattgatcctcgcctgtatgatgctaagcagactaacaacgccgtacaaccgaattttatctggcagcataatttgaccggcaatatcctgcgaacagagagcgtcgatgctggccgaacaattaccctcaacgatattgaaggtcgcccggtattgaccatcagcgcaaccggtgtccgccaaaatcacctttatgaagataacaccctacccggtcgcctactcgcaatcaccgaacaagcacagacagaagagaaaacaaccgagcgtcttatctgggccggcaatacgccgcaggaaaaagagtacaaccttgttggtcagtgtacccgtcattacgataccgccggactcgctcaactcaacagccttgccctgaccggcgccgttttatcacaatctcaacaaccgctcgtcgataaccaagatgccgactggacaggtgaagaccagagcctctggcagcaaaaactgagtagtgatgtctataccacccaaaataaaaccgatgccaccggggttttacttacccagaccgatgctaaaggcaacattcagcggcaagcctatgatgtggccggtcagctaaaagggagctggctaacattaaaaggtcagaccgaacaagtgattatcaaatcgctgacctactccgccgccggacaaaaattacgcgaagagcacggtaacggcattattaccgaatacagctatgaaccggaaactcagcggcttatcggcattaccactcgccgtccatcagacgccaaggtgttgcaagacctacgctatcaatatgacccggtaggcaatgtgatcaatatccgtaacgatgcggaagccacccgcttttggcgcaatcaaaaagtcatcccggagaatagctatacctacgattctctgtatcagcttatcagtgccaccggacgtgaaatggccaatataggtcagccaaataacccactcccctcccctgcgctacctgctgataacaacacctacactaactacacccgcacctatagttatgaccgtggcggcaatttgatgaaaattcagcatagttcacctgccacgcaaaataactacacgacgaatataacggtttctaattacagcaaccgtgccgtattaagtacactgaccgaagatccaacccaagttgatgccttatttgattcgggaggccatcaaaccaacttattatccggtcaagttctaatatggacaccgcgaggcgaattgaaacaagtcaacagtagcgcaggaaatgagtggtatcactacgatagcaacggcacacgacagctaaaagtgaatgaacaacaaactcagaatatcgcgcaacagcaaagagtcacttatctgccggggctagaactacgcacaacccaacatggcagtactaccacggaatatttgcaagttatcacactcggtaaagctggtcgtgcgcaagtccgggtattacattgggagagcggaaaacccgaagatatcaacaacaatcaacttcgttacagctacgataatcttatcggttccagccaacttgaattagatagcgaaggacaaattatcagtgaggaagaatattatccatttggcggtacagctctgtgggcagcaaggaatcaaaccgaagccagctataaaaccattcgttattcaggtaaagagcgggatgctaccgggctgtattattacggctaccgttattaccaaccgtgggtgggcagatggttaagtgcggacccggccggaaccattgatgggctgaatttatatcgcatggtgagaaataatccggtgacacaatttgatgttcagggattatctccggctaacagaacagaagaagcgataataaaacagggttcctttacaggaatggaagaagccgtttataaaaaaatggcgaaacctcaaactttcaaacgccaaagagctatcgctacccaaacagagcaagaagcccatcaattattgaccaacaatcccggtgtagatactagcccaattaaagattacaccacggatagctcgcaaattaatactgcaataagagaaaaccgtattacatcgatagtgaaagatttagattcctcattatctgccctgcaagatagacaaatacgggtaacttatcgagtgatgacctatatagataattccaagccctccccctggcactctccacaggaaggaaatagcatcaacgttggtgatatcgtttcagataatgcttatttatcaacatcggcccatcgtggttttctgaattttgtgcataaaaaagaaaccagtgaaactcgatatgtcaaaatggcatttttaaccaatacaggtgtcaatgtggcagcaaaatctaagtataataacgaaaatgcggagaaaatatttaagatggatttagatgattcgtggaaaagctttgttgaaaaattgaaaataagagccaatggaccagaagcggggcaagcagaaatactattccccagagaaacaccgttcgaagttgtttcaatgagacatcaaggtagagatacctatgtattattacaagatattaaaccatcagcgattactcataggaatgtacgtgatacttataccggcagctttagatcatccagtacaaattaa

SEQ ID NO: 7902 - DNA, 915 bp, Photorhabdus luminescens
atgatgctattttgttcaaagaacttgaagtattttatggagtcagcgaaaagagagtcattcactttagcagcggatacgctttgtattactccctctcccttaagtaggatcatatatcaactggaacaacgtgtaggttgccaattatttgaaagattaccgggaaggactaaactgactgaggaagggatggccttatatcaggagctattgccgtgctatgagaggatgcagcgtgttgaggataactggcattatcggagaagcgagagattaacgaacgccggcaaacttattattgggaccagtggagaatatattaataaaatttcggcagtgataaaaagagcggtgcaacgttatcattatcgtgatatttacataaaaaacaattttctggttgatgattcagcaagaaaagaggcaatattttcttctttaatgaaagaagatataaccgtctatgtgacgactgaacattatcctgataacgataatattataagaatagatggaacttatcaggtgctgcgtcttgctatcgctaatgatattttgggatcggaaagtcatgctgatgatattatatccacattgcctttggctcagcataatagtgctttcttgaaacaatgtgacggctttattccactgaattgtctacctgagtaccaaaatttaactttgctaactgttcctgatttctctaatcggttggatttagtgagatcaggtatcgcgataagtttaatgacacctaatgaagcgatctgttctgctgatcttcataaaggtattacctttttgaattttaaatcgtatccaacaccatcagtgaaatattgtgcttatactcttagacacaaatataaagaaccattgaatttattgatttccgatttaattgtctag

SEQ ID NO: 7903 - DNA, 7578 bp, Photorhabdus luminescens
atgaattcgcctgtaaaagagatacctgatgtattaaaaaaccaatgtggttttaattgcctgacagatattagccacagctcttttaacgaatttcaccaacaagtatctgctcacctctcttggtccgaagcacacgacttatatcatgatgcccaacaggcccaaaaggataatcggctatatgaagcccgtattcttaagcgcgcgaatcctcaattacaaaatgccgtacatcttgccatcatcgcccctaatgtcgaactgataggctataacagccaatttagcggtagagccagtcaatatgtcgcaccgggtaccgtttcctccatgttctcccccgccgcttatttgactgagctttatcgtgaggctcgcaatttacacgccagcaactccgtttattatctggatacccgccgcccagatctcaaatcaatggcgctcagccaacaaaatatggataccgaactttccacgctctcgttatccaatgagctattgttggaaagtattaaaactgagtctaagctggataactatactaaagtgatggaaatgctctccactttccgtccttccggcgcgacgccttatcacgatgcttatgaaaatgtgcgtgaagttatccagctacaagatcctgggcttgagcaattaaatgcatcaccggcaattgccgggctaatgcatcaagcctccctattgggtattaacgcctcaatctcacctgagttgtttaatatcctgacggaggagattaccgaaggtaatgctgaggaactttatgagaaaaattttggtaatatcgaaccggcctcactggctatgccggaatatcttaaacgttattacaatttaagtgatgaagaacttagccagtttattggtaaagccagcaattttggtcaacaggaatatagtcataaccagcttattactccagtagttaacagcagtgatggcacggttaaggtatatcggattacccgcgaatatacaacaaatgcctatcaagtggacgtggaactgtttcccttcggtggtgaaaattatcggttagattataaattcaaagatttttggaatgccacttatttatccatcaagttaaatgacaaaagagagcttattcgaactgaaggcgctcctcaggtcaacatagaatactctgcaaatatcacattaagtaccactgatatcagtcaaccttttgaaattggcctgacacgagtacttcctaatactaattacgcctatgccgccgcaaaatttaccgttgaggaatataaccaatactctttcctgctaaaactcaataaggcgattcgtctatcccgagcaacagaattgtcacccacgattctggaaggtattgtgcgcagtgttaatcagcaactggatatcaacacagaagtattaggtaaagtttttctgactaaatattatatgcagcgttatgctattgatgctgaaactgccctaatactctgccatgcgcttatttcacaacgttcatataataatcaaactagccagtttgatcgcctgtttaatacgccattactgaacggccaatatttttctaccggagatgaagagatcgatttaaatccaggtagtaacggtgattttcgcaaaaccatacttaagagagcatttaatatcgatgatgtctctctctaccgcctgctcaaaattactgaccataataataaagacggaaagattaaaaataacctaaaggatctttccaatttatatattggaaaattactggcagaaatccatcaattaaccattgatgagctggatttattattggttgctgtgggtgaaggagaaactaatttatccgctatcagtgataagcaattaactactctgatcagaaaactcaataccattaccggctggttacatatacagaagtggagcgtgttccagttgtttattatgacctccaccagctataacaaaacgctaacgcctgaaattaagaatctgctagataccgtttaccacggtttacaaggttttgacaaagacaaagcagatttactacatgttatggcaccctatatagcggctaccttgcaattatcatcggaaaatgtcgctcattcagtgctgctttgggcagacaagttaaagcccggcgacggcgcaatgacagcagaaaaattctgggactggttgaatactcagtatacgccgggtttatcggaagcagtagaaatgcgggagcatatcgttcagtattgtcaagctctggcacaattggaaatggtttaccattccaccggtattaacgaaaacgccttccgcctgtttgtaacaaaaccagagatgtttggcacttctattggggcagcccctacgcatgatgcgctttcattgatcatgctgacgcgttttgcggattgggttaacgcgctaggcgaaaaagcctcctccgtattagcggcattagaagctaatactttaacggcagaacaactggctgacgctatgaatcttgatgctaatttgctgttgcaagccagtactcaagcacaaaatcatcaacatcttcctccagtaacacaagaaaatgctttctcctgttggacatcgatcaataccatcctgcaatgggttaatgttgcacaacaattgaatgtcgccccacagggcgtttctgctttagtcggactggattatattcaatctaagcaaaaaaccccaacctatacccagtgggaaaacgcggcgggaatattaaccgccggattgaattcacaacaagcggatacattacacgcttttctggatgaatcccgcagtgccgcattaagcacctactatatccgtcaagtcgccaaaccagcggcggccattaaaagccgtgatgacctgtatcaatacttgctgattgataatcaggtttccgctgcaatcaaaaccacccgaatcgccgaagctattgccagcattcaactgtacgtcaatcgggcgctggaaaatgtggaagaaaatgccgattcgggggttatcagccgccaattctttatcgactgggacaaatataataaacgctacagcacttgggctggtgtttctcaattagtttactacccggaaaactatattgatccgaccatacgcatcggacaaaccaaaatgatggacgcattactgcaatccgtcagccaaagccaattaaataccgatacggtcgaagacgcctttatgtcttatctgacgtcgtttgaacaggtagctaatcttaaagttattagtgcatatcacgataatattaataacgatcaagggctgacctattttatcggacttaatgaaactgatgccggtgaatactattggcgtagtgtcgatcacagtaaattcagcgacggtaaattcgcggctaacgcttggagtgagtggcacaaaattgattgcccaattaatccttaccgaagcactatccgccctgtgatgtacaaatcccgcttgtatctgctctggttggaacaaaaggagatcaccaaacagacaggaaatagtaaagatggctatcaaaccgagacggattatcgttatgaactgaaactggcgcatatccgttatgacggcacttggaatacgccaatcacctttgatgtcaatgaaaaaatatccgagctaaaactggtaaaaaataaagcgcccgggctctattgtgccggttatcagggtgaagatacgttgctggtgatgttttataaccaacaagatacactagatagttataaaactgctgcaatgcaagggctatatatctttgccgacatggcatccaaagatatgaccttaggacagagcaatgtttatcgggataacagttataaacaatttgatactaatagtgtcagaagagtgaataaccgctacgcagagaattatgaaatcccttcatcggtaaatagcaataacagttatggcaggggagaatataacctcagtatggtgcatggcggagatatcccaattatccgttaccaagcctcatcaagtgatttaaaaatccatatctcacctaagttaagaattacctatgaaggagctgatgagcgaactcgtaatcagtgcaacctgataaaaaaatatggcaaattgggtgataaatttattatctataccaatctgagtgtcaatacacaatggacatcaaataaaaagttaatatacccggtttatcaatatagaggaaacaccactaataatagtcagggtagattactgttttatcgggataaccaaattggtaaagtaagtgtctttcttcctaattggggacaaagcctatattcagaagttaccaatagcaataatggctatattatagacacttctaatcaagaacctttatttaaacaatatctctatatggaggacaaaaataatggattccgtattattgctactgatgtctataacgcagtagagatcaacactgcaatttccccggcaaaaattcaggtaacagtaaaagccggtagcaaagagaaaacttttaccgcggataaagatgtttccgttcagccatcacctagttttgatgaaatgtattatcaatttaataccctcgaaatagagggtactggtttgaattttaataataacttagccagtattgatgtcacctttactgcattggcggaggatgggcgtaaactgggttatgaaagtttcagtattcctgttactcgcaaggtgagtaccgataatgctctgaccctgcaccataatgaaaatggtgcgcaatatatgcaatggcaagcctatcgtactcgcctgaataccctatttgcccgccagttggttgcacgagccaccaccggaatcgatacaattctgagtatggaaactcagaatatccaagagcctgttttatggagtgataattttactgcaacattaccaatatacaactcaagtcttcatggcaacagcaaaaatatcaaaattatgttaggaaacagtgaaaaacaacctgatcaagcaaatgtcatttatcagggtgagctaacagataaaaatcaattaattaatctctctgaaacttatatatccataaaagagcggagtaacaatacaaaaccagtggataataaagggaacgatagctggatttatttatttgtaaaatattctactaatccaataaaaattggcgagttttggtttaaaaatggtacgaattttcaaggttattatcccaaaggtaatgaaaaaaaccgtgatcctattttcatagaaaatcaaaaaactgaaccaatggatttcagcggcgctaacagtctttatttctgggaactgttctactataccccgatgctggttgctcaacgtttgttgcatgaacaaaactttgatgaagccaaccgctggctgaaatatgtctggagtccatccggttatattgttcacggccagattcagaactaccagtggaatgttcgcccgttactggaagacaccagttggaacagtgatcctttagattccgtcgatcctgacgcggtagcacaacacgatccaatgcactacaaagtctcaacctttatgcgtactctcgatctgttgatagcacgcggcgatcaggcttaccgccaactggagcgggatacgcttaacgaagcgaagatgtggtatatgcaagcgctgcatctattgggcgacaaaccttacctaccgctgagtacgacatggaataatcctcgactagacagagccgcagatattactactcaaaatgctcacgccagctcaatagttgctctgcggcagagtacaccagcacctttagcattgcgcagcgccaataccctgaccgatctcttcctgccacaaattaatgaagtgatgatgaactactggcagacattagctcagagagtatacaacctgcgtcataacctctctatcgacggtcaaccgctatatctgccaatctatgccacaccggcagatccaaaagcgttactcagcgccgccgttgccacttctcaaagtggaggcaaactaccagagtcatttatgtccctgtggcgcttcccgcacatgctggaaaatgcacgcggcatggttagccaactcatccagttcggctccacgttacaaaatattatcgagcgtcaggacgcggaagcactcaatgcgttattacaaaatcaggccgcggagctgatattgactaacctgagcattcaggacaaaaccattgaagaattggatgtcgagaaaaccgtgctggaaaaatccaaagcgggagcccaatcgcgctttgatagctatagcaagttgtatgatgaaaacatcaacgccggtgaaaaccaagctatgatgctacgagcgtccgcagccgggctcaccacggcagttcaagcatcccgtctggctggcgcagcggctgatttggtgcctaacatcttcggcttcgccggcggtggtagtcgctggggagctatcgctgaggcaacaggttatgtgatggaattctccgctaatgttatgaataccgaagcggataaaattagccaatccgaaacctaccgtcgtcgccgtcaggagtgggagatccaacgtaataatgccgaagcagaactgaaacaactcgattcccaacttaaatcactggtagtacgccgtgaagccgccgtattgcaaaaaaccagcctgaaaacccagcaagaacagacccaatctcagctggccttcctgcaacgtaagttcagcaatcaagcgttgtacaactggctacgtggccgattggcggcgatttacttccaattctacgatttggctgtcgcgcgttgtttaatggcagaacaggcttaccgttgggaaatcaatgatgcctctgcaagtttcattaaaccgggtgcctggcaaggaacctatgccggtctgcttgcaggtgaaaccttgatgctaagtctgacacaaatggaagatgcccatctgaaacgcgataaacgtgcactagaagtggaacgcacggtgtcgctagccgaagtttatgctggattgccacaagataaaggtccattctccctggctcaggaaattgagaagctggtgagtaaaggctcaggcagtgccggcagtgacaataataatttggcatttggtgccggtacggacactaaaacctctttgcaggcatccatttcattagctgatttgaaaattcgtgaggattacccgacatctcttggcaaaattcgacgtatcaaacagatcagtgtcaccctgcccgcgctactggggccatatcaggatgtgcaggcaatattgtcttacggtgataaaaccggattagctaacggctgcgaagcgctagcagtttctcacggtatgaatgacagcggccaattccagctcgatttcaacgatggcaaattcctgccattcgaaggcatcgccattgatcaaggcacgctgacactgagtttcccaaatgcatccatgccgaagaaaggtaaacaagccactatgctaaaaaccctgaacgatatcattttgcatattcgctacaccattaaataa

SEQ ID NO: 7904 - DNA, 4431 bp, Photorhabdus luminescens
atgcagaattcacagacattcagtgttgccgagctgtcattacccaagggcggcggggcaattaccggtatgggtgaagcattaacaccaactgggccggatggtatggccgccttatccctgccattacccatttctgccgggcgtggttactccccatcgctcaccttgaattacagcagtggagccggtaacagcccgtttggtctcggttgggactgcaacgttatgacaattcgtcgccgcaccagtactggcgtaccgaattacgatgaaaccgatacttttctggggccagaaggtgaagtgttggtcatagcattaaatgagaacggtcaagctgatatccgcagtgaatcctcattgcagggcatcaatttgggggaaatcttcaccgttaccggttatcgttcccgtttggaaagccactttagctggttggaatattggcaacccaaaacaacaggtacaaccgatttctggctgatatacagccccgacggacaggtccatttactgggaaaaaatcctcaggcacgtatcagcaatccactcaatgttagccaaacagcgcaatggttgttggaagcttcggtatcatcccacggcgaacagatttattatcaatatcgagccgaagatgaaacaaactgcgaaactgacgagttcacagcccatccgaacgcaaccgtccaacgctacctgcaagcggtccattacggtaacctgaccgccagcgaagtttttcccacgctcaacggagatgacccactcaaatctggctggttgttctgtttagtatttgattacggtgaacgcaaaaacagcttatctgaaataccgccgtttaaagcctcaagtctctggctttgccgccaagaccgtttttcccgttatgaatacggttttgaattgcgcacccggcgcttatgccgtcaaatcctgatgtttcaccgtctacaaaccctgtctggtcaagctaaaggggacgatgaacccgcgttggtttcacgtctgatactggattacgatgaaaacgcggtgatcagcacgctcgtttctgtccgtcggataggtcatgaggacaacaataccgtcatctcactgccaccactggagctggcttaccagccttttgagccagaacaaaaagcacgctggcaatcaatggatgtactggcaaatttcaacgccattcaacgctggcaactgcttgacctgaaaggagaaggcgtacccggtgttctatatcaggatagaaatggctggtggtatcgatctgcccaacgtcaagccggggaagagatgaatgcggtcacctgggggaaaatgcaactccttcctatcacgccagctttgcaggataacgcctcactgatggatattaacggtgacgggcaactggactgggttatcaccggaccggggttaaggggctatcacagccaacacccggatggtagctggacacgctttacaccattagatgccttgccgatagaatattctcatccccgtgctcaacttgccgatttaatgggggccgggctgtccgatttagtactgattggccccaaaagtgtacgcttgtatgctaataaccgtgatggttttacccaagggcgggatgtggtgcaatccggtgatatcactctgccgttaccgggtgccgatgcccgtaagttagtggcatttagtgacgtactcggttcgggccaagcacatctggttgaagttagtgcaactcaagtcacctgctggccaaatctgggacatggccgttttggtcagccaattacattgccgggattcagccaatctgccgacaactttaatcccgaccgagttcatctggccgatctggatggcagtggtcctgccgatttgatttatgttcatactgaccgtctggagattttcaagaatgaaagtggtaacagctttgcaaaaccattcacactccgttttcctgacggcctgcgttttgatgatacttgccagctacaagtggctgatgttcagggattaggggctgtcagcctgatcctgagcgtaccgcatatggcgccacatcattggcgctgcgatctgaccaatgcgaaaccgtggttgctcagtgaaatgaacaacaatatgggcgctcatcacaccctgcattaccgtagctcctcccagttctggctggatgacaaagccgcagccttggcgaccggacaaacaccggtctgttacctgcccttcccggtccatactctgtggcaaacagagaccgaggatgaaatcagcggcaataaattagtgaccacgttacgttacgctcacggcgcttgggatggacgtgaacgggaatttcgtggctttggttatgttgagcagacagacagccatcaactcgctcaaggcaatgccccggaacgcacaccaccggcactcaccaaaaactggtatgccaccggagtcccggaggtagacaatacgctatctgccgggtattggcgtggtgataaacaagcgttcaccggttttacgccacgctttactcgctggaaagagggcaaagatgttccggcgacaccggaaaatgatgataatctgtactggttcaaccgggcactaaaaggtcagctactgcgtagtgagctctacgggctggatgacagcgaacagcaaaatatcccctatacagtgactgaatctcgtccacaagtgcgccaattacaagatggcactaccgcttccccggtgctttgggcctcggtcgtggaaaaccgtagttatcactatgaacgtattatcggtgatcctcagtgcaatcaggatattacgctgtccagcgaccaattcgggcaacctctgaaacaggtttcaatgcaatatccccgccgcaatcaaccaacaaccaatccgtatcccgatacactaccggatacgctatttgccagcagttatgacgatcaacaacaactattgcgattaacctgccagcaatccagttggcaccatctaaccggtaatgaactcagagtgctgggattaccggatggtacacgcagtgatgccttcacttacgatgccaaacaggtgcctgttgatggtttaaatctggaagccctatgtgctgaaaatagtctgattgccgatgacaaaccacgcgaataccttaatcagcaaagaacgttctataccgatgggaaaaaccaagcgccattggaaataccgacacgacaagctttaatcgcctttaccgaaacggcggtattaacagaatctctgttatccgcatttgatggcggtatcacgccagatgaattacccggcattctgacacaagcaggatatcaacaagagccttatctgtttccacgcaccggcgaaaacaaagtctgggtagcacgtcaaggctataccgattacggaactgaggcacaattttggcgtcctgtcgcacaacgtaacaccctgttaaccgggaaaacgacgctgcaatgggatacccactactgtgtcatcactcaaacccaagacgcggctggtttgactgtcttagccaattatgactggcgttttctcacacctgtgcaactgactgatattaatgataatgtgcatctcataaccttggatgcattaggacgccctgtcacacaacgtttctggggaatcgaaaatggtgtgaaaacaggttactcctcaccggaagaaaagccgttctctccaccaatcgatatcaatactgccattgctctaaccggaccactccctgtcgcgcagtgtctggtctatgcaccggacagttggatgccactattcagtcaggaaaccttcaacacattaacgcaggaagagcagacgacactgcgtgatttacggattatcacggaagattggcgtatttgtgcactggctcgccgccgttggttgcaaagtcaacaggctagtacgccattggttaatctgttaactaacagcatcggtttacctccccataaccttacgctgaccccggatcgctatgaccgcgattctgggcagcaaattcatcagcaagtcgcattcagtgatggttttggccgtttgttgcaagcatctgtacggcatgaggcaggcgaagcttggcaacgtaaccaagatggttctctggtgacaaaaatggaagataccaaaacgcgctgggcggtcacgggacgcactgaatatgacaataagggacagacgatacgaacttatcagccctatttcctcaacgactggcgatatgtgagtgatgacagcgccagaaaaggggcctatgccgatacgcatatttatgatccgattgggcgggaaatccgagttattaccgcaaaaggctggctgcgacagagccaatatttcccgtggtttactgtgagtgaggatgaaaatgatacggccgctgacgtgattatgtaa

SEQ ID NO: 7905 - DNA, 2748 bp, Photorhabdus luminescens
atgagcagttatcgttctgaaattgacaaaaaaacaccattaatcagtgtattggataacaggaggttaaatgtacgtactttagaatatctacgtactcaagctgatgaaaacagtgatgaattgatcacactctatgagttcaatattcaaggatttgaggtaaaaagtactgatcctcgtaagaataaaaatcagagcggcccgaatttcattcgcgtctttaatctcgcgggtcaggttctacgtgaagaaggggttgatgccggtcgaactatcatcctcaacgatgttgaaggtcgcccggtattaaccatcaatgcaaccggtgtccgccaagactatcactacgaagataacatcctacccggtcgcttacttgctatcaccgaacaggtgcaggcagaagagaaaatgaccgagcgccttatctgggccggcaatacgccgcaagaaaaagagtacaaccttgctggtcagtgtgtccgccactacgataccgctggactcactcaactcaacagcctttctctggctggcgtcgtgctatcacaatctcaacaactgctcgtcgatgatcaaaatgccgactggacaggtgaagatcaaagcctctggcagcaaaaactgagcagtgatgtctataccacccaaaatagcactgatgccaccggggctttacttatccagaccgatgccaaaggcaacatccagcgtctggcctatgatgtagccgggcagctaaaaggctgttggttaacactcaaaggtcaagccgaacaagtgattatcaaatcgctgacctactctgccgccggacaaaaattacgtgaagagcacggtaacggggttatcaccgaatacagctatgaaccagaaacccaacggcttattggtatcactacccgccgtccgtcagataccaaggtgttgcaagacttacgctatcaatatgatccggtaggcaatgtgatcaatatccgtaacgatgcggaagccacccgcttttggcgcaatcagaaagtggtcccggagaatagctatacttacgactccctgtaccagcttatcagtgctactgggcgtgaaatggccaatataggtcagcaaaataatcaactgccctcccctgcgctaccttccgacaacaatacctacactaactatactcgccgctacagttatgatcacagcggtaatctgacgcaaattcggcacagttcatcggctacccaaaataactacaccaccgctatcaccatctcgaatcgcagtaaccgcggcgttctcagtacgctgacaacagatccaaatcaagtggatacgttatttgatgccggtggtcaccaaaccagtttattacccggtcagacactggtctggacatcacgaggagagttaaagcaggtcaataacggttcaggaaatgaatggtaccgatacggcagcaacggaatgagacaactgaaagtgagtgaacagccaacccagaatactacgcagcagcagcgggtaatctatctgccggggctggaactacgcacaacccagaacagcaccacaacaacagaagagttacacgtgatcacactaggtgaagcgggtcgcgcacaggtgcgggtgctgcactgggagagcggtaaaccagaaggtatcaacaacaatcagctacgttacagctacgataatctgatcggctccagccagcttgaactggacaaccaagggcagattattagtgaggaagagtattatccattcggcggcacagcgatgtgggcagccaatagccaaacagaagccaactataaaactattcgctattcaggcaaagaacgggataccaccgggctgtattattacggttaccgctattatcaaccgtgggcgggcagatggttaagcgcggatccggcaggaaccattgatgggctgaatctataccgaatggtgagaaataatccagtaagtttgcaggatgaaaatggattagcaccagaaagaggaaaatatactaaagaggtgaatttccttgatgaattaaaattcaaattggcagccaaaaattcacatgttgtcaaatggaacgagaaagaaagtagttatacaaaaaataaatcattgaaagtggttcgcgtcggtgattccgatccgtcgggttatttgctaagccacgaagagttactaaaaggcatagaaaaaagccaaattatatatagccggctcgaagaaaacagatccctttcagaaaaatcaaaaacaaatctttctttgggatctgaaatatccggttatatggcaaaaacgataaaagatacgatatcagaatatacagaagggcataggtatagaagcaatcatcccgatttttatgcagcaacagatttctttgctttaatggataaaagtgaaaaaaatgattattccggtgaaagaaaaatttatgcggcaatagaggttaaggtttatcatgatttaaaaaataaacaatcagaattacatgtcaactatgcactggctcatccctatacgcaattgagtaatgaagagagagcgctggtgcaagaaacagaacccgctattgcaataaatagagaatataatttcaaaggcgttggtaaattcctggcaatgaaagcaattaaaaaatcattgaaagggcagaagatcaataaaatatcaacagaggctattaatattcgctctgcggctatcgctaagaatttaggaatgcggagagcttcataa

SEQ ID NO: 7906 - DNA, 105 bp, Photorhabdus luminescens
gtgactgcttcccgccgtaaagagggtttacggcggtttttgctaacaactctgcatactcggattcacttgcgcccgaattttgatgatttttgttctatctga

SEQ ID NO: 7907 - DNA, 297 bp, Photorhabdus luminescens
atgaccacattagcaaatgaaagaatcaccacaagggtgagttcagagaccaaagagctacttgaaagggcgttatcactatcagggtatgcaagtttgaatagctttattgccaatgctgctgtagcagaggcaaaaagactcattgaacaaaatatgcgtattcaattgtgtcaagaagatgcattggcatttgttcatgcattggaaaaaccaatcaaagtaaacgaacgtttccttcgtgctgctcgtagacataaagaaacaataaaaaatgaagatagaacgtctagataa

SEQ ID NO: 7908 - DNA, 435 bp, Photorhabdus luminescens
ttgaaggcagtatcgggacaacatgataaaaaggacttatcaagaacattcgtccttacaagtagtcaaaatggatctcaaataaagggatactattccctagcactatgcacggtagagctagacgaactaccagagaaaatatcgaaaaagtccccttctacactacattgcgcacttattggtcgcctagctataagtaagtcatttcaacgccaagggtttggtgaaatattgcttatagatgcaattcgaaaagctatagagtcgtcaaaatctattcctaccccgatgattatcgtcgatgcgaagaacgacatagccaaaaaactgtatatgaacgtagggtttgaggagtttcctcagacaaagagcaaactgttcatgtctatggctgttgcaatggaaatgataaaaagagtagatgcgatgtaa

SEQ ID NO: 7909 - DNA, 1077 bp, Photorhabdus luminescens
atgtctaaaatttttgatttcgtaaaaccgggtgtcatcactggtgatgatgttcaaaaagtgttcgctatagccaaagaaaacagctttgctttaccggcggtcaactgtgtaggtactgattcaatcaatgccgtgttggaagccgctgccaaagttcgttctcccgttatcattcagttctctaacggcggtgctgcttttattgccggtaaaggtttgaaagctgaaggtcaacaaacggctattctgggttcaatttctggtgctcaccatgttcatcagatggctgaacattatggtgttcctgtgatcctgcatactgaccactgcgcacgtaaattgctgccgtggattgatggcctgttagatgcaggtgaaaagcattacgcagcgacgggtaaacccctattctcttctcacatgattgatctgtcagaagagtctctggaagagaatattgagatttgcagccaatatctggctcgtatggcaaaaatcgatatgacgctggaaatcgagttgggttgtactggtggggaagaagatggggttgataacagccatatggatagctctgctctgtacactcaaccggaagatgttgcttatgcttatgagaaactgaacgctatcagcccacgtttcactattgcggcttctttcggtaacgttcatggtgtttataagccgggtaacgttaaactgacgccaaaaattttgcgtaactctcaagactatgtttctgagaaattcaatctgccacataacagcctggattttgttttccacggcggttctggttctactgcggaagagatcaaagaagcggtcagctacggcgtcgttaaaatgaatatcgacactgacacccaatgggcgacttgggaaggtattctcaactactaccaaaagaacgaaggctatctgcaaggtcaactaggtaatccagaaggcgcagataaacctaataagaaattctacgatccacgggtatggctgcgtgccggtcaggtttctatggctgcccgtctggaacaggcattcaaagaattgaacgcgattgatgtattgtaa

SEQ ID NO: 7910 - DNA, 1164 bp, Photorhabdus luminescens
atgtctgtaattaagatgaccgatttagatctggcgggtaagcgtattttgatccgcgctgacctgaacgttccggtaaaagatggcaaagtcacctctgatgcgcgtatccgtgcttccttaccgaccattgaggcagcattaaaacagggcgctaaagtgatgatcacttctcaccttggccgccctactgaaggcgaatacagtgaagaattctcgctgaaaccagtagtagactatctagaagagaaattatcttcccccgttcgactggaaaaagagtatctggaaggcgtggatgtcgcggaaggtgaactggttgtgctggagaatgttcgctttaataaaggtgagaagaaagacgacgaaaccttagccaaaaaatatgcttccctgtgtgatatttatgtcatggatgcattcggtactgctcatcgtgcacaagcttctactcacggtgtggctaagtttgctccagtggcctgtgccggtcctttgttgtccgcagagttagaggcattgggtaaagcgttagataatccagcccgtccaatggtggctatcgttgggggctctaaagtttcaaccaagctgaccgttctggatacgctgtctaaaattgctgaccaattgattgtcggtggtggtatcgcgaatacctttgttgctgcggaaggccataatgtcggtcgttctctctatgaagacgacttgctcccggaagcgaagaaattgctgataagctgtgatattccggtgccaaccgatgttcgtgtggcaacagaattctctgaaacagccgaagcaatcttgaaatctacccacgatattaaagatgatgagcagatcctcgatctgggggatgaatctgctcaacggctggcggatattctgaaaaacgccaaaacgattctatggaatggcccggttggtgtatttgaattccctaatttccgtcaaggaactgaaattgtcgcgcgcgccattgctgatagtgatgccttctctatcgccggtggcggcgatacgctggcagcgatcgacttgttcggtattgctgacaaaatttcttatatctctacgggtggtggtgctttccttgagttcgtggaagggaaaaaactgcctgcggttgtgatgttggaagaacgtgcaaaacagtaa

SEQ ID NO: 7911 - DNA, 1020 bp, Photorhabdus luminescens
atgacaattaaggtggcaataaacggtttcggcagaatagggcgtagtattttacgtgctctttatgagtctgggcgtcgggctgaaattgcggttattgctgttaatgagctggcagatgccgaaggaattgctcacttgctgaaatatgactctagtcacggccgttttgcttgggatgtgcgtctgaataatgatgtgttgcaggttggtgatgataatattcgtttgtttcatcaatctgatatatcgatgctgccttggcaagaactggggattgatattgttcttgattgcagtgggatttatggcagcagagccgatggtgaggcacatcttgccagtggtgccaaaaaagtgctgtttgctcatccgggggggaatgatttagatgcgactgtggtttatggtgtgaatcagcatttactgacagcagaggatcgcattgtgtccaatgcttcctgtactactaattgcattattcccatcattaaattattggatgatcaatttgagattgaatcgggtacagtgacaaccattcatgcttcaatgaatgaccaaccggtgattgatgcttatcacaaagatttacggcgtactcgggctgctagtcagtctatcattccggtggatactaagctggccgcagggataacccggatttttccaaagttctgtgaccgttttgaagctatctccgtgcgtgtaccaacgattaacgttacagctatcgatttaagtgttacggtaaaatcttcagtaactgttaataaaatcaacgaattaatgcaaaaatcagcagctacttcatttcgtggtatagttgactataccgaattgccgttagtttcaacggattttaaccacgatccccacagcgcgattgttgatggcacacaaacgcgagtcagtgggcaacatctgattaagacattagtctggtgtgataatgagtggggatttgctaaccgaatgttggatacaacgttagcaatggctgctatgggtttcaaatga

SEQ ID NO: 7912 - DNA, 204 bp, Photorhabdus luminescens
gtgaaccagatttctccaggccctattgatacggacatgaaccctgtcaatggttctaatgctgatttctggcgcagacttactgtccctggctggtatggctcaacaactgatattgcagccgtcgtgagctttttggcaagtaaggaggctgattttgtcactggtgcggatattgcggtggatggtggaacaaatatttga

SEQ ID NO: 7913 - DNA, 168 bp, Photorhabdus luminescens
gtgcgcatgttgatcatcggcgctacctttgctgcattcacttacttcacacccattcttaaagatattacgggttacagtgatcgggcagtagcgagtttattgtttatctatggggccgctactgtgatcggcaatgacaggtttgacgaaaggactggcgcgtga

SEQ ID NO: 7914 - DNA, 330 bp, Photorhabdus luminescens
ttgcaggttgtagaagatgtaaggcacacctatttgtcggctgggagtggccccaaggtttggatgagtggcgatgagtatcacattttgctcgatgcaaagagcagtggaggcatgatgacactgctggatgctctagtgccgctgacaagcggccctcccatacatacccataaggatgttgatgagctgtttttcgtactagatggtgaattggaaattatggccgatggtgtgttgcatcaagtcacggcggggggcgcgtatttgtcaaacggggcatcccacacgctttcatcaaccgtacccgcgaccctgtgcgcatgttga

SEQ ID NO: 7915 - DNA, 366 bp, Photorhabdus luminescens
ctgctcgacttcaacttagatgcgaagacattacagcgtcatatccgggcaggatatcgtcatcctggagcgcacttcttcctccccgatggtaccaaggtggttgttttgtctgcaatagtgccccatggcgtagatataggcgtccctaatttgcctggatgtattgttcaaaccgcgtcaggcattttcattgcgacggctgatgagtggctgcaattactcacagttgaagtgaatggtgtcgagagtcccgccgtgcctaatactatacccgagattttcagactggcccgtcagatgactatcagagatgaaatagcgtccaatacacaagaccaaatggcttgtgttaccgatttctag

SEQ ID NO: 7916 - DNA, 597 bp, Photorhabdus luminescens
ttgggatcagcacaaccggcaaccgacggtgtggtcacgatagatcttcaacgtttaaatgtgcttcgtgagatcgattgctcatcagggtgggcggtgattgaatccggcctcacacagatagaacttgcacgttttttggtcggtactgatcggatgctgaatgttacggcatcctctggccacactagcgtggttggaaatgcacttgatcgtggtgttggtctgcgtcgtcagcggattgatgatctcgccgggctggaggttgtgttaccggatggtgaagtagtcaaagtggggtggtggccggatgaatccaggaaaactgccgtcaatccgtatgggcttggacctgctttattgcatctgttcacacagtcgaatcttgggattgtgactgcggctgtcatcaaactgctcccacggccagagaggcagtgtattctgagattgacttttcctcgggagaaccttcaagcagcgattgcagaattgcggcggtgggtagctcaagagcttgtctctggtgttctcaaaatttatgacaccatttccactgagtcgtatggtggtcggtgtaccacaagatctcagtaa

SEQ ID NO: 7917 - DNA, 162 bp, Photorhabdus luminescens
atgtcacgctgcctaaattggctaacattccgccagcatacagatgatgctgtcactgtaataaaggccccaacagcaccttacagctctgtggatctagtcttgatgaaggatgtggaaccttcaaagtcagaatcttctcgcttgagcgtatttttataa

SEQ ID NO: 7918 - DNA, 594 bp, Photorhabdus luminescens
atgtctcgacgagggagaccccccaatttcgaccgggacatcgcactcaaacgtgcgatggaagtattttggtcaaaaggatatgaaggtacacagttagtcgatctcaccgcggctatggacatcaatccaccgagtttttatgcagccttcggaagtaaaaagaacgccttctgcaaagcagtcgacctctacattaagacgatcggtgtccagtcaatgcaagcactcaatgaagcaaaaacagcacgctcagggttgcgcgcgatgctggagagtaccatcaatatcgcctcttctcatcaagctggaggatgcctgcttgtcttgggtgttgtgaacaatctaacggaaaacaaagaagtatgggcttatctcagggatgcacgtaccaaaaccctagatatgatccgtgttcgcctggagcaaggaatcaccgacggtgatctcccacccaatacaaacgtggatgtgttggcgtcgtatttccttggtttgacccaaactatttcattccaagctcgtgacggcgtacctcgtgaacgacttaggcgcttgattgaacccgcaatggcagctattccaggcaactga

SEQ ID NO: 7919 - DNA, 474 bp, Photorhabdus luminescens
gtgtcaaccgagaaaacttcggcgttcgaggtattcactgagatcacattggcggtatttcggctcaacgccctactgctctctaaaggggatcagctcgttgccccgttgggaatcacgagtgcgagatggcaagtacttggtgcgattgcgcacgcaccacatccacttaccacgcctcagattgccgccgcaatgggtatcacacgccaaggagtgcaaaagcaattgaatctcgggctgagctcagggatggtgaaaaccatcacgaaccctcggcatgaacgctcaccactctatcaactgaccgagcttggtcggcgtacttttgatgcggcgatatcgctggaagctgagtgggtcggatcactggtgcaatccacggatcctaacgagctaaaagtgacattaaacaccttgataagcctggagacgaagctggaagagtcaccagtaccaaatagcactatataa

SEQ ID NO: 7920 - DNA, 372 bp, Photorhabdus luminescens
atggtcaagctagaagaaatggacacccacgtaaccctgcgggaacagttattttcgaacaccgatggctccatcgtgctggtgaacatattccatgttgatccctcaatggctgacaccctaatagaaacctggaaggaagatgcagaatatttccggtctaaggtaggactgatttccgcacaattacatcgcggaatcgctggcagcggcacattcatgaactacgccatttgggagagtctggagcgtttccgcgccgcgttcacggaccctgaattcaaggagaaactcgccaagtatcctgatgggattgtcggttcgcctcacgtattccaaaaagtagccgtccctggaatttgcgtggcataa

SEQ ID NO: 7921 - DNA, 138 bp, Photorhabdus luminescens
ttgcgtggcataagccaaggaaaatcgtcacaatccatcgtcaataacgatatcgtgcagaaaaagagcgcacccgctcaatgtttacctcaggtgcgctcattcatgaatttactgattatttcagcaaagctttag

SEQ ID NO: 7922 - DNA, 1995 bp, Photorhabdus luminescens
atgaccactcgtaaaacccttgctaatgctattcgcttcctgagcatggatgctgtgcagaaagcaaaatcagggcaccctggtgcacctatgggaatggcggatatcgctgaagttttatggcgtgattatttgaatcataacccaactgatccacattgggtcgatcgtgatcgttttgtattgtctaacggtcatggttctatgctgatttatagtctgttgcatctcaccggttatgatgtttcagtcgatgatctgaaaaatttccgtcagttacactctaaaaccccaggccatcctgagtatggctatactccaggcgtagaaactacgacaggtcctttagggcaggggattgccaacgcagtcggttttgcgattgctgaacgcactctggccgcgcaatttaaccgtcctggtcatgagatcgttgaccataatacttatgtctttatgggtgatggctgcatgatggagggcatttctcatgaagtttgctctctggcgggaacgttaaagttaggcaagttggttgctttctatgatgacaatggcatttccattgatggtcatgttgaaggctggtttacggatgatacggcaagccgttttgaggcgtatggctggcatgtgattcgcggtgttgatggtcataatgcagattcagttaaagctgctatcgaagaagcacgtaaagtgacggataaaccttctctgttaatgtgcaaaacgattatcggttttggtgcgccaaccaaagcgggtacccatgattctcatggcgcgccattgggtgatgcggaaattgctgcgactcgtgaagcactcggttggaattatccggcatttgaaattccagcggaaatctattctgagtgggatgccaaagaagctggcaatgtgaaacaagccgcttggaatgaaaaattcgctgcctatgaaaaggcgtatcctgaattagcggctgaatttaaacgtcgtaccagtggtgagttaccggcaaactgggaagttgaatcaaaagcatttatcgaacagttgcaaaaaaatccagccaatattgccagtcgtaaagcatctcagaatgccttggaagcttttggtaaggtgttgcctgaatttatggggggatctgctgatttggcaccaagtaacctcacgatgtggtcaggttctaatccgttgaacgaagatcaggcaggtaattatatccattatggtgttcgtgaatttggcatgtcagccattatgaatggtatcgctctgcatggtggttttgtgccttatggtgcaaccttcctgatgttcgttgaatatgcccgtaacgccgtgcgtatggcggcattgatgaaaattcgcagcatctttgtttatacccatgactcaattggtttgggtgaagatggtccgactcaccagccagtagaacagctcgccagtttgcgtgtgacgccaaatttgagcacatggcgtccatgtgaccaggttgaatctgcggtggcgtggaaatacgctatcgatcgtaaagcaggtccatcagcacttattttctctcgtcagaatctggcacagcaagaacgtactgctgagcagttggctaatatcgagaaaggggcttacatcctgaaagattgtcaggggcaaccagaactgattttgatcgcaacgggttcagaaattgaattggcggtgagtgcttaccaccaattgactgaggaaggtcgtcaggtgcgcgtagtctcaatgccgtctactgatgcttttgataagcaagatgctgcataccgagaagcggttctgcctgctgcggtttctgcacgtgttgcagtcgaagcgggtatcgccgattactggtttaaatatgtcggtatgaatggcgctatcgttggtatggatacatttggtgagtcagcacctgctgatcagttgtttaaaacgtttggtttcactgtagagaatgtggtcgctaaggctaaagctttgctgaaataa

SEQ ID NO: 7923 - DNA, 783 bp, Photorhabdus luminescens
gtgaccggggtgagggagtgcagccaacaaagaagcaacttgaaagatgacgggtatacagacaattacttaattaacagtcagggtactttcatgtcaaacatcagaaaaagaccaaataatatcaccccgcaattaatttacatgtgggaaaaaagtaatgagccgtggggcgctaaagatcgccaatcaaaatttatatacgcaaatcctgctttttaccaactgctcaatttgcctgaagatttcgatatttcaggactttcaacggacgaattaccttcacctattgcagaatatacagaagaatattgtcgtcaggatcaaaaagtgatgcaaaccatgaaaacagtcacttcacttgagacgcacctttttggaggaaataaagtcaagcaaacctatcgctgtagtaaatacccactttgcgatgaaaatgggaactgcatcggtatcacgtttcacatgtccaaagcgcaaaacttttcgactgcttactatcatgaaaaatcacctccagcggctttggaatttacaccgcctaacgacatactcacccaaactgaatgggaagttctttttctagcccttcgctcaccggatgaagagagtatcagcaaagaattaatgataagcacagaagatgccgttaatcatattcagtcaatttatcaaaaatttaatctaccactgcatataaaattaaaagatttctgcaaagcaaataagtttgatctatatattccagaaagattcgtcactattggtagccaagagttgtaa

SEQ ID NO: 7924 - DNA, 267 bp, Photorhabdus luminescens
atggatattcaagactggcatccggcagatattattgcagcactaagaaaacaaggaacaaatctttcagccgtttcccgcaaagccggattagcatcctcgacattgagtaatgcattacatcgcccgtggccaaagggagaggcattaatcgctactgaattgggtttacatccatcggatatttggccatcacgctataagcctggcaaagaaaataaattcctaataagaattgcagaaacaagcactatagaaagctggtag

SEQ ID NO: 7925 - DNA, 747 bp, Photorhabdus luminescens
atgagcacggcaattacacgacaagttgttcttgataccgaaactaccggtatgaataaattaggtgttcactatgaagggcacaaaattattgaaattggggccgtggaggttattaaccgtcgtttaaccggtcgccattttcatgtctatattcagccggatagattggtcgaccctgaagcatttgaagtgcatgggatcagcgatgaatttttgcaagataagccgctgtttgctgacattgcagatgagtttattgaatttattcgcggcgctgaattgattatccataacgctcccttcgatatcggctttatcgattatgagtttggcaaactgaatcgtgatattccgccaactgcggatttctgcaagattactgatagcttacaacttgcaagagggctatttccggggaaaaggaataaccttgatgcgttatgtgatcgttatgatatagacaattctaaacgaaccttacatggggcgttactcgatgctgagatattgtctgatgtctatttgataatgaccggcgggcagacttctcttgccttttcaatggaaggagagattgctagcggtgcgaatgtttctgaaatacagcgtattacccggcctcaaatggcattaaaagttatttatgcaacggatgaagagctcgctgcacatgaatccaggttggatttagtggagaagaaaggcgggagctgtttatggcgtatgaatcttggacaaagctaa

SEQ ID NO: 7926 - DNA, 471 bp, Photorhabdus luminescens
atgggcaagcaggtagaaattttcaccgacggatcttgtctcggcaatccggggcctgggggctacggtgtgttattacgttatcaacaacacgaaaaaacccttagcgaaggtttttatcatacaaccaacaacagaatggagctgatggcagcaattattggtctggaaacactgactcgcccttgcaaaattgtcttaaccaccgacagccagtatgtgcgtcaaggcattacacaatggatccataactggaaaaaacgtggctggcgtaaagcagataaatctcctgtcagcaatgtcgatttatggcagcgtcttgatcaagccattagccgccataacattgattggcaatgggtcaaaggccacgccggacatgatgaaaatgagcgttgtgatgaactggcccgcgccgcagcaaactcaccaacagaaaccgacacgggatatctcgaaaatagagattaa

SEQ ID NO: 7927 - DNA, 714 bp, Photorhabdus luminescens
atgaaatctgcacatacaatacagaatataaatcccccggcttcttgggctgatttaccttggggggagtattaccgtgccgctttggagcgccaattacaaccctggtggccaaaaatatttggtttccatctgctgaaagtcggtaatttgagtgctgaaattgacagtaatggctgtccgatttttaatcagattaatgtcggtagggaaggcaagaatatgcaggtgattagcgatccttaccatctgccgtttgaagaaaagtccgttgatgcttgcttactgagtcatatgttggcttacagcgctgatccccatcgtcttttacgggaagttgaccgggtgatgattgatgatggctggctcattatcagtggttttaattcattgagtctgcttggtttggggaaattagtaccgggattatggcgtcatcaaccctattgcagccggatgttttccatgatgcgccaacttgattggttgagcttgcttaattatgaagtggtgtatcgtgacagctttcaagtattgccctggcgaaatgaaacaggtttttctaatcggcacttgtctgtattaggctgtgtcagtctgattattgctcgcaagcgcacactgccattaacactaaaccagagaaaagtgacgcgattaaaacctaaattgggcaatgccgttggcgtaacaaaatgttaccggaagcggtaa

SEQ ID NO: 7928 - DNA, 753 bp, Photorhabdus luminescens
atggagcttatcagcattcctgccctttcggataattacatttggttactttgtgacgaaaatagacatgttgtcatcgttgatccggcagaatcacaacctgttcttgataccttggaatctcgtggctggatacccgatgcaattttacttacccatcatcatcacgatcatgttggtggcgtccctggaattattgatcgattccctgagctactagtatacggcccagcagaaacccagagcaaaggtgccaccatcatagtatgtggcggtgatagcatcaattttggtcatttttctttccagatcatcgatgttccaggccacactctagggcacattgctttttatcaagcgccttatctcttttgtggggataccttgttctctggtggctgtggacgtctctttgaaggcaccgctgagcaaatgtatacatctatcggaaaaatagctgagctgcctgatgacacactcatctgttgtgcccatgaatatactatttctaatatgaagtttgctcatgctgttttacctaatcagactatcagcgaataccagcaaaaagtaatcagaatgagggaaaataatcaaccaacaataccaaccacattacaaactgagaaaaaaatcaatattttcttaaaatgtgatgatattgatttacaaagaaatattggcattacacccaactctcaaccgctttccgccgttttccaccaactaagaagacaaaaagatcaattttga

SEQ ID NO: 7929 - DNA, 1362 bp, Photorhabdus luminescens
atgaagacaaaagcgattctgttcgcatctgtcttgctggttggctgtcaatcagggcctgattggtcgacgacagccggacaacgggcacagaattcgtcttcaacgagtctaaagaccggcaagatagcaactgataataccaatcagcttgctgcttactggggagagggtgattctggcgctcagcatgagctgtggggatatatccgtgatgagttgaagatgaaaatccctgataactacagggtacgtgaacaacgaaattattacctgaaaaacaagagctatctccacgatgtaactttacgggctgaaccgtatatgtactggatagtcaggcagataaagcaacgcgatatgccgatggaactggtactggtacccatagtggagagtgcttttaacccgcatgctacctcacatgctaaggccgctggtctgtggcagattatcccggatacgggtcgcaattacggtcttactcaagataaatggtacgacgcacgtcgggatgttgccgcatcaaccactgccgccctgaatctgttacaacgcctgaataaaatgttcaatggtgactggttattggctattgctgcttataacagcggcgaaggccgtgttatgcgcgcaataaaagaaaaccagataaaaggtaagccaacggatttctggtcattatcactaccacgggagactgcgctctatgtgcctaaagttctggcgctcagtgatgtcatccgtaatagcgataaatatggcattacgctgccaaaatccaataaccagcgggcacttgctcaaattgatgttggtcaacaaatcacgctgtctcaagccgcagaactggctggcatgtccctgacatcgattaaagcctacaaccctgggtataagcgaggagtgacatcacctaacggcccgcattacatcatgctgccaaaggcaaaagttaatcagtttaaaaactcgctggcaaataaaacagttttgagcaatattcgccaagaagttgctaaaaacaaccaccgactgagtaaacaaagccaatataaagttcgttcaggtgatacattatccgctattgccaagcggtttaatatttccacccgtgaattacagcgcttgaataatctgaaaaccgccagattgttaaaaatcggacaattattaagggtaaataatgacaatgctattatttaccgtgtacgccaaggtgattcaattgccagtatagctaaacgtcatggcatcaatattaaggatttaatgaactggaacgatggtataaaaacaacagatatcaagccaggaattgaactaacgctttatatcaatgaatattatgatgaagcataa

SEQ ID NO: 7930 - DNA, 186 bp, Photorhabdus luminescens
ttgattggcgttcgcattgttgatgatgttgtcataatgatagtccttagttgtggtaacagaacttttgtttatttttttgtatctttgaaatgtatattgccgatattacatgtggtgcttattcttatattgttttcttatagtgtattaatcttttttttcgttttattagaatttggataa

SEQ ID NO: 7931 - DNA, 846 bp, Photorhabdus luminescens
atggcacgctcctatctagagggagatgatcttatttttactgacaaagacggctttaaccgagccctccgggatggttttttcctcctgaaagcaccatcatatatggattttgaacacggcgatcgatttgcataccacttctttgaacccgccacagaaggtgaccttcgcccctatacgggattcaaatcatatactttttccaatagttacgaaggttatttcgacagagaacatgatcaatgggaacatttccgcctcgaacgggaaaattggcacctcatgccatcagaggtcgcaacactaggtcaccatatggcacacatcggtatatgtgtactacgctctgtgctaacttatgttggtattcctcgtcgtgattgggaactcattactaatggtatttcagaagggctaagaaaccagatgttatcgtttaaccacttccgatcagagaaagccatccgaggctctaaatttcatcgggattcaggatgggtgaccgtcctaagatcaactgaacgtggccttcttgcctatataaatgatgagcttttagctattgagcctgttccaggatacctaataattaactttggtagttcgatcgaagtgctgacagaaaatttaaccccgaatgttcgagccaatatacatggcgttgctcgcacagaaagaaataggcaacgcgatagaatgtcatatgtcatgtttttagttagcgatctggctggcaatgtctacaaatatggtcccaacggccccatcaacgttcaatctgttaaagagtttgttatccaagaagcgagtcgaacatacgatgatgataatgacgctttgtag

SEQ ID NO: 7932 - DNA, 1182 bp, Photorhabdus luminescens
atggataaagaatttcgcaaattaatattagcctcttcagggaattctttcaccttgtatttggagatgataatatcatttacgttaattacatatcactggaacggtggagcaatatactcatcgttatatacaatttcatatgctgcatcgttactatttctaacgccctatgtttcgtcatttgtagatgaaaatataaaacccaaaaagtacattattatcatttcgttactttgcggtgttattaccatttttcaatacaatattgatgacatgaatatatatattctttattcttttattaaaaacatcctgcgtttatttttagggccttctaattttaaaatattaaaaaacatatcaaccaatcaatttgaaaaaaactttagttattggcaggttttatttcaaatatacaaaatgttagccccgttatttttaggttttattcttatctattactcaacaaaacagattcttattttaatatcaatgctttattttatttcagcagtcttatatatttttgtttcagaaccgttgatcaatgttaatcgcaaaaaaaacaagatatcactaattaattactttaatataatgaaagataataaaatattgttttcatttattgttatttccactttaacttgttttggctatctatcagatagcttaatagctcttagctttatggcgcagggattgaatggcagccattatagttttgccatgtgtctttcaggtatttcaggtgttttaattggtttagtatttggaaagtataagattaacatatctttaaatactatgttatcttcattctttttgtggggaacggggtatcttctaataggaatagcaaatcaatttaacgacttatttcctgataaaatcaatttattttttatatttttagcaatggcaataataggaatgggatcgtccatgaataatattattattaccatttatatgcagaaattcgcaactaatgataactcggctaaaatatttggcttaacgtcaatttctgttggtttttctatgtttattggccctttgataggttccacaatatcttatcttttttccataagcatcgttttttttacaacatttataggtatttttttaactataattggggttattttaataaatcgtaaattcacgtcatga

SEQ ID NO: 7933 - DNA, 537 bp, Photorhabdus luminescens
ctgccatctgggtatagtatgtatcacatgggaaaaatacgagatctcctttgggattatgacatttcagctccattgggtgaacttggtgaccggcattggattctattgatagcatcatggtttgctgttttagatagtttaattattcaaccgtgtttattacaaggtaaaattattatatgtgatagttggtattataaatatttagcaagattcttacttaaatccacggaattagcaaaattaagcaaatcggctctatctataaacacaaaaccagacatggtgatatatcttgatgttcctccaagtattgctgaaaaaaggaaagaaatattaaaacctagtgaatctggaaaattagagataaatgaaaaatatgatttcatagaataccaaaaacacgttcttaatcaataccagacgttttatgatgacacttggaaaattattgatgctgacacattaactaaagatgcagtaattaaatcaatagtagatgttattcaattggaaatactaaaaagaaggtaa

SEQ ID NO: 7934 - DNA, 1134 bp, Photorhabdus luminescens
atgaacactatagaattaaaaattagagtattatgttctggattaaagtatgataaaaatgtgatatatgaatacagtaaacgaaatttcattcctaaaagaagggcgtatggaacaagtgatagttctaaattagaaacaacacattctgtacctcaagaagttattttagaagatggtacaattattgcgtgtaattataatgaaagctctgattatgatttaatatataaaaatggagatttttatataaaatccggtaacattttgtttaaagttatatttcctattaaacctgatatatatggtatggaacttttagatggcagtagagtagaagaatacgtcacggtgtacggtgatacaactttgggttttttctctccagggcattgttattattttaatgatggccgtcagtgtaaattttgttcattaggtgaagctagaaatagtttatcagatcataaaaagtctattagaccgtcaaaagtcattgaagttatgaatgtaatagaagctaataacattagtagatataaaagaatactcatcaatggtggtacaactcgtaattatgatattggttttgaaatgcacaaacaattattagtttctttaaaacctttttgtaaaaaaaataatcttaacagccatctaatatcaatgccccctagagacttaaataaaataaaggggatttctgagtttgttgatagctgggctattagtttagaaatatttaaccctaaattatttgatcagatatgtcctggtaaatctcaggactatgggagaaataatctattagaagcatacctggctgctgtttcagagttaggtgaaggcaatgtttatgttgggtttgtagcgggattagaacctttaaatgatttagtaaaaggaatggaatttttttcaaaaaatggcatagttccagcagtagcagtctttcatcctgatcatggttctgaatatcaaaatcaccctagacctatttttgaagatatttataaaacatatgttgagatgcataaattatatcaaaaatatggattcaaaccatttattatcggtagtggtagaaattcacttgatactgaagcgtactacggggaaaaaagaaatgattaa

SEQ ID NO: 7935 - DNA, 846 bp, Photorhabdus luminescens
atgaggtatgtattcagtaatgaagttagcaattatttagaaatacaccttcacaaactcagagaagagattcgtagaatatggcttgctaagctttccactattcatatcggatatgataacaaatatcatggcgaaacagtagaaatagatatcattttaaataatataatttacgagcacttagataaatcagaactcaaggtcactattatttcagaagacgattctgaatcacaatctgtcaatattaaagataaggtttccttactaattgatcctattgatggtactcataacttgcttatgggttatcctgcctatactacatcaatagctgtttacaagaataatagatatattatgggctgggtatatgatattccaagagatattatatataaagcatcattgggagaaggttcttatatacaaagcatatataccagtaagcgaatatatacaagcccctcatttcaactaaacgatttgagagtatcatttcatagggcgagaaataatcagtatacagaggttcagaataaaattattaatgaagcaaataaagtaagaatctcatcttgttcaagtttagatatatgcctgatcgctagtggcgttctacatgcattcttagatttatcacttatgggtcacgaacgttgtgtagatatagcagcagctaaactaatccttgaggagtcagggggatacataatgactcgtgatggaaatagttataatatcctatcacctacagattctttattttttgagaaaaaagcaatcatagctgtttcttctaaaagtgcaggggatacaatattagaattaatgagggtataa

SEQ ID NO: 7936 - DNA, 1035 bp, Photorhabdus luminescens
atggggaatgcaatggaaagaataaagattataagtaggcaccactgctggagaacattaaagggaactaaaaccaataattttcaagaatatttaaaccaaataaataatggatgccaattacaagaaacaatatttcatctacgcgatgcagaagaaatgttaatggacttaagtaatttgtcatcacctatgtcaagattatcaagcactgaaataatacacatttgggatgaactagttgattatttaaatataaataaacttacctctgatatgggtaacttagtaaatggatatggcttagatccagaattagccttatatggtactgagctatgcgagttaaaaataaatagagaaaaaatcctatccgaaataataaacaaaggaataacaaataaattagaattaatatattcaagagggcttgataagtcagtgaaattaaaggatgctccacaaaaaacaattgatttatatgatgagtttcgttacgaatacagtaaaagtattaatttattttcattggaaacttgccccacattaaacatagaaaacatttaccaagatcattacctgtgggataagatttttacgatagctaaaaacaaactatttattatttcggggggaatccctcttgcgttatcttatcatgcaaaaacactggacaagaatatatacttttgcgaaatacatcgtgaaaatgatagtggtttactgcataaaagaaaattatttaatgaaatatacccaaaatttaaaggaaaagaaaacgaaagttggctgataattgataaatcctatacaggaggcagtattcagttagcttacaagatgcttgtaaatttagttgggtacaaatcgcaaatatataaagtatcattttccccaaaaacgttaggagcattttcatcgtcagattatgcaatttatgcaggcagattatttgatgtaaaaaagacaatagcatatttaacagccgaggattggcataaaaaactcatctatttgggagataatgtcacatga

SEQ ID NO: 7937 - DNA, 1044 bp, Photorhabdus luminescens
atggacattattaacgtaaaaagggaaataacagtaataataaataaaagatttaatgatactgatctgtatacttgctacttgtcaggttcagtcattgaagggtttgcaacaccaaaatctgattatgatgtctatgttatattggaaggagatctggaaatagaatgcgaagagatatttataccatccgatataggaatgttagaagtgacaataatctctttaaaagagataaaagaaatcatgaagataatcaacaatggaggttcaaattccgattggtataaattacatttgtctcataggatattaacaggggaatcgattataaagtcaaataattttaacaaattgaaaggagacataaataagactaaattatgtgaaatacttaagaccaaagcaaaaaactttggagaaaagtgtttttccgatgggattggaaatattttaaataatgacctaatatcagcagcattcaactttgaacgaacagttaattcagcaatggattatattctggcttcaagtggaaacacatccactttagtaaagtggcgctatcaaaatgcaatgaagatgtttggaaaaggccatccaataacatctatatacttgatgatttgttcaaaatttaatgtaatcaatgatatttcaacaattgattacataaactcagttgctaaaatgtggcaattaactttagactattgtcaaggaaaagatatttttggttacaatgtatcttttgcaaaaaaaagaatagctaatacatccgatattttattatcagataaaaataataaaccaataataaaaaatttatggtatagagtcctgtgcaaggatgggaaattaatacttttcgcaaaaaaagcattatgtgaaattaattcagatgcatataaagtttggttagtaatagataatgaaaaaacagagtttgaagttgtttcagagttggaaaaacttggaataactaatgaaaatgctaatttttatatatcggaattcgaaagactaggggcattaacaaaataa

SEQ ID NO: 7938 - DNA, 183 bp, Photorhabdus luminescens
atgttgttatccatgattacccctcttgcactcgccttcgggacaaccgcatttgctactcaggaacttgagcgggtatacgatgataataatgatgttttatcgatcacttctctattgaaagcgcctgacatgttaaatttattttctaacaacctgtttccaataaacttctctctataa

SEQ ID NO: 7939 - DNA, 915 bp, Photorhabdus luminescens
atgcgagctccaattaaactaccattaatgccatctgaaataactgccgcagaaacttataaatcggcaaacatggttcgatcccgcctggaaggagacaaacttgtttttactgatgaagatgactttgatcgagctatccgacacggtttttttctcctggaagttccaccccatatagattttgaatacggagatcgacttgcataccacttctttgaacctgttacagaaggtgatctgcgtccctatacgggattcaaatcatgtactttttccaacggtttcgaaggttatttcgacagaaaacatgatcaatgggaaaatctctatatcgaacgagcgcactggaacttaattccaaccgaggtcgcgacactgggtcatcatatggcacacatgggtacatgtatattgcgctcagtgttaaatcatgttggtattcctcgtagtgactgggaattagtcacaggtggtctttcggaaggacgagggcatcagatgctagggtttaatcactaccgatcagagaaagctacccggggatctaaatttcatcgggatataggatggataacaatcctaagagcaactgaacgtggactattagcttatatagatgatgagcttttggctattgatcctgttcctggtcacctgataattaactttggtagctcgatagaagtgctgacagaaaatttaacgaaaaatgttcgggccaatatacatggcgttgttcgcacagaacgtaatggacagcgcgatagaatgtcctatgcgatgtttttagacaatagcctggctggtgatctctacaaatatggtcccaaaggtccgatcaaagttcaatccgttaaagaatttgctgttcaggaaattagtcggtcgtatgatgataataacgctttgtag

SEQ ID NO: 7940 - DNA, 345 bp, Photorhabdus luminescens
atgaagcgaatggtaggggttaagtcttgcggtttcatcgacatcagtgtgcaggtactcaatgaagtggcgcacgtgtgtgtgcgtaaacttaagatgagttgggaagagatagcggagttcctcgatattgtacgtagtttttgcaaaatcgtgcctcttacggttgaagttcatgaccgagctaggcttattgcagagcgttatcgcttgtcattctacgattcttgtattgtggcggctgcggtcattgcaggttgtcggacgctctatagtgaagacatgaatcacgggcagatgttggaggacagcttggttattaaaaatccattctcatatgtttga

SEQ ID NO: 7941 - DNA, 363 bp, Photorhabdus luminescens
atgtacattcttttagctacaggaaacctgataaaagtcttccccacattcgggttagatgctttggttaagcttgtattttgcaagagtagatatacagtaaaagtgtatatccaaggaggtaatatcatgcaagtagcaaaatggggtaacagccttgccatacgtctgccagctagcttagttgaaattctggaattgcgtgaaggtgatgatattgagattgtagtggatgatccgcgtaccttcgcagtatgcaagaagcctggatctgaggtgttgttggagcgtcttcgaacattccgcggtaagttgccgacagatttcaagttcagtagagatgaagcgaatggtaggggttaa

SEQ ID NO: 7942 - DNA, 1173 bp, Photorhabdus luminescens
atgaacaaaaaagcacaatattcatccactctggaacaaagcacaaaatacacgtttttatttatcctttcagtcactgtattcttcgttggcgcaaccgaattcatgttgtcatccatgcttacccctcttgcagtcgccttcgggacaacggcgatcggagcatcctggctggtatccagctatgcattttcttacgctctggcagcacctatatttgggtatttttcagatcgtattaacagaagcagattacttatgatttctctgctgtttttcgccgcagatggcctcgctatcactcttgcccccactcttaatatcgcaatcacgctgcgaatttttggcggtatagcatcagcggtaatcatacccaccgtatttgccttgatcgccgatatcattccctataatcgccaagccggagcgatgggtatcgttatgctcggtatgacttttggcattgcattcggtccagctttagccgggatattgacagatttaataaattggcaagcgccgtttttatttagctcacttggcagtgtcgttacattcatcatcgggatctactgcctgccatcaaaaactgcgcctctacagccaacaaaccagcgcttagtctggtttcggcaatggtcggttgtcaggccgatcattgcaaaaggggcgtggaatggcaccggcgtctctgcttttcttttgtctggagaagtcttacgtcaacggtacggatttggccccactgaaatcggtctgactgttgcaacctttggtgttggcttagggttaggtaatctgtccgttggttggcttcgtaagctttgcgatcgagaagaagtgattttagttttggtcagtttgctactgactggtgtgatctcagtttttatgctggttccgcttacgctcctaggttctctaggatgtttaatattctggggtgccgcgctgggcgttggagcgcctgcaagtaccgtcgttttggcaacacgagcaggccctaacaaaggtatggttctggcctttgcagaaacattcaataatctggggattttgtgcttagtgccattagccactatcgggttagtcgcaggaggttcaagctcagcaatggccgtgctattcgtcggattggtcatcggtcttacattgacaatattagattgctag

SEQ ID NO: 7943 - DNA, 1386 bp, Photorhabdus luminescens
atggatgtttctgaatctttaaccacagctataaggccaaatttttcgaataaaaaaggcttaattattctggctgctgatattgcgctactacttattctacttaatacgttaccgtttggtgaaaaagctaatgcaggtttagcactaatgatatttgttggtgtgctgtggcttactgaagctattcacgtcacgattactgcattatgtattccaattctggcagttggtatggggttaatgaatacgggagatgcgctgaaatcttttgctaatcccattatcttcctgttttttggtggctttgctctggcaacggcccttcacatccaaggattggacagactgatagctaaccgtctgttgatgattgcccgtggacgtttatctgtagcggtgatgttgttgtttggtgtgacggctggcctttccatgtggatcagtaacacagcgactgccgcgatgatgctgccattagtattgggtattttgtctaatctggatgcacgttctgagcgccatacgtttgtatttgtgctgttgggtgtggcttatagtgcaagtatcggtggcttaggtactttggtggggagcccaccaaacgcgattgcagcggcgcaattgggtatcgatttcttcaattggatgaagtttggggttccgttggtggttattctgctgccaatgatggtgggtgttatgtatctgatgctgcgcccgaatttgaatcataaattcgacatgaagctagaaaaactggattggactggcaaacgtctgatgaccatgctgatcttcttattaaccgtattttgctggatctttagcacggttatcagctctgccttaggaggtgtgaaagatctggatactattattgctgtcagtgctgctgttctgattggtataacgggggtagcgagttggtcgcagattcaaaataataccgagtggggggtgttgatactgtttggtggtggtctgactttaagcgctattttgaaaaactcaggtgctagtgaaatcatggcgaatggtatggccgcgacttttggcgcaagccactggtttgtgattattgttgcggtagctgcgtttattatcttcctgactgaatttaccagtaatacagccagtgcagcattgctagtaccgatattcgcaaccgttgcggaagcgttggggatgccgataatgacgctgacacttattatcggatttggggcatcctgtgcttttatgttgccggttgccacaccacctaatgcgattgttttcagctccggtcatattaaacagactgaaatggtcagagtgggtatagtgctgaatattgcctgtatcgcgatcatctctctgtttgcttggttattctggttgtaa

SEQ ID NO: 7944 - DNA, 153 bp, Photorhabdus luminescens
gtggttaaagattcagaaacatccatggtgactccattagcgccggtgatatctgatccaccattgctacaattgttaaaaaaatacaaggcgtgtgaatataaggagtcttctctgggaatcaaatgccattctttaaattttgagatctaa

SEQ ID NO: 7945 - DNA, 723 bp, Photorhabdus luminescens
atgaaagataaaattatgagtttctctgtaaataaagatctggatgttcattcaaaaagctttgacgccttcatttcatacatggaaaacagcaacgacttttggatcataaaagacaacgaatctcgattcgtctatgcgaatgatattatgctttattacagcggcctccctaagggttttaacatagaaggcaagcttgatagtgaatgtccagcaccgtgggctgagtttgaagatgttatacaagctaatgataaaaacgtaatgacgagtcaaaaaaccattccggtactaaacactttcacttatggcgggagacaaaaaataatccagccattcatggtcgatattacaccgctaatgaaggatgggacatgcattggcattgttggacacggcaaaaaacttgaaatttactccatgtatcattttgaaaataacattcatccagagtcattaacttttggcaaaccaactgatttatttactgatagagagttcgatatagtattttttgcgttgcaatcgctaagcgctaaagatattgccagaaaattaagtattacctatagaacggtacaaagcaggctacatatcatttatcaaaaaatagggataaattcattaagccagttaaaagaatattgcaggggtaagggatatgataactacgctcctacccgatttattaaccctaatccctatatacctctggtataa

SEQ ID NO: 7946 - DNA, 723 bp, Photorhabdus luminescens
atgaaagatgacactatgagtttctctgtaaataaagatctggatgtttattcaaaaagctttgacactttcatctcatacatggaaaacagcaatgatgtttgggtaataaaagacaaggaacatcgattcatctatgccaatgatactatgattcattacagcggtcttcctaaggattttaacatagaagggaggcttgatggtgaatgtccagcaccgtggtctgagtttgaaaatattatacaagctaacgataacaatgtaatgacgagtcaaaagaccattccggtactacacaccttcacttatgtcggaaaagaaaaaataatccaaccatttctggtcaatgttacaccgctaatgaaggatggagaatgcattgggattgtgtcgcacggtaaaaaacttcaaatttattccatgtatcattttgaaaacaacattcatcccgagtcattaactgttggcaaaccaactgatttatttaccgacagagagttcgatatagtattttttgctttgcagtcattaagcgctaaagacatagctagaaaattaggtattacctatagaacagtacaaagtaggttacaatttatttaccaaaaaatagggataaattcattaagccagttaaaagaatattgcaggggtaaggggtatgataactatgctcctacccgatttattaaccctaatccctatatacctctggcataa

SEQ ID NO: 7947 - DNA, 723 bp, Photorhabdus luminescens
atgaaagataacacgatgagtttctctgtaaataaagatctggatgttcattcaaaaagctttgatgccttcatatcgtatatggaaaactgtaatgagttctggtatataaaagataaggaatcgagatttatctatatgaatgattacggacttcatcatagcggactacccaaagggtttaatgttgaaggtaaactggatagtgaatgcccggtttattggtctgagattgctgatattattcaatctaatgatcgtagagtgatggaggaaaaaaaagtcattcctactttgattacatttatgtatggcggtagggataaaattattcaaccatttatggcggacgtcacgcctttgataaaagatggagagtcgattggcgtagtaggcagagctaaaaagctagaaattttttcaatgtatcatatggaaattaataaacctcctgaatcattatcatttggcaatccaactgagatttttacagatagagagttcgatatagtattttttgcgttgcaatcactcagtgctaaagatatagtgagaaaattaagtattacctatagaacggtacaaagcaagttacaatttatttatcaaaaaatagggataaattcattaagccagttaaaggaatattgcagagataaggggtacgataattatgctcctacccgatttattaacacgaatccctatatacctctggcataa

SEQ ID NO: 7948 - DNA, 723 bp, Photorhabdus luminescens
atgaaagataaaacgatgagtttctctgtaaacaaagatctggatgttcattcaaaaagctttgatgcttttatatcatacatggaaaacagcaacgatctttggattataaaagatagtgaatctcgattcgtctatgctaatgatgttgcactctattacagcgatcttcctaagggttttaacatagaagggaggcttgatagtgaatgtccagctccgtggtctgaggttgcagatattatacaagctaacgataaaaacgtaatgacgagtcaaaaaaccatcccggtactaaacaccttcatttatggagggaaagaaaaaatgatccagccgtttctagctgatcttacaccgctaataaaggatggaaaatgtattggcgttgtaggacacggtaaaaaacttgaaatttattccatgtaccattttgaaaacaacaggcaccctgactcattaacttttggcacaccaactgatttatttaccgacagagagttcgatatagtattttttgcgttgcaatcactcagtgctaaagatatagcgagaaaattaagtattacctatagaacagtacaaagcaggttacaatttatttatcaaaaaatagggataaattcattaagccagttaaaggaatattgcagagataaggggtacgataattatgctcctacccgatttattaaccctaatccctatatacctctggcataa

SEQ ID NO: 7949 - DNA, 723 bp, Photorhabdus luminescens
atgaaagataacactatgagtttctctgtaaataaagatctggatgttcattcaaaaagctttgatgctttcatatcatatatggaaaacagcaacgatttttggatcataaaagatagcgaatctcgattcgtgtatgctaatgatgctacactttattacagtggtctcccaaaggggttcaatatagaaggaagacttgatattgaatgtccaggaccgtgggttgattttgtagatgttatacaagctaatgataaaaacgtaatgacgagtcaaaaaaccattccggtactaaataccttcatttatggtgggagagaaaaaataatccaaccattcctggtcgatattacaccgctaatgaaggatgggaaatgcattggcattgttgggcacggtaaaaaacttgaaatttattccatgtaccattttgaaaacaacattcaccctgattcattaacttttggcaaaccaactgatttatttactgatagagagttcgatatagtattttttgcattacaatcgctaagcgctaaagatattgccagaaaattaagtattacctatagaacggtacaaagcaggctacatatcatttatcagaaaatagggataaattcattaagccagttaaaagaatattgcaggggtaagggatatgataactacgctcctacccgatttattaaccctaatccctatatacctctggcataa

SEQ ID NO: 7950 - DNA, 723 bp, Photorhabdus luminescens
atgaaagataatacgatgagtttctctgtaaacaaggatctggatgttcattcaaaaagctttgacgcctttatatcatatatggaaaacagcaatgatatttgggctataaaagacaacgaacatcgattcatctatgccaatgatacaatgatttattacagcggccttcctaaaggttttaatatagaagggaggcttgatggtgagtgtccagcaccgtggtctgagtttgaaaatattatacaagctagttgtgatgttgtaatgacgagtcaaaaaaccattccagtattaaacaccttgacttatggtgggaaacaaaaaatgatccaaccatttatgctcaatgttacccccctaatgaaggatgggaaatgcattggggttgttggtcacggtaaaaaacttgaaatttattccatgtatcattttgaaaacaacattcagcctgactcattaacttttggcaaaccaactgatttatttactgatagagagttcgatatagtattttttgcattacaatcgctaagcgctaaagatattgccagaaaattaagtattacctatagaacggtacaaagcaggctacatatcatttatcagaaaatagggataaattcattaagccagttaaaagaatattgcaggggtaaggggtatgataactacgctcctacccgatttattaacacgaatccctatatacctctagtataa

SEQ ID NO: 7951 - DNA, 723 bp, Photorhabdus luminescens
atgaaagataacacgatgagtttctctgtaaacaaagatttggatgttcattcaaaaagctttgacgcctttatatcatatatggaaaacagcaacgatttttgggctataaaagacaacgaacatcgattcgtctatgccaatgatattatgctttattacagcggtcttcctaagggttttagcatagaagggaggcttgttagtgagtgtccagctccgtggtctgagcttgaagatattgtacatgctagtgatggcaatgtaatgacgactcaaaagaccattccggtattaaacaccttcacttacggcgggagagaaaaaataatccaaccatttttggtcgatgttacaccactaatgaaggatggagaatgtattggggttgtggggcacggtagaaaacttgaaatttattccatgtatcattttgaaaacaacaggcatcctgaatcattatcatttggcaacccaactgagatttttacagatagagaattcgatatagtattttttgctttgcaatcattaagcgctaaagatattgccagaaaattaagtattacctatagaacggtacaaagcaggctacatgtcatttaccagaaaatagggataaattcattaagccagttaaaagaatattgcaggggtaagggatatgataactacgctcctacccgatttattaaccctaatccctttatacctctggcataa

SEQ ID NO: 7952 - DNA, 942 bp, Photorhabdus luminescens
atgataactacgctcctacccgatttattaaccctaatccctttatacctctggcataacaatgaaccacatcgttattatcactatgccattagggttctgccaagcagaaccttatgctccggccaaaactcactcagcagcgcgaagggtgattttacgggatacctcacatggaggttatcacagttttacagttcaattatgataggtgaaattatgaaagataacacgatgagtttctctgtaaacaaagatttggatgttcattcaaaaagctttgacgcctttatatcatatatggaaaacagcaacgatttttgggctataaaagacagggaacatcgattcgtctatgccaatgatactatgctttattacagcggtcttcctaagggttttagcatagaagggaggcttgatggtgagtgtccagcaccgtggtctgagtttgaaaatattatacaagcgagttgtgatgttgtaatgacgagtcaaaaaaccattccagtattaaacaccttgacttatggtgggaaacaaaaaatgatccaaccatttctgaccaatgttacaccgctaatgaaggatggagaatgcattggcattgttggacacggcaaaaaacttgaaatttactccatgtatcattttgaaaataacattcatccagagtcattaacttttggcaaaccaactgatttatttaccgacagagagttcgatatagtattttttgcattgcaatcgctaagcgctaaagacatagcgagaaaattaggtattacctatagaacggtacaaagtaggttacaatttatttaccaaaaaatagggataaattcattaagccagttaaaagaatattgcagaggtaaggggtatgataactatgctcctacccgatttattaacccgaatccctatataactctagcataa

SEQ ID NO: 7953 - DNA, 213 bp, Photorhabdus luminescens
atgattgtaaaaaacgactggcacccggctgatattattgcagggcttaaaaaacggggaacgtcgttagctgctgtttcaagggatgcggggcttgcatcatccactttatcaaatgctttgcatcgtccgtggcctaaaggtgagaaactcattgctaccgctctaaattgtgagccttttgaaatatggccaagcagatattcaaaatga

SEQ ID NO: 7954 - DNA, 1194 bp, Photorhabdus luminescens
atgcgaacaatgtcggcactttttctcctgttcggaaccctgttcactgcggggggatatggtgccacctttcttatttccgcgtattttcgctcacaaggggggagtgacattgacactgggacgacccttagcgtggccttggtcggcactttgattggcgttcctttggttggatggtttgccgggcaactggaagcatcacgccttgcagccctcgcggcgctggcgatgtcttgtggttattttcttttagggggtttcagcggtgaactgagttacatcccgcgtatcgcagcatttttgattggactcggttggggaatgttctatatcagtgggcctatggcgttgtcagagcgtgtcactgatgctgacaggggccactggtttacccgtttcagcgcgtttcaaatggctggaatttgcggcagtcccatcctcctcgccgccgcggttgaacaggcaggagtgcccatacaaacaacgtttctctttgttggcgtcattggcatcctcgcctcactacttctggcgacctttgggatcagggaaccgcatggtcaacgggagttatcactgagaccttgggtgagaaaaataaccaagattgctgccagcagtgcgatccgtcctattgtgatggtaggtctgggaggctgcgtattctctggaatgatgtcgttccaaagttcgttggttgaagggactcaagcaaatgcaagtacattctttgctgtacatgcagcgactgtggttgtgtcgcggcttttgttagcccggcgtttatcgatgatgccccgtatcccattggtcatcgcgctgatgttattcttaatcatgggcattctggccctgttaggcataccagttaaccccatgttccaggttttggcggccatgttaacgggaataggctatggattggtgtatcccgttattcaaacatgggcagtaaacgattctgcgcttgagaatcgtcacgctgccctcacttggttcgttgtcgcctactttgtggggatatttggatttcctgcaataggtggatggatattagtgggtgcgggcaagaccttgtttatcctcactctagctgcaatagcttctcttgaacttggggtggcgttattgggagggagatggttttgccgcattaaggataggttaacggcacagaatgaagcacgttaa

SEQ ID NO: 7955 - DNA, 1182 bp, Photorhabdus luminescens
atgtacaacttaacccggccgatatatttggataacaatgctacaacgccattagatcccgacgtgcttcaaactatgatgccctattttaccagcgcttatggaaatgctgccagtaatcaccatgcatttgggtggaaagctatggaagctgttgataatgcaagaaaattgatatcaacatcgataaatgcgacgagtcattccgatattatattcacgtcgggttctaccgaatcgaacaatcttgcaatcgcgggccttcaacatcggggcaaaagggggcatgtcatcacatcgacaattgagcataaggctgtccttgattgttgtagtaggctcgaagcaatgggaacggaggtgacctatttaccgccgcaaagcgacggcatcgtatccccagatttaatatctcgtgcaataagagatgatacctatctcgtttcgattatggccgccaacaacgagattggttcaatacaaaaaattgaagagataggcgcgatctgtaaggaacatgacattcctcttcataccgacgccacgcaagcgctcggcaaaataaaatttgatgtacagcgcatgaatatcagccttgcctcattttctgcgcacaaaatatatggaccaaagggggtcggtgcactttatatcgattcacgtaataagaatataacactcgctcctctcatcgttggtgggggacatgagcgaggcttacgctctggaactcttaacgtcccggggatagtaggcttcgggcgggccgtcgaactgtcggttaaaaacttgcctgatgagtcgatgaggttacgttatttacgggatttgcttcgttcgtatattatcgagaatgtggctgacgttcggataaacggtcatcttaccgaatgccttcccggtctgttaaatgtctccttcaacggtttggatgctgattcgcttttgctggagctttccgaagttgcgttgtcctctgggtctgcatgcacatccgctaacagggcaccgtcacatgtactgaaggcaatcggcgtcagtgatacacaggctcaagccagtgtgcgcttcgggttaggaagatttaataatgaagacgagatacgctatgtttgtctccgtctggaaaaagcggtgaataaactgaggtcgatggtgccaaagccattcggcgtcctgtaa

SEQ ID NO: 7956 - DNA, 714 bp, Photorhabdus luminescens
atgaaaatgaatcagcgagaaactaacgtaagcatattggcagggaattcacgagtttatctcaataaggatagcgagatagttgtcgaggctcagttgaaagcctttgaggctgctctgatgttcgccaaacgaagccaagatgaatgtggtcaattaccgaggatatccgtggcgttcgatcatcatgggatattccgcctccagttcctgataaataatctcactaattctcaaaaacggaaccctcgtctgagtcatctccacgcctcgatcaggaatatcttcttgcccgtagcagaaaaatatcagattccgctcagtgagatacgtgttattcacgaagattcagccaggcagcaccttgtccacatcctagcctctggagaaatacccgaaatcatcacacggcggatggtgtccaaaaacctcgctgacggcaaaccaccgacatcagatgctgcttacgaagagccgactcagaaactcacctgtgcagcaattacgaaggagtattttgagaaagctgccggtgatcacaaaggctcagatactattctggaggtgttctttgaggattgcgcttggtcgagagctttggcctatgtgcgtgggctgcaactcagtcatatgctcggtgtttcaaccgccattcgtcttaatcttgttaatgaagagggggaggtgagtcaaggtgatgtaattactgcctag

SEQ ID NO: 7957 - DNA, 1302 bp, Photorhabdus luminescens
atgtccaaaatcgttaaagtgatcggtcgtgaaatcattgactcccgtggtaacccaactgtagaagcagaagtgcatctggaagggggctttgtgggtttagcggctgcaccctctggtgcatctaccggttctcgcgaagcgttggaactgcgtgacggtgacaaatcccgttttatgggtaaaggtgtattgaaagctgttgatgcagtaaatggcccgattgcacaggcagttatcggccaggatgcgaaagatcaggctaacatcgacaaaatcatgatcgacctggatggtactgaaaataaatctcaattcggtgctaatgcgattctggcggtttctctggctaatgcgaaagccgcagcagcagcgaaaggtatgccgttgtacgagcacattgctgaattgaatggcactccgggtaaattctctatgccgttgccgatgatgaacatcatcaatggtggtgagcacgcggataacaacgttgatatccaggaatttatgattcaaccgattggagcaaaaacgctgaaagaggcggttcgtatcggttctgaagttttccataacttggctaaagttctgaaagcaaaaggcatgagtactgcggttggtgacgaaggtggttatgcgcctaacttggaatctaacgctgctgcgctggctgctattaaagaagcggtagaacaagcaggctatgttctgggcaaagatgtcactttggctatggattgtgctgcttctgaattctacaacccagaaaccggtaattacgaactgaaaggtgaaggtaaaactttcacttctcaagagttcactcattacctcgaagatttgaccagaaaatatccgattgtttctattgaagatggcttgaatgaatctgactgggaaggcttcgcttaccagacaaaagtgctgggcgaaaaaatccagttggttggtgatgacctgtttgttaccaatactaagatcctgaaagaaggtattgagaaaggcattgctaactccattttgattaaattcaaccagattggttctctcactgaaacactggcagcgattaaaatggcaaaagacgcaggttacacggcggtaatttctcatcgttctggtgaaactgaagatgcgactattgctgatctggcagtaggtaccgcggcaggtcaaatcaaaaccggttctatgagtcgctctgatcgcgttgctaaatacaatcagttgatccgtattgaagaagctttgggtaaccgcgctcctttctatggcctgaaagaagtaaaaggtcaggcttaa

SEQ ID NO: 7958 - DNA, 1638 bp, Photorhabdus luminescens
atgaaaactaattatatttttgtgaccggcggggtcgtatcctctctgggtaaaggcattgccgcagcctctttggcggctatactcgaagcccgtggactcaatgtcacgattatgaaactggacccgtacatcaatgtcgatccaggtacgatgagcccaatccaacatggggaggtcttcgttaccgaagacggcgctgaaactgatctcgatttaggtcactatgagcgtttcatccgcactaaaatgactcgtcgcaataacttcactacggggcgagtttattccgaagttttgcgtaaagagcgccgtggtgactatctgggggcgacggttcaagttattcctcacatcaccaatgaaattaaagatcgcatcatcagtggtggagaaggtcatgacgtggtgctggtggaagtcggtggtactgtcggtgatatcgaatcgctgccattccttgaagctattcgtcaaatggcggtagaagttggccgtgaacacactttatatttgcatttgacactggtgccttatctggcagcggctggcgaagttaaaactaagccgactcagcactcggtaaaagaactgctctctatcggtattcaaccggatattctgatttgtcgttcagatcgcgttatccctgctaacgaacgtgcaaaaattgcccttttctgtaatgtgccagaaaaagcggttatctccctaaaagatgttgattccatttataaaatcccagggctattgaaatctcaaggcttagatgattatatttgtaaacgattcagccttgattgcccggaagcaaatttatccgaatgggagcaggtcatttacgaagaagcgaatccttccggtgaagtcactattgggatggtgggtaaatacgttgaactgcctgatgcgtacaaatccgtgattgaggcattgaagcacggtgggttgaaaaatcgcttgacggttaacatcaaactgcttgattcccaggatgttgaaactcgtggcgttgaattattgaagggactggatgcgattctggttcctggtggtttcggtggccgcggtgtggaaggcaaaatcatgacagcccgttatgcgcgtgagaacaacattccttatctgggaatctgtctcggcatgcaggtagcattgattgagttttctcgtcatgttgcgggcttggaaaaagccagctcaacagaatttgaacctgattgccggttgccggttgttggtctgatcaccgaatggcgtgatgaagacggtaatttagaagtgcgtagcgaagagagtgatcttggtggaacgatgcgtgtgggcgggcagccatgccacctgacaaaagatagcttggtgcgcactttgtatggagcagatacgattgttgagcgtcatcggcatcgttatgaagtgaataatttactactgaaacgtattgaagatgcgggtctgcgggtagcgggtcgttcagtagacaataaattagtcgaaattattgagatccctgaccatccttggttcgtggcttgtcagttccacccagaatttacttccactcctcgtgatggccatccgttgtttactggttttgttaaagccgccggtaaataccagaaaggccagctcaaataa

SEQ ID NO: 7959 - DNA, 780 bp, Photorhabdus luminescens
atgacgggtataaaacggttactggggattatggcacagttgcgccatcctcagcagggatgtccttgggacaaagagcagacattcaaaacgattgcaccttatacgctagaagagacttatgaagtcattgatgccattgagcgcggtgatttttctgatctgaaagaagagctgggtgatctgttatttcaggtagtgttctatgctgaaatgggcaaagagcaacagttgtttgattttgatgatatctgtaatgcgattagcgataagctggaacgccgccatccacatattttcggtcagcagcaggatatcagcagtgatgtggctatcagtggttgggaaaaacgtaaggcgcaggaaagagcgcaaaaagatctacattcggtccttgatgacattccggcaagtctgccggcattgatgaaagcgtataaaatacagaaacgttgtgctgcggttggttttgactgggatactttggggccggtgttagacaaagtttatgaagagatcgacgaagtgatggatgaggctcatcaggcggtggttgatcaacagcatttggaggaagagattggtgatttattgtttgctgttgtgaacttatcccgtcatcttggatacaagccggaaattgcattgcaaaaagcatgtaataagtttgagaaccgatttagagaaatagaaaagctgattttgaagcaaggtcacaccttggaagcggcgacattggaagaaatggaaaaaatgtggcaacaggttaagaagcaataa

SEQ ID NO: 7960 - DNA, 2232 bp, Photorhabdus luminescens
atggttgcggtaagaagtgctcatttaacccctgcgggagagtttgcagtaaacaggtggatcgcgagtttaaatatagccaatcttcaattgggtgagaaattagccgaaacctggcgttattgtcacgaaaaagcgcaaaatcatcctgattcagaacttctgttatggcgtggtgtagagatggttgagatcctctccacgttaagtatggatagcgacagtatgcgtgcggcgttactgttcccgttaatggatgccaaattactcggtgatgaaaccgttaccgaggcgtttggcagcgcgattaccaatctggtgaaaggtgttatggaaatggatgccattcgccagttaaaagccactcatcacgattcaatctgctctgtacaggttgataatgttcgccggatgctactggcaatggtggaagattttcgttgtgtcattatcaaattggcagagcggattgcccatttgcgggaagttaaagaggcgactgaagatgagcgtgtactggctgcgaaagagtgttccaacatttatgcgccgctcgctaaccgattaggtattggtcaacttaaatgggaacttgaggattactgcttccgttatctccatcctgatgaatataaaaaaattgcgaaattactgcatgaacgccgaattgatcgtgagcagtacattgattactttgtcaatacattacgcaagcatatgctcaaggagggcgtcactactgaaatatacgggcgtcctaaacatatctacagcatttggcgcaaaatgcagaaaaaatcactggcatttgatgaactgtttgatgttcgggctgtgcggattgtggttgaacgtttgcaagattgttatgcggctttggggatagtacatactcactatcgtcatttgcccgatgaattcgatgattatgttgctaacccgaagccgaatggctatcaatccattcatactgtggtacttgggccgggtggtaagacattggaaatccagatccgtactcgtcagatgcatgaagatgcagaattgggaatagctgcccactggaaatataaagagggggctgcggcgggtagtcgtgtcggatatgaagggcgcattgcatggctacgtaaactgatcgcatggcaggaagagatggctgattctggtgagatgctggatgaagttcgcagtcaggtgtttgatgatcgggtatatgtatttacaccgaaaggcgatgttgttgatctccctaccggttccacgccgctggattttgcttaccatattcacagtgatgtggggcatcgttgtattggggcgaaaatcagtggtcgcattgtgccattcagctatcaattgcaaatgggcgatcagattgaaatcatcacacagaaacacccgaacccaagtcgtgattggttaaatccaaacttgggatatgtcaccacaagccgcggtcgggcgaaaatccacaactggttccgcaaacaggatcgggataaaaacattatcgccggtcgtcagatgctggataacgaactggagcacttggatatcagcctaaaagaggcggaaaagctgctgattgcccgttataacgtccatacacttgatgaagtactggcgggaattggggttggtgatatccgtattaaccagttggtcaatttcttacaaagcaaacttaagaaaaccaccgcagaggatgcagatcgggaagcgcttcgcaatttagagagtaaatcacatccacagcgtagttctgctaaagatgatgggcggattgtggtagaaggtgtgggtaatttgatgcatcacattgcccgttgctgccagcccattcccggcgatgagattgtcggctttatcactcgtggccgagggatctctatccactgggttgattgtgaacaactggccgagttgcaggcaaatgcgccggaaagggtggtggatgcggtttggggagagagctattccagtggttactcactgattgtgcgtgttgttgcgaatgatcgcagtggattattgcgtgatatcaccacgattctggcgaatgagaaggtgaacgtgcttggggtgagtagccgcagcgatgtaaaacagcagattgctaccatcgatatgaatattgagatttataacctgcaagtactggggcggattttggcgaaaatcaatcagttaccggatgttattgaagctaaacgtcttcatggcaactga

SEQ ID NO: 7961 - DNA, 1317 bp, Photorhabdus luminescens
atggtgcaattttattcccccaatcgtcgaacggtaaatcgacatatcatcacagttaccgctgataatctggatgcccaggggcagggcgtagctcgccatcagggtaaaactatttttgtcgccgggttattgcccggtgaacaggcacaggtacaactaacggaagagaagcgacagtttgcaaaagcaaagttggttaagcgtttatctgacagtccatatcgtgtgaatccccgttgtcctcattttggagtatgtggcggttgtcagcaacaacatgttgcaccggatttacaacgtgaaagtaaagccagcgttctcgaacacctgattaggcgagaaactggtgtaacggtttctgccaaaccggtgattcttggccctgaatatggttatcggcgccgggcaaggcttggtttacattatcaaataaaacagcgccaactggtgataggatttcgtcaaaatcaatccaatgaattagttgctataaaagagtgcccggttttgcgacctgaattggaacagttattacagccattatctcagtgtctgaatagtttgaaagcggttaaacggttggggcatgtggagttggtgctagcagataatggcccattgatgatattgcgccatcttgatcccttgaagcgggaagataaagagaaactaggcacattttccgtgcaacataatgtcgctgtctatctggcggcggatgaaacttcacttgaatcactgaatgaactgccggaaccttggtatcaggtagatgggctgaaactggttttcagtccaagagattttattcaggttaacgatcaggtgaatcaacaaatggttgctcaggcgatagagtggctcgatttgcaaccgaatgataacgtgcttgatctattctgtggaatggggaattttaccttacctattggtcgcatagtgcaatctgtagtcggagtcgaaggggttgccacgttggtggctaatgggcaatataatgccaaaataaataatttggataacatatctttctgccatgaaaacctggaagctgacatacatcatcaaccttgggctaaactggggtttaacaaggttttattagatccggcgcgtgctggggcggtaggagtcatgtcacacattgttgagctggtgccagagaaagtagtctacgtctcttgtaatccaacaacattggcgcgggacagtaagattctgcttgaggctggctatcaaattatcagtgtgcggatgctggatatgtttccgcatacaggtcatctggagtcaatggcgctatttagtcgttag

SEQ ID NO: 7962 - DNA, 2328 bp, Photorhabdus luminescens
atgaccaaatatagcttacgcatccgcatgatgagcctgatcctagtgccaattttactggttggcatgtttttcagtatctcatttctctgttatcactatcgtgaactggagaaccaaattgttcgatccgggatcagtattattgaacccctgtcgatcgccagtgaaattggcatcaacctgcataaccgtgaaagcgtcaattcattgatcacccggcttcatcgcagaaattctgagatagttcgggcgattgccatttttaacgatgataatcagctatttgatatctcaaactataaatacaattcagcgcaactacagatctcgccagatatgcctctgccaaccaccctgacaaaaacggaggttaaaaacagtattattttacgtatgcccattatttcagaacaccatctgtcccaaaatcagccgcattctgacaccccatctttacgtccgattggctatattgccattgatcttgatttacggtcagctcacttacagcaatataaagagatcgttatttttatattactcttactcatttgccttggctgggcatcgctgttcgcctaccatttggttcgtaaaatcacaaaacctatcagcgatatcgtcagtactgtcgatagaattcgccaagggcaattaaacagccgtgtcagtgggaaatattttggtgaattagatatgctgaaaaatggcattaatgcaatggcaaaatcgctctccagctataaagaagagatgcaaaatgatattgatcaagcaacgtcagatctgcgggaaacaatggaacaattcgaaattcagaacgttgaactggcaatagcgaaaaaacgtgcgcaggatgcggccagaataaaaacggaatttctggcaaatatgtctcatgaattacgcacaccacttaatggcgtcattggctttacccgccaaacactgaaaacacctttaacaatacagcaaactgaatatctgtatattatcgagcgctctgctaatcatctactgaacattatcaatgatatattggatttttcgcggcttgaagcggataaattggtattggaaaacgttccattccttctacaagatacgattgatgaggtcatggtattactgacactcagcgccaaaagtaagaatattcagctaactcaccatgttgatccccaaataccgaatctggtcgtaggcgaccctacacgcctacagcaaatattcaccaatattatcggtaacgcgattaaattcaccgaccaaggttctgtggagataaagatcaatctgctacaacagaaacaccataaaatcaatttagagattacggtcagcgatacaggtattggtatcagtcctgaacagcaacctcatctatttcaggcttttcatcaagcaaatgccagtatttcccgccattatggcggtaccggcctcggtctggtcattacacggaaactaatccaagaaatgggcggaaatatcagctttaccagtgagccgaaaaaaggttctgttttccgttttgatttatggctaggaaaagacgatttcattctaaccggctcagttgtaccacaaaagacgcttatccatcccccacgtttaccgatgacagtcatggccgttgacgataatccagctaacctcaaactaataggttcattactagacgaaatcgtggaaaaaaccgtgctatgtaacagtggagaagaagctttacagtcagcagcctctcaccattttgatcttattctgatggatattcatatgccaggtatggatggcatctgtacttccaaccacatccaccagctaccgcaacactacagtacaccgatcattgcagttacagcttatacctgccgaccaaagagcgatacacactctccatttgaggatttcctgaccaaacctctcgatgaacatcgtctgagagtcgtgttagatcgctacgttaaaacaccaaaatcacaacatattaactggccattagcactacaacaggccaccggaaaagaaccgttggctatagatatgttgcaaatgttggtagatttactgccaaccattaaaacaatcacagaaaaagttttgtcaggggaaacggtggaaaattaccagcagcagatccataaactacacggtagctgctgttatagcggcgtgccacaacttaaagctctctgccaattaattgaacaacaattacaacaaggtgtccaattaaccgatatagaacctgaattgttggaactgacagatgaaattgatcatgtccttaccgccgcccaaaagatattgagtcgcggctag

SEQ ID NO: 7963 - DNA, 1527 bp, Photorhabdus luminescens
atgtccgggatagactttagtcagaagcttaactatcagcgtaaataccgtcagtatcatgttgatcctaatgatgaagagcaggttattcgccaatttgaaagcgatcgtgggcggattatgaattcagcggctattcgtcgtttacagcaaaaaacacaggtttttccgctggaaaataatgccgctgtccgcagtcgcttgacacattcattagaagtgcaacaggttgggcgctatatttcgaaaacgattattaatgaattgaaaacgcgtaatttgctggccgattacgggttggataaacggctattatcatttgaaagtttgattgaaatggcttgtttaatgcacgatattggtaatccaccatttggtcattttggtgaagcggcaattaaagattggtttgccaaaaagctcgatcttaatttttccctggaaaatattaagcgggaagatcgatgtgaaatctccgcattgcgtttatgtggtgatgtgaaaaaagatcgctttcgtcgccagttgcgtaaagatttatgtcagtttgaagggaatgctcaggctatccgtatggtgcatagcttattaaaactcaatctgacttatgcccagcttggttgtattctaaaatatacttgccctgcttttcgtcttgaagaaataccaaatcaatttaattatttgatgaaaaagccaggtttttattggtcggaggagcattttgtttgcgaattacgtcgtgagcttaaaatgggtgagttctgtcgcttcccactgacttatattatggaagcagcagatgatatctcttattgcattgccgatttggatgatgctgttgaaaaagcgattttcagcgtcgatacactgatgggatatttggaacaggagtggcaagaaaatggcggtcatcgggccggggatctattcgacttaacggtcaggaaggcgtacaagggaactcacggtaacgaattacgtcgaagccagcaggatcagttttttatgtatctgcgggtttatattaccggcaaacttgttccttatacggctcgtcgttttattgatcatttgccggctgtttttgagggctcatttaatcaagcgctacttgaagataagagcgaggagcatcggttacttaggacattgaaaaacattgcttgtaagagagtgtttaatcatccagagattgaaaaattagagttacaggggtacagaatcatcaatggactattggatttttactacccattattgaaaatgccccgtcaggattttgtggaactgaatcagaacaatttccacaaagattattttatggaaacccggctgctacacaaactttccaccaagcatcgtctggcttatggtgaagcagtagagaaaattgttgccactgatcaagctgaaaaagacttgctcgaattctattatcgcgctcgtcttattcaggattacatcagtggcatgacagataattatgtttatgaggagtatcgcaaatttattgtgtgcacttaa

SEQ ID NO: 7964 - DNA, 702 bp, Photorhabdus luminescens
atgaaagtaggcgtgataggtgctatggaacaagaagtgacgttactgcgcaatcaaattgaagatcgccaaacactgtcacgaggtggctgcgaaatctataccggtaaactcaacggcgtggagatcgcactgttaaaatctggtattggtaaagtttctgctgcaattggtacaactttactgcttgaacattgtcagcctgatgtgattattaataccggatctgccggtggccttgatccgaaattacaaatcggtgatatcgtggtatcccgtgaagttcgctatcacgacactgatgttaccgctttcggttatgaacccggtcaaatggcgcaatgccctgcggcttttgtggcggatgaccagctaattgatctggcagaaaaatgtattcattcactgaatctgaacgcagtgcgtgggctgatttgcagtggtgatgcatttattaacggcgcagaacctctggcgcgtatccgggcgacgttcccacaagtgacggcggtagaaatggaagccgcagcaatagggcatgtctgccatcaatataacacgccatttgtggtggtacgtgctatctctgatgtggcagataaagaatctcatatcagttttgatgaatttcttgccgtggcagctcgccaatctacattaatggtcaacgccatgctggcaacgctgagtaaagataaataa

SEQ ID NO: 7965 - DNA, 828 bp, Photorhabdus luminescens
atgaaatggataaaaagcacgggttcaattggattatcgcttttactgtttctcagcagtttcagccattctctgtatgctgctcccttacgggtaatcagtttatctccgtcaacgacagaattagcctatgccgccgggctaggtgacaatctgattgccgccagcgcctactctgattatccccctcaagcccgtaaacttgagcaagtcgctaactggcaaggcatcaatctggaacgcattattacccttaaacctgagctgattctggcatggcgtggtggtaatccccaacgtccactggaacaacttgctgctttcggcattaaaatcttttattccgaccccacaaccaccgaacagatagcgcaggatttagaacgactcgctgaatatagtcctcatccagaacaagcaaaaaaatccgcgactgaacttcgccaacgatttgccaatttgcaacaacaatatgccactacaacccccaaaccggcctttttacaattcggtacttaccctctgttcactacttcaggacagacactgcaaagtgaagtgctttcaatctgtggcggcagaaatatttttgccaacagccctgttccctggcctcaagtcagtcgtgaacaagtactcatcaggaaacctgaaataattgttatcagtggtgggcaagaacaggtcaaattaattgaaaatttctggcatccacaattgcgtgccaaagtcattacattacatgaagattggtttcaccgcgcgggaccgcgcatcattctggcagccgaacagctatgccagcaattgaacgataatggttcctga

SEQ ID NO: 7966 - DNA, 348 bp, Photorhabdus luminescens
atgatgagcgatgatatcgtattacctttgcagtttacggatgccgcggctaacaaagtgaaaatcttggtttcggatgaagaaaacccaaacttgcgtttacgggtttatatcaccggtggcggatgcagtggctttcagtatggttttacctttgatgatcaaataaatgaaggtgatatgaccattgagaaacagggtgtggagttggttgttgatccgatgagcctacaatatttagttggcggttgtgttgattataccgaaggtctggaaggttcacgttttatcgtcaccaaccctaatgcgaagacaacctgtggttgtggttcttctttcagtatctga

SEQ ID NO: 7967 - DNA, 786 bp, Photorhabdus luminescens
atgcgaaaaatgttgccactgatgcttgctgtcaccttgacaggttgtaccgctcatagcaaacaagccgatattgacagctatacctcgaaaaaaattaatgaaattatagaaaaccaggtaaaaccgggaaacaaagagaatcccggtgaaataataaaagacgtctcttatcaattcctgggcacaccttatgccgcaaacaaacttattggctcccctactgaacctgaaaaattagttatcgacttcaacggactagactgctttactttccttgattatgtcgaatcgctaaggaaatccaacgaccaaagtgattttgtaaaaaatctcatccagacaagatatatcgacggaaagattcgctttttgcaaagaaaacatttccttacagactggtcaaccagagaaaaattaaatgccaaagatgtaacggatgaaataagttcttcttacattgcaatcacaaaaagcctgaataaaaaggctgatggtagcgaatacatccccggactaggtgttaccaaaagagatatcaaatatattccgggtgataagatcaatgatgcggttattaagaacctaaaaacgggcgattatataggaatatatacccatcttgccggattggatgtcacacataccgggatttttattatgacagatcacggcccaatgctaaggaatgcatcttcacttgctgcgaataaaaaagttgtcgattcaccatttcttgattacgtaaagaataaacccggaattatcgttctaagagcattataa

SEQ ID NO: 7968 - DNA, 1284 bp, Photorhabdus luminescens
atgagccaatccgacatcctctattctcaggcaaaacaacttattcccggcggcgtcaactctccggtacgtgcatttaatggtgttggcggtactccgctgtttatcaaacatgctgatggcgcttatctctatgatgttgatggtaaagcctatatcgattatgtcggttcctggggacccatggtgttgggacataaccacagcgctatccgtaatgctgttatcaaagccgcggagcaaggattgagttttggcgcgcccaccgccgctgaagtggaaatggcgcaattggtgactgaactggtgccatcgatggatatggtacgcatggttaactcaggtacagaggcgaccatgagtgctatccgtctggcccgtggttacacccatcgcgataagatcatcaaattcgaaggttgctatcacggccacgctgattgcctgctggtgaaagccggttctggcgcattgaccatcggccaacccaactctccgggggttccggttgatttcgtcaaacatacgctaacctgtacctataacgatttgagttcagttcgagaagcgtttgaacaatatccacaagagatcgcctgtattatcgtcgaaccggttgcgggtaatatgaactgcgtaccgccacaaccagaattcctccccggtctgcgtgcgctgtgtgatgagttcggtgctctgttgattattgatgaagtgatgaccggtttccgtgtcgctctatccggtgcacaatcttattacgatgtcgaacccgatataacttgccttggcaaaatcattggtggcggtatgcccgttggcgctttcggtggacgttatgaagtgatggagaaactagcgccaattggccctgtttatcaggcaggaactttatccggcaatccgattgcaatggctgccggtcttgcttgtctgaaagaagtgtctcaacccggtgtacatcagcgtttgactgagctaacagataatctggctgctggcctgacgaaatcagcaaaagcagccaatattcctctggtggttaaccatgtcggcggtatgttcggcattttctttactgatgcagaaaccgtcacttgctatcaggatgtgatgaattgcgatattgaacgttttaaacatttcttccacctgatgcttgatgaaggggtttatttagcgccttctgcatttgaagcgggttttatgtctattgctcacacggatgaagatattcagcgtactgtcaatgcagccgctcgctgctttgccaagctgaaataa

SEQ ID NO: 7969 - DNA, 264 bp, Photorhabdus luminescens
atgagtcaaaaagctaaattgtttatggatgggaagcgtcaagcggtacgtttgccagcagcttatcggtttgactctgatgaagtttttattcgaaaagatcctgagacaggagatgtaatactgtcctgtaagccacacgattgggctggattttttgcggcattgaagggaacaactattattcccgacgattttctgagtaaagaagcgcggggccagcaagaacaatcttgtgacccattcgaaggatggcaagaatga

SEQ ID NO: 7970 - DNA, 285 bp, Photorhabdus luminescens
atgaaagttaagggtattccattttcagaagtgaaggcgcaagccctctcatcccccaaagctcaggccgcttatgaagctgctaaacaggaagaagaactctacgagctcattcaaaacatgaaacagaaagcaggtattaatagttcgcagttagccgaacgactaggaattactccaccggcagtagctaaggttgaaaaaaacccaatgaaagcaagtattgcaacacttgaacgctatgcagcagcctgtggagtaaatctcaaaattactatcgcataa

SEQ ID NO: 7971 - DNA, 6030 bp, Photorhabdus luminescens
atgagaaatgccgcgcgaattatcaatgaatctttagagcagggaattactctgttcgttactgataatcgtttgcaatacgagactcgccgcagcagtattccacccgagttgctcagtgaatggaaacagcataaacaggagttgattgattttctgaaccagcttgatgcagaagagcaaactcaaacgcatcactttttgcaagatattcagcgtgatggtaaagcagaacattatccgctttcatttgcccaacaacgactatggtttattgatcaactggatggaggtagtcgccaatataactgtatgggggatttcaggctgcgggaatccattaacatagaggcgtttgaggcagccgttaaggcattacttgaacgccatgaagtcctgcgtacccattttaaaatcatcaataatgaaccgcggcaatttattgccgcggattatgatttaccgattacagatcatgatttatctgcgttgtctgaaactgagaaaaacgatcaggtaaaacaaattagtaaggaagaagaaaatctaattttcaacctgaataccgatttgatgctgcgcgtccggttaataaaattggcagaagatgattatcttattatttatacgatacatcatatcgccttcgatggctggtcgatggcaatatttctccatgaatttttcacattatacaaagcttattgtcagggtaaggcaaatccgctaccgccgctgagaattcaatatgccgattatgcccagtggcaacagagttggttgcaaggtgatgtgctgaaaaaacaactgacatactggcagaatcagttagctggaatttcacccgtccaccgtgtgccgctggataatccacgtccggaaaaacaaaatattgaaggacggcttcatctacagcgtatttcagcacatcttacccaagcaattagagcattatgcaccaaacataacgttacactatttatgttcctggaaacggcttttaccgtattactgagccgctatagcaatgaaaaagatattctggttggaacagctattgccggcagacaacatcctgatattgaacctctgatcggtttttttgttaattcattggttattagaacagatttatccggtcagccgacgttcagtgaattattaaaacagaacagccgtaccatcctagatgcttatgaacatcaagctttgccgtttgagatgttggtggaaaagctcagcccggaacgaagcttaaattataatccggtatttcagatcatgtttgcagtacagaataaccaacgtgacgcaatactgggacaggatgatattattgaactcggggataatttactcagaacaactcggtttgatttggaaatccatgtttttgaagaagaacagacagacgaattatctatagtatggatttcaaataccagtctgttcgatagtaataccattgaaagatttatcgccaattacgcaaccttgctttctggcattgttgaggtaatgacagatgactcagtcaataaagagccctccattcatgaactcccattattgtcagaagctgaaaagcatattttactgcatgaattaaatgggccgcagaaccattatccacaagggcgttgcttccatgagctgtttgaagaacaggtggcactgaatcctgaaaaaaccgcgctggtttttggtgaggaaaccttaagttatcaggcggttaatgttcaggccaatcaattggcgcattacctgattgagcaaggtatccagccagataccttggttgcaatttgccttccccggtcgttgcaaacagtgattgcactgctgggcatcctcaaagcgggtggtgcttatgtgcctttggatgccagttatccgcaagcacgcctgcaatacatgctggagcacagcggggctgaagttatcctgaccgaaacaccgctggttgataaattgcctatcagtcagcaacgcgttatctgtctggatgctgaaacggtacatttatatgtacaaaacctgcctaccggcaatatcgttcatcgtccggtgcccctgacagaaaatcatctggcctatgtcatttatacctctggctctaccggccgaccaaaaggcgcgatgttggagcacaaggggtgggtgaatctggcgcaggcacaagccgcgttatttggtgcggatgctgatattcgcgggttgcagtttgcttcctggagcttcgacgccgcagtgttggaaatggcaatgaccttggcctatggcgctacattgtatttgattgcagaaacacatcgccgctcgcctgaatggttggatgagatggttgaaaagtaccacattagccatgccgtactcccgccagcgctgttgcctcatttggatttcaacaagtggcgcacagtttcaaccttgttgctggcaggggaagccgtggcaccgcatatcgccgcgcagtggtcgcagggcagaaagctgtttaacgtttatggcccaacagagtgtacttcgattgtgacctctgccttattaacagcaaataagcgagtgacgattggaaaaccgttgccgaataccgtgatgcgaatcctgaatgccgacggtaatctgctgcctcttggcgctgtcggggaactgcatattggtggcatgcaactggcgcgtggctaccgtaatgcaccggatatcacggaaaaacagtttatccgagatcctttcagtaccaacccggcagaccgactttactgtaccggtgatttagtacgctggacgctggaaggtgagttggaattcattggccgccgggattcgcagatcaaaattcgcagccatcgcattgaattgggggaaatcgagtcggtgctggcggggcaggagattttaagtaatgctgccgtgatcgttgatggtcataacagtgaagagaggaaactcattgcttatgtttgcccgagtaccaattggctggcggagaaagcagccgattttaatgccgattacattgaaagctggacagagatctttaatggtcagtatcggcgggagataacagaaaatattgttaccgatactaccgatgagagcgataacaatagtgatttttatggttggataaatacttataccgaacagccaatcgcattggaccaactggaagaatggcgagtgggtaccatgcggcggattgaatccctgcatcccagcagcttattggaaattggttgtggatcgggcttattgctatatcgttacgctggacgatgcgaatcagtattagccacggatatttcagcggaggtattggcgcgtcaccagaagattttgcaacagcgtggctggtcgcacgtggagctaagaaggggagatgcactgaatttgggcactatcacgcctgatcagttcgataccgttgtgattaattccgttgttcaatacttccccaatattcagtatctggaaaaagtcattacccagttattacccgcggttaaatccgggggaaaaattctgctaggagacatccgtaatttagatttgttaactgcacatgtaacagccatcgagaaaaatcgcctgaatgggcaacgtatttcggtgggtacgttggcaaaccgtattcaacagcgtctacagaaagaaaaagagtttttattgagtccaacctattttgcacaattgccgacgcgttaccctgaaattggaagagtggatattttggttaaacgtggtgttggcgacaatgaaatgctgcgttatcgttatgaagtgatattacacaagtgcgataaaaatgcggaattatgttgcaatttacccctaacttggtgcgattttaactctattgaagatctttatcatgtgttggagacagggaaattcgatacatttggtgtctctggtattcctaatgcccgtatcaaagatgattttgatttagcggaaggtctacgccattggccatctaatcagattatttttctaccaaaagatgtcggcggtttttctccagaagccgcagagcaagttttggccctcgaatccttacttcaatatgcggaacagtgcggctaccagtgtgaacttacatggtcacagcagcagcttgatttactggatgtgattttcagccgtggtgaattacctcaagtacaggcacgtttaggttatagccaaacgcatttagctaattatccgcaacttcctgctattagtggagaactcgcagagctactggaatccgctttgaaaaaacaactgccggattatatggtgcccagtttctatatcccattggaacgcattccactgaatttaaacaataaagtggataaaaaagcgttacctattccgaatgaaaatgatttacgtcgtcaggcttatatcgcaccgagagatgaaatcgaggaaaaactctgtcagttatggcaagaacatctaaaaatcaatcaaattggtatttatgataatttcttctcactcggtggtcattcactcttggcagttaagataaccgcttccataagaaatacgttaaccaataatttcaatatgcatgagctgtttgcaaatccaactattgttcagattgcaagtgtgattcgtcacagtcataagcatgaaatatctgcaccgaagacaacacacaatatatctgatcacaatgcatttgatggaaaaatgccgatttcttattgtcagaaaatgtattggtattttgtgcaagaagcgttgttggaggacagtttccacgtacccattactttgctgatggcaggagaattggatcgcagtgcgttggaaaaaagtttaaataccatcttagcgcgacatgaaagtttacgttttaagttttatcaagaaaatgggcaaattttcatgcagcctgataacagtatgaaaatcaatcttcaagttatcgaagcgttaccaagaggaatcgagagagaccaaattattattgaaattaataaactctggcaagagaaattaagaacaccttttgatgtttataatggtccattaatcaagacatttctactgcctgtttcggaaacaatcacggtattattgattgatgtgcaccatattatttccgatgggtggtctgtcaatatcattatgaatgagtttaaacagttatataccgcttattcacaggggcaagaaaacacattgccacccgttgccatgcaatattctggttatgtttatgacttacaagaaatccatgtgactgaagtagctaaaaaacaaattaaattctggcaacaacaatttgctgatgttaattcagaacgcgattttcctgtttctttcagaaagcatctggcttcaaaatatcgatctcatgcccatcatatcaaaatacctgattcgctggataaagctgttttacaatattgtgaaactcacaaaatcacaccttatatgttatttatggctttgttccacacttgtctttttatgtactccggtgaatcacaacttattgttacctcaccaaaagctgaccgaactcgcatcgaaagccatcaaacaatagggttattcttgggtgacttgatagtaaaatccaatattaatcaggaaatgagcctacaagaaatcattaagcaggttagtcagtctattcatcgcgccatagagaatgctaatatccacatgtctgttgtgattgacgtggtgggggaaaaggcgagggataatatatttaacgttctgtttaactatttggatgcacaaaatttctatgattttatcgacatgtctaaagatgaaaaattatcattgccaaatcttgaggtggaagtgatagataccgaaataattccttttgaatcacttgggatgaatttcttatacatgccacaaaatatcaagtgtgaactccattacaatccggaactgtatacagaagcagtcattgataggatggctatatattatgaacgactgttaaacgtcatcgtatccggccaagaaaaagagagtatcagtcagttttatgattaa

SEQ ID NO: 7972 - DNA, 4734 bp, Photorhabdus luminescens
atgaaaaatgcggcacaaattatcaatgaagctttaaatcaaggaattactctgtttgttattgataacaaactgaaatataaaaccagccgagacagcattccttcggaactgcttaatgaatggaaacaatataaacaagaattgattgatttcctgaagcaaatcgattcagaagaggattcggacactcaccgactgcaaggtattccgcgttatgatcgtgcggaacattacccactttcatttgctcaacagcgtttgtggttaatcgatcaactcaccgaaggcagtccgcaatataactgcacaggtgatttcaggttgagagagtcgctcaatctcaacgcttttgaggcggctatagcaacattacttgaacgtcatgaatcgctgcgtacttatttcaaaattattgataatgagccccggcaggttatcgcgactgcttatgatttgccgattaccatacatgatctgtccacacttgcagaatttgagcagcaacaacaggttaaacaactcggtgagcaagagtggaaacaagctgttaatctcagcactgacctgatgctgcgtattcggttgctaaaattagcagatgatgattatttcattctctatacgattcatcatatcgcttgtgatggctggtcgctggcaatctttatcagtgagctgctgacattatatcgtgcttattgccaaggcgagggtaatcctctgccaccattacccgttcaatatactgattattcacaatggcaacgggattggctgcaaggggatattctggaaaaacaactggattactggcaaaaccaattatcagctatttctcctcttcaccgttttccattggataatcctcgaccagaaaaacaaaattttgaagggaatgttcatccacaacgtatttcaaaagcgttgacccaagaaatacgagcactgtgcgccaaacatgaagtgacgttatttatgtttctggaaacggcttttgctgtgttgttgagtcgttacagtagtgaaaaggatattctggttggcatgccgcttgccggacgaagacaccgtgacactgagcctttgattggatttttcgtcaattcactggtgatcagaacggatttatccggtcagccgacattcagtgagttattaaaacaaaatagtcgtacgatcctggatgcttatgcacatcaagacctgccttttgagatgctggtggagaaaatcagcccagaacggaatttaaattataatcctattttccagatcatgtttgcagtacagaataatcaacgggatacaacgctggagcaggatagcatcgtgacatctaaagaacgttctctgctgaccacccgatttgatttggaagttcatatctatgaagaagacgaaggtgagttatccattggatggatctctgacaccagcctgttcagaaatgcgaccattaacagattaatcgccaattacgaaattttgctgactaatattgttgatgtgatgaagcatcatgcgggtatcagcgagccgtccgttcatgaccttccattattggcggatgctgaacggaataccttactgcatgaatggagtgggccacaaattccttatccgaccgggaaatgtttccatgaactcttcgaagatcaggtatcacaacaccctgaaaaaaatgcactgattttgggcgatgacaccctgagttatcagtcattaaatgaacaagctaaccaattggctcactatctgctcgaacaggggatcataccgggcacgttggttgcattttgcataccaaggtcattgcaagctgttgtggcattattgggtattcttaaagcaggtggcgcttatgtaccgttagaccccagttatccgaaagcccgccttcaatatatgttggatcacagtgaagtcgaattcatcctgaccgaaactcacctggttgaaaaactgccaatcagccagcagaaagtgatttgtttggatacagagacggtacagtctcagctacaacatatgcctacagataatattactgagcgtccacttccgctcacggaaaatcatctagcttatgtgatttatacttccggttctaccggtaaaccgaaaggggtgatgctggaacatagagggtgggttaatctggcattctcgcaagcagatttatttggcattgactcacattgccgggggttgcagtttgcctcctggagttttgatgccatgattttagagatgtcgatgacattggcctatggcgcaacactctatttgatttccgaaacccaacggcgttcccctgaactgttggatgaagtggttgaaaaacatcagataacccatgcggtactaccaccggcactgcttcctcatctgaattttaataaatggcgttctgtctcaactttgcttttggcgggtgaagcagtaccaccacagattgctgttcgttggtcacagaatagaaaactgtttaacgtatatggcccgacagaatgtacatccattgtcaccacagctttactcactgacgagaagattacgattggaaaaccgttgcctaacgttgtgatgcgtattcttgatccggaaggtaatttggctccgatgggcgttatcggggaactgtatattggcggtattcagttagcacgtggttaccgaaacgcaccggaaatcacagcaaggcagtttatccgtgatccattcagcccacactcaacggatggcggggaaaacaggctttatcgaacgggcgatttagtgcgttggacaccgaatggtcaattggaatttatcggccgtgttgactctcaggttaagatccgtagtcaccgcatagagttgggtgaaatcgagacagttttgtccgggcatgatgctttaagtagtgctgttgtggtcgcttatggtcaagatgaagataaaaaactcattgcgtatgtctgcccaagtacagagtggttaggtgagaaagcggttgaatttaacgcaagcagcgttgagaactggacagaaatttttgatgatcagtaccgtcaaaccacaacgaaacctacaacgaaacctacaacgaatagtactcaaaaagagagcactcagaaaggtgatgtagttgcatcagacagtgatttcggcggctggatgaacagctatactgaacagccgattgcccttgagcaaatggaggaatggttaacaggaatcatgcacaggattaaagccctgcatcctcatcgcttactggaaattggttgtggtaccggattattgttgtatcgctatgctgaacagtgcgaatcagtggtggcgaccgatatttcggctgaggttttaaatcggcatcaacatattctgcaacaacgtggctggtcacatgtgcagctcagaagaggcgatgcgctcaacttaggaacattgagcgctgatgaatttgatactgtcgtgattaactcggttatccaatatttccccaatgttcaatatctggaaaaagtacttgaacagttaataccggcggtggaagcgggtgggaaaattttgctgggagatatccgcaatttagatctattaaccgcccatgctacagcaatagagcaaagtcatcttaacgggcagcgtattcaggtagggacgctggcgaaccgtgttcagcggcgtttacaacaagaacccgagtttttactcagtccaacttattttgcccaattaccggagcgttaccccgaaattggtcgggttgatattctggttaaacgtggcatcggcgacaatgaaatgttgcgttatcgttacgatgtcatattgcacaaaagaggtgaaaagaccaaatcttgtaatgaattgttttcaaattggcatcatttcgattcttttgacagtctgcgtaatttgttacagatgggcaccgaggatatattgggtgtttcaggtatccccaacgccagaattaaagatgacctcactttggcagaagggctgcgtcactggtcagccaatcagatgataacgccacccgcaaatgttggcagtttctccccacaggcattacaacaggttcaggaattcgaatccttattgcaatacgctgaacaatgtggttatcaatgcggcattacatggtcacaacagcaacctgatttgctggatgtgatttttagtcgtggagagttaccgccggtacaagcacgtgctgactataatcaaacccatttagctaattatccgcaaatttcggccatcagtggggaactgtcagaattactcgaatccgcactgaaacagcaactgccagaatatatggtgccaagtctctatattccactggaacgaatgccactcacattaaataacaaagtggataaaaaagcgttaccgatcccaaatgaagatgatttacgccgacaaaactatgtggcaccaagaaatgaaatagaaattaagattggtcagttatggaagcggttattgaatgtcagccaagtaggcatctatgacaatttcttcacattgggtggacattcacttcaagcgacccgccttattagttcaatacgtaacgaattagaaatagaagttccgttgagaagtgtttttgaacacccgacacttgagcagttatcacaggtggtcactattcatcttatcaaagaaaaaagaaaacatttccaggctgggaaagaaacaacgcaagaactattgaaaggtgatatatga

SEQ ID NO: 7973 - DNA, 3507 bp, Photorhabdus luminescens
atgaaaaatgcagtgcaaattgtgaatgaggctttaaatcaaggaattactctgtttgttgctgataatcgattacaatacgaaactaaccgtgatagtattccgacggaattattcaatgaatggaaaaattataaacaagagttgatcgacttcctgagccagatcgatgcagaagaagaaattcaaacatatcaattacagaatatccaacgtgatggcaatgcagaacattatccactctcatttgctcaacaacgcctgtggtttatcgaccaacttaccgaaggtagtcctcaatataattgtcccggatatttgagattacgggagcaactgaatttcaacgcttttaaggctgcggtaaaaacattgcttgagcgtcatgaggcgttacgtacccatattaaagttattgataatgagccacggcaagtcataacacattgctatgatttacccattacacgacatgatttgaccgcattctctgaaactgagcaagaatctcaaatcaaaagattcagtaaagaagaagataacttggtttttaacctcagtactgatttgatgttgcgtattcgcctgataaagctggctgaaaatgattatgtgattatttataccattcaccatattgcctgtgatagctggtcaatagagatctttgtcaatgaacttatcaccttatatcgcgcgtatagtaaaggaaaaatagccccattaccgccacttaaaatccaatataccgattatgctcaatggcaacgaaattggctgcaaggcgatattctgaaaaaacaactggattattggcaaacccagttatcaggtatttctccacttcaccgttttccactggataacccacgaccagagaaacagagttttgaggggcggcttaatgaacaacgtatttcaaaggatttgacacaagaaataagagtattatgtcaccaacatgaagtcacattattcatgtttctggagacagcctttgccgtattgttgagtcgttacagtaatgaaaaagatattctggtcggaacaccacttgcagggagaaggcaccatgatattgagcctctgattggcttttttgttaactctctggtgatcagaacggatttatccggccagcccactttcagtgaattattaaagcagaacagtcgcactattctggatgcttatgcacatcaagatctgccatttcaaatgctggtagaaaaaatgagtccgggacgaaacttaaattataacccgatattccaaatcgcttttactctggagaatactcagtgtgatacggtactggcgcaggataataatattgagtttgaagaacgtctgcttttgaaagtccgatttgatttggaaattcatatttatgaagaagaggaggggggattatccctgttatgggtttatgacagcagcttgttcaacaatatgactattgaaagattactcgccaattatgaaaccttgcttgctaatattgttagtgtcatgaagccatgcattggttccgatctgatatacaaggaaccctctgtccatgatattcctctgttagcagaagctgaaatacagactttattacatgaatggaatggcccgcaggatcatatccagcatggcggctgttttcatgaactatttgagcaacaagctgcgcggtatcctgaaaaaatagccgttatttttgacggcaattcattaagttatcaggaactaaataaacaagctaaccaacttgctcactacttgatagaacaaaagatcaaaccagaaacattggtcgcgctctgtattcctcgttcaatacgcgctgtagtcgcgctactggggattattaaagccggcggagcttatttgccgttagatcccagctatccgaaatcccgtcttcaatatatgttagaacacagcgaagctgagttcattctgaccgaaacaaatctgatagaaaaactcccaatcagccaacagaaagtcatctgtttggatactgagacaatacaatcacaattgcagcacatgcctgcggacaatatcgctgaacgcccattcccactaacggaaaataatctggcttacgttatttatacctctggttctacgggtaaaccgaaaggagttatgttggaacataaggggtgggtaaatctggcactttcgcaggcgggtttatttggtgttgattcatatagccggggattgcagttcgcttcctggagctttgatgccatgatcttagaaatatcgatgacactggcgtatggagctgcactttatttaatttcagaaactcaacagcatagccctgaatatttggatgagttagttgataaacatcagattacccatgctgtattaccacccgctttgctgccttacctagactttaacaaatggcgttccgtttcaaccttacttttagcaggggaagcggtaccaccacagatcgccgttcgttggtcacagggcagaaaactgttcaacgtctatggcccgacagagtgtactgctattgtgacttcgggcttattaacggatgacaaaattacgattgggaaaccattgcctaataccgttatccgtattcttgatccatcaggcaatttagttcctgttggtgttgccggggaattatgtattggcggcatccaactggcacgcgggtatttgaattctcctgaaacaaacgcaacgaaatttatgactgatttgacgggcaaatcccaatcccaacgtttataccgaacgggagatttagcccgttggttgcctgatggtagtgtggaatttattgaccggattgactctcaagtcaagattagaggattcaggattgagttgggagaaatcgaaactgtactggtcgggcatgatgctttaagcagtgctgcggttatgacttatgggaacgataaaagattgattgcctatgtttgtccaaccaaagattggctggataaaaaagggctaaaatttaataccgacaacgtttctcaatcctccgatattaaagctgaactttctgagctacttgaatcagcactgaaaaaacaattaccagaatacatggtgccaagcctttatattccgctagagcgaatgccactcacgttaaataacaaagtgggcaaaaaagcgttgcctattccaaatgaaaatgatttccgccaacaaggttatgtcgcgccaagaaatgaagtagagagaaaaatcagtcagttatggcaagaagtgttgggcgttagtcaagtcggcatttatgacaacttttttgtgctgggtggtcactctcttcaggcaacccgccttatcagcttaatacgcaatgatctaaacattgaaatactgttgagcagtgtctttgagcatccaacactggagcgattagcacgaatcgccacgattcatcaggttaaagaaaaaagaaagcatttccaggctggacaagagacaacacagaaactattggaaggtgatatatga

SEQ ID NO: 7974 - DNA, 114 bp, Photorhabdus luminescens
ttggagcgccatgctgccgcgccagccaaagagttgaacgaaagaatagtcaggccgaagaaccggaaacaggctcaagatgaagctgataaatcagcatcggcaagcacataa

SEQ ID NO: 7975 - DNA, 1317 bp, Photorhabdus luminescens
atggtaatggaagttatcaacgtaatttacaatcaacatgaagttggtgcgatgagttttgaccctagtaaaaacttgggcttatttcagtacgaccccagctttatcgctaaagggatcgaactgtctccgttgaaaatgcctttgtcaaataaaatctacagttttccagaactggactaccacacgtttaaagggctacctggattgattgcagactcattgccagatgattttggcaacgctgtactcaatgcatgggttgcagctcaaggtaaatctcctaacgacattacacctttgcagcgacttcaatatactgggaaaagggggatgggcgctcttgaatacgcaccagcaaccaaaatgagaaatcttacttcctcaaaacaagtagaaataggttcattggtttctattgcccaagaaattcttaactcccgtggaaattttactgctgagttgattaataatggtcaggaagatcgcgaggccatgatgtcattactttccgtgggtatgagtgctggcggagccagacccaaagctgtattagcctttaatgaggattttactcaggttcgctctggtcaagttaaagttcctgacggttttattcactatcttatgaaatttgatggtgtcagtgagcacaacaaaaatcaggaaacctttggtgatccactaggctttggagcaatggaatatgtataccatttgatggcaaaagactgcggtatagacatgatgccttgccgattactccatgaaggcaataggcgtcactttatcacacagcgttttgatcgtctggggaataaaaaaatccatgtccaaacattaaatggacttgctcacgttgactataaaaaaccaggctccttctcctacgcagaacttttctttgttgctaggcagctaaaactatcggctaaggctgctgaacagctactaagaagaatgtgctttaatatcattgctagaaatcatgatgatcacgctaaaaacttcgcgtttatattaaaaggcaaaaaatgggatttggccccggcttacgatttagcctacagttacaagcctgacagtagatgggttagcagtcactggatgagtttaaatggtaaaagagacaacttcactcggcaagatttttattcattggagaaactaagcccactattcaccaaaaaaatggtcaatgggattattgaggaaaccatagaaaaagtctctgcttggagtaaggtagccgctgattttggtgtaccaaaatcgttgattgatctagttgatacaaatttgagattgaatatctaa

SEQ ID NO: 7976 - DNA, 354 bp, Photorhabdus luminescens
atgtgtcattatgggagcgttatgatgttacatgaaaaaacagcttcagcaattgcagaagagttgggagaacgcttgaaacaagctcgactaaacaatgatctgactcaagctgaaattgctgagcttttaggcgtcacaagaaaaactgtactgaatgctgaaaaaggtaaagtccaattagagatttttgttgccattatggcagcattaaacttaaccgaacaattagatctttttcttcccaaacaaagtatatctcctattcaactcgctaaacttcagggaaaaaaacgacaacgggcatctggtcttagaaaaaaccatattgaagaggatacgccagaatggtaa

SEQ ID NO: 7977 - DNA, 309 bp, Photorhabdus luminescens
gtgacgataaatgtagaggcgttaataagcagcctgggtaaatcttatcaggaaatttttgatgaagggttaattccttataagagtaagcctagaggagattctggtgacgattatgtgtcgctagatatgcagaaagaggggatatttctggcttttaaccggaccagcaagaaattaacacatgtcacgctgacattgatcgatgaagaacggccccgctatgtttacccaaatcaattgccattccatcgggttaatccaatgacgcgtgcattcagtttctaccgatatcaactcatctcataa

SEQ ID NO: 7978 - DNA, 429 bp, Photorhabdus luminescens
ttgggacaaacagcagaacaaataattgaaaaagagattattccagctaataagtttgaatatttctttgaaggagatgaggagtttttttataaacctgaatcaggtatgagacttgtttttgatgatgtttcgaagcggctaaaatcgagacagttcacattgattaatatctatgacaataacggtgcatataatggagaaataccttatccattttcacattcagtggatagaacaattgttagagcacttatgggggaaccagattctgctgatggcccagaaaagatccctgtcattggcatggttggtggatatgattcttatacacgtaagttgagtgagcaatatcctaatacagaaattcgttttctctatttggctgatttacgggtacatgcattaatctttgagcatattgtataa

SEQ ID NO: 7979 - DNA, 258 bp, Photorhabdus luminescens
atggaactgaaaaataagttggaagattatacagaagctgaatttttagttctgctgaataaaatcttcgatggtgaatgtaaaactgagaacgaatatcacagtttagtaaaacatattgagataattaccgatcaccccagacgaaatggactaattttttacccagaaaatggagttgaagatagtccaggaggtgtgcttaaagttataaaagaatggcgagctaaaaacggaaaacctggcttcaaaaaataa

SEQ ID NO: 7980 - DNA, 549 bp, Photorhabdus luminescens
ttgagagggaaatataatttttcctgtgaaaaatttgaaaatctaagtggaagatatatcagagaaggggatgtaaaaataatgacggttaatgttgaatcgttaattaatagtttaggtagaacctaccaagatatttatgatgagggactaattccttataaaactaaaccaacagggtttgccggtgatagtatagtatgcttggatatggttaaagaaggcgtttttctgtctttccatcgggaaggaaagcgattaaaagaaattacattaactttgtttgacgagaagaattctttataccagtttactaatgagttgccttcaccattaattccattgatgtgccgacagtgggttcatgaacaatttggcaaaccagaaaaatttcttccaccgagaaaaaggctcaaaaaagacattggctggactgagttatattcattgctggattttcgtattccgaccagtatgaagtttgattatgatctattggagcaagttatatcagtgacattcttacctacatcagaagtacgttggtag

SEQ ID NO: 7981 - DNA, 468 bp, Photorhabdus luminescens
atggcagatattatgacgatgattaaaagtttaggacaaacggtggaacaattagttgaaaaaaaacttatttctgataaaaaatttgaatacctttttgaaggagctgatacgtttaattatgagcctgaggctggtcttatcttggtattcgatgataaatcgagaaaattgaggtcagttgaatttacactgattagtatttctggacgttctggaaatagtgaaatgtatcatggggaaatgcctcctccgtttactctatcaatggataaagttgctgttagagctttgctaggcgaacctgatgttacctcaggggaaacaaaaattcctgttattggtgttgtcggcggacatgattgttatattcgtaaacttcactttatataccccaatacaaatattcgtgtcctatatttaatagatttgcgtgttcgaggattggtttttgagagggaaatataa

SEQ ID NO: 7982 - DNA, 144 bp, Photorhabdus luminescens
ctggtatttcctattccgaatatgccgccggtgtatgtgtatttgagtaaaccaccggtgaaattgtttgaagtagatttgtatagaaattttgcggggcgatcaagaaatggaacacatgcagaatttcaacactctatctga

SEQ ID NO: 7983 - DNA, 252 bp, Photorhabdus luminescens
atggaaaataatgtaatgaatattactgaaaatgaatttttatccttgataaagaaaatatttaatggaaattttcgaacagaggaggaagaatcagaagctatagatgaatttgaaagaatttcagaacacccctctggcggtgatttaatcttctatccagaagatggcattgaagatagtcctgaaggtgtgcttgaagtagtaaaggaatggagaaccaaaaacggcaaacctggctttaaaaaatag

SEQ ID NO: 7984 - DNA, 450 bp, Photorhabdus luminescens
ctggtattcccagccgattcaggcatggagccgatctatgtgatgtttaatattcctcggaatcaaccgggagtggtaactggtcggggacaaaaaatcgaaggaaactggttaagtcgagcagggcaagatatgggagcaccaattcccagtcagatagcagataagttgcgtgggaggaagtttaataactttgataatttcagaaatgcgttttggaaagaagttgctaatgaccctgagttttctaagcaatttaaaactgcgaatatgggaaatatgaaaaaaggaaaagctccagctccaaggaaagacgaatggaaaggaaaaaagaaaaaatacgaattacatcataaaaagcctatttctaaaggtggagatgtttataatgttgataacattagtgttgttacgccaaagagacatggtgaactacatagttggaggtga

SEQ ID NO: 7985 - DNA, 453 bp, Photorhabdus luminescens
atgagtattaaggagcttattaatagcttagggaaaacagcagatttattaattgaaaaacaacttatcccgacaggaaagtttgaatatttgtttgaaggagacgatgaatttctctgtatgccagaggatggattaacgttagtttttgaagataaatcaaggttgttaatctcagtcggtattactctaattacgtctgggccaaggatgaagatttatagaggtgaaatgccgcccccatttttgtctgaaatggataagacaaaggttaaatctgtgttaggagagccatcagagacaaagggtgctgttaaattgccagttattggaatggttggaggatgggatacttatattgaccggatgagcgatcaatacccaaatacacgaataatttttgcgtattctacagatcagaaggtgagtaatataacgtttaaaaaaatttga

SEQ ID NO: 7986 - DNA, 453 bp, Photorhabdus luminescens
gtggctgacattacgaaattaattaaatgtcttggaagaaccgctgaaacgttagttgaagatggtgagatatctaaaggaatatttaagtttcattttgaaggggatgaatcgttcaattgcgaacctgaaaaaggaatcacattagtttttgattctaaatctaggcaattgaattcagtccagataactctaattgatatacatggtgatcatgatgaatataatggtagtttgccttatccatttttacctttaatggataaggcaatgataagagctgaatatggagaacctatggagtcaaaagatatgatagaagcaccggttataggtgttattggtggatacgatgcttatataaatcgtataaaatcttgtccaaacgtggaagtcatttttatttatgatgcttattatcgagtgagagctcttactttcaacactatctga

SEQ ID NO: 7987 - DNA, 1674 bp, Photorhabdus luminescens
atggcaataggatatttcttgcttgttggtgataagacaacctgtggcggacagattattaccggtgaccacaccatgacatttaatggacgggcaaccgctcgtgaaggagataaggtcacctgtggcaaacatcccggtagttatacgattgtcggtggtgtatcagatgtgtttgatatgggacgtaagttggctggcacattggacagtgtgagtacttgcccttgtcgggctaggtttatcaattcggagatggacagctatgagaagcaggagcaacccaataatcgggctacatcccctgttaatatggcgacccaaaatttctcgtcgccggtggaggaagcgagaaacgttcagcccgcacctcctgtgactaaagagcctccgataccggtgtttgcgaaatcctgcttacggggtaaaggttgtaccgatgccggaaccgaagccgaaccggcggataacttcggcagagtggcgatatatcaggttccgtcatctcccactccggtgacgccgcaaaaaccagaaccgcctccgcaaggtgagaaacagccgtctgaaccggataaaccgcaggataaaaaattaccgtggtataaacggtggttccgtggtggtgaagataaagccgaagcggctgctgctgccgtggccgccactgctcgtagcgcggtagcggaaggggaaacgctggtgatgcgttacattggcggcggcgctatcagtgcaggacgttggctagcggcgccgaatccggtgacagttggattaatggggctgttttattcacctaagctgaatgagggtgaggaggattacttagatccgtctcgcctgagacagatagcggaacagtacggtaaagcgccaactcgtgtacgttttcgctggatcagagatgaaaaaagcggcaggatgacggttcagggatatcacgtcagcccggaaggcggcttggataaagtaccggttcgcatgatgacgctgaatcggaccaccggtaattacgagttttgggaaccgggggaataccggccgacgattttatggacgccgaacgaacaggaattcaaggtgccagcccataccgggaatgaagaacagccgtttattccgtcgcaaataaccgtgttgccgatcccggagaaagtgggcagcgatattgaatcgttacctatgccggaagagaaggattttcgtgattatattctgatcctccctgttcctaatatgccgccggtgtatgtgtatttgagtaaaccaccggtgaaaccgttggaagtgggagaatatcaggatctggctggacgtagccgtaatgatgggttggatattgatcatattccttctaaggcagcgttgaaattgtttttaaaaaataagttaggtaaggctgcaacagataaagacatagataagatactcaatagtggtgtatccatagctatccctcatagggttcacagaggctatagtgaaacttataagggcaggaatacaaaggcgaaacaagttaaagacgcatcagatattagagtggcggtagacagtaattttgatgctcaagttcccggcctacgagaagaaggctatacagatgatcagttgaacaaggcacgagaagaattacaccaactgaataaagaacaagggtggtataaatag

SEQ ID NO: 7988 - DNA, 2457 bp, Photorhabdus luminescens
atgtctggtgaagatcgtcaaccaatcggacgtaaaggcaaaaaatgggtatcccgccgtaaacggtcaataaaaagacggtatctgttggatgatgataatggctatgaagatgaggactacgatgatgaagaggatcaactcatgacaaagaaaggaatgtattcccgtccacctaagaaaaagtggcgttggttctggttgttattcaagatattcattatttttgccgtattattggcggcttatggtgtctatctggatgccaaaatccgcgatcgcattgatgggagagtctgggaattacctgcggcggtctatggccgcatggtcaatcttgaaccgggcatgaactacagtaagaaagagatggtacatctgctggaagggatgcagtatcgccaggtgacgaaaattacccgtcccggagagttttctgtcagaggtgaaaccattgaaatgttgcgtcgtccgtttgatttcccagacagcaaagaggggcagatccacgctctgctaactttcagtgataaccgtttggcggggatcgaaaatctggaaaatcagcgtcagtttgggttcttccgccttgatccgaagctgattaccatgttgcagtctcccaatggggagcagcggctatttgtgccgcgttctggtttccctgatttactggttaacaccttgctggcgacggaagatcgccatttctatcaacatgatggcatccgtattctttccattgggcgtgcagcactggctaacttgactgccgggcgcacggttcaggggggaagtaccctgacgcaacaattggtgagaaacctgttcctgaccaatgaacgcactttggtacgtaaagctaatgaagcctatatggctgtgctgatggattatcgttacagcaaagatcggattctcgaactgtatctgaacgaagtttttttaggccaaagtggtgatggggagatccgaggatttccgctggcgagcctctactattttggtcgtcccgtggatgaattgagtttggatcaacaggcgttgctggttggtatggtgaaaggcgcttcactctataatccgtggcgcaatcctaaactcactctccagcgtcgtaatgtggtgctcaagctgttacaaaaccagcaaattattgatgaagatctttataaattattaagtgctcgtccactgggggtaaaaccgaaaggtggtgttattaccccgcaaccggcgtttatgcagctcgttcgtaaggagttgcaggacaaactgggggatagagtgaatgatctgtccggcgtgaaaatcttcactactttggacccagtatctcaagatgcggctgaaaacgcagtagaagaggggattgccagtctgagaaaaactcgcaaaattgctgaccttgaaggagcaatggtaattgtcgatcgcatcagtggtgaaatcagggcgatggttggtggttctcaaccgcagtatgctggatttaaccgagcaatgatggcgcgtcgttcaattggttcactggcaaaaccttcgacttatttggcggcattgagtgagcctgatcaatttcgactgaatacttggctgtcggatgaacctcttgcggtaaaacagccgaacagcaaggtttgggaaccgagaaattatgaccgtcgtttccgtggacgtgtcctgttgatagatgggctggcgaattcattgaatattcctacggtgaatcttggattggcagttggtcttgatcatgtcagcaacacattgatccggcttggcgtaccggaggaagtgattcaacaggttccagccatgttactgggttctcttagcttgacacctttagaagtggcgcaggaataccagacgatgacgagtggcggcaatcgtgcgacgctttccgcgttacgttctgtcatcgcggaggatggcaccgtgatatatcagagttacccacaggctgaacgggctgtaccggctcaggcggcttatctgacgctatatggtatgcagcaggtggtggcgaatggaacttctcgttctctgaatgctaagtttggtcgttataatctggcgggtaaaacgggcactaccaatgatctgcgtgatagctggtttgccggaatcgatggtaaagaagtggtgatcgcatgggttggtcgcgataacaacggaccgaccaatctgacaggcgctacaggggcgttgaatgtatatcgccgttatctggaaaatcagacgccgctgatgttgaataacattccaccggaaggcattgtcgatatggcggttaatcaggatggcagctttagctgtagtggcagtggttggcgaacattaccggtttggacttatgatccacagagtttgtgccaacaaacagcggtatcagcaccggttcaacagcaagaagaagcaccgggctggttgcgagagatgtttggccaataa

SEQ ID NO: 7989 - DNA, 2490 bp, Photorhabdus luminescens
atgctacaatgcaggcggttgaaagttaactttctttggtatggagtatttgtgtctttattgcctgtatatgagatcgtcgaacctgtcctgagtgcgttgaaaaattcacaacaggtcctgcttcatgctccggccggtgcagggaaatcgacggctttgccattggaaattttgaaaaaagccgctttttccgggcgtatcataatgttagaaccacggcggattgccgctcgcagtgttgctaatcgccttgccgctcaactgaatgaaaatatcggacagaccgtgggttaccggatgcgttcagaaacaaaagtgagtgtaactactcgccttgaagtggtaacagaaggcattttaacccgaatgttacagcaggaccctatgctgacaggggtttctctggtgattctggatgaattccatgagcgcagcttgcaggctgatttggcgttggcattgttgctggatgtacaggcagggctgcgggatgatctgcgcattttgatcatgtcagcgacgctggataatcagcggctctgttctttattacctgatgcaccagtgattatttcagaagggcgaagctttcctgtgaccagacattattgtcctttgtctgctcaccaaccttttgaacagagtatcgccaccgttgtattgcggttactccaacaggagcaaggttctgtgctgttgtttttgccgggtagcggggaaattcaacgggtgtttggactgcttagcgggagagtggctgaggataccgatttgtgcccgttatacggtgcgttgtcattggctgagcaacaaaaagcgatcgaaccttcaccatctggacgccgtaaagttgttttggcgactaatattgcagaaaccagtttaacgattgaaggtattcggttggtgattgatagtggtcttgaacgcacgacgcgttttgaacccaaaaatggtctgactcgcctgatcactcaacgtatcagtcaagcttctatgacacaacgagctggtcgggcaggacggttagaagccggtgtgtgttggcatctattcagccaagaacaggcagaaagagcggtagagcatagtgagcccgaaattctgaatgctgatctcagtagcttatggctctccttattgcagtgggggtgtcatgatatttctcaattgcactggctagatataccacctgcggcggctctggcggtggctaagtcgctgttattacagttaggtgcaatcagtaacagtggtcagttaacgtccagaggcagtaaaatggcggaatccggtagtgatccgcgtctggcagcgatgttatgtgcggggttggaacaaggggccgatatgctggcaaccgccgctatgctgaccgcgattctggaggagccgccccgtgatggtcagccggacatcacttattgggttgagcagcgacaagctcattggttacggcgggcaaagcagttagttagaaatatgggtgatcattttggtgagccagtcggtggatttgctgcaatgctattagcccaaggtttccctgacagaatagccaaaaatcgggataagggagggcgttttcaactgtcgaacggtctgggaacgataatcgatgatgaagaaacgttatctggcgaatcgtggctggtggctccttcattattacaaaacagtagaaatcctgacgcgcgtattttgctggcttgtcctctggatattgaacgactgatacagcaacagccgaatttattcagtgaacagagtgtcgttgaatgggatgataacaaagggacgttgcaggcttggaagcggctgcaatgtggcagcctgacagtaaaagcccaacgattggcaaagccttccgatgagcaattacaacaggctctgctaaactggttacgcagtgagggattacatgagctgaattggtcacctgcggcggttcagttgtgcatccgtatccaatgtgcggccaaatggttacctgaaatgctgtggccgccagtcaataatgatgcattaatggcttctcttgatgattggttaatgccgttccttactggtgtgcgtgatttgaaagggctgaaacagattgatttgttgccggcactggaaaatttgctggattggcagcaacaacagtgtctggataatgaactgcctatttattacactgtccctaccggcagtcggatagcaatccgttatttcagtgataaaccaccggtattatcagttcggatacaggaaatgtatggtgagtggcaaagcccatctctggcaaaagggcgggtaacactggtgcttgaactactatcacccgcccaaaggccattgcagatcacacaggatttggctgctttttggcaaggatcctatcgtgaagtgcaaaaagagatgaaagggcgttatccaaaacatttatggccggatgatccggcgaatacggtaccgactcggcggacaaaaaaatattcgtaa

SEQ ID NO: 7990 - DNA, 834 bp, Photorhabdus luminescens
ttgtttttatctataataatgtcatcaaaagcatattcatttgataacatgaaactcagctttgttgaaggcggtgatttttacgttggtagtgtgtttggcgctcaaaattatgaatctcattctaatgttacattaaattctttttatatcatgaagaatgaagttacttattcagaatataaagaggtatatgaatgggctatattaaatggttatgattttgatgatggatgtaatggggcacattatgaagattgccttcctcctgagcaggaagaaggcaggcatcctgtgactagtattaaatggttagataccattcttttttcaaatgcattaagtgagaaattaaaactcactccagtatattttcaaaaaggaaataaaactattagaaaaaaagacaaaaacttagagatctttataaatacaaacgctaatggctatcgtttacctaccttaaatgaatggcatgttgcagcaaggggcggaaagcctgccttacgattaggaagatatggatactatcactctggaagcaatgattctaagaaggtggcatggtatccagagtttaatacaagtaattttggaacacaggttgtaggtaaattatctccaaacgacttagatttatacgatatgagtggaaatgtttctgaatgggtctatgatagttatgaacttggtacagttaagttgtactatttttgtggtggaagttatctttcccatgcaaacagcttatccagttgtgataaccatagttcaggatatattatgccagatgttggatttagattagttaggagctatttaaatgaaaaataa

SEQ ID NO: 7991 - DNA, 537 bp, Photorhabdus luminescens
atgaaaaataaattttaccttatttttattttacttttctcgtttgaggcattttctcattgcggaaataaggtaaatctaaaggatggaatcaatcttatagatttgaatggtgatggaaaaaaagatgtaattttttatgccaaatttgaaaacaatacatctcatccaagtaacacattaactgtttttataaaaaataaaaatgggaaatttaatatagttccactcccaaatgatactggttttacttggtttgattttaaattatctgcttctgaaataaaaatacaagattacgagctaagggtaaaaaatggagtttattatattattttttttcgcaaaaaaaataatgatgatgacatatttggagaatacccagtagaatttattaaatatgatataaaatataacaatgaagtgcctggtatttcaaattattattgggattatactaaatcctatcttacaaagaaaaaatataaaaatgttagtgatgccatgacagaatataatatggagtgtagtttatga

SEQ ID NO: 7992 - DNA, 546 bp, Photorhabdus luminescens
atgaaattttttttatttttttttgtttttttatcttttttttgtcattcaggagaaaatgaatcttttagaaaaaaaatacaaaaaaaaattgacgataaaatattattatgcctaggtgaaactgaatggccagtatcaattaatgaaaattctatatgggttaatgcgaacatggaatctcttgttgatgctggattagtgaaattggattttaaaagaggaaaaaataaattatggaacttaaccaagttaggaaaaaaagaatttaataaaaatggtgatttttgttacggtagaatgatgttaaaagacattctaagtataacttacataaataaaaaaagagggtttatagtttttaactactatgtgcatttattacctgaatgggctaaaagcaaatcaataagattcgcatattcttatctagataatattattacaggcattgacaatgaaaaatatcaaattgaatttgaaaaatctgacactggggttattaaaataataagtgatcctgttcaacttgaaattctttactaa

SEQ ID NO: 7993 - DNA, 270 bp, Photorhabdus luminescens
atggcagattcgactaaatatacattacacctgctggatagtcttggtattcagcataaaaacagttttatgaaacatcgttcaaaagcagttatttcggataaagattactccagccaatcattacgtagccgattaaaaaaatcagggaataaaagtgataattccgtatatacccaatggatttcaagatggatcgcgacggcaagggagcgaatccccgggagcatagataacgatgtgaccggggtgagtgagtgcagccaataa

SEQ ID NO: 7994 - DNA, 747 bp, Photorhabdus luminescens
ctgcttcaatcttatgccatccgtcattcaggagtttttatggaattccatccacctttacaatctgccacgctaattcgtcgttataaacgcttcctggctgatgtcatcacaccggaaggtgaaacactgactatccactgtgccaatacaggtgccatgaccggctgtgcgacaccgggagatacggtttggtattccacctccgataatccaaaacgtaaatacccaaacagttgggaattgacagaaacaccggctggtcactggatttgtgtcaatacgctcagagcaaatgatttagtcgccgaggctattgcacaaaatgccattccagaattttctgaatataaaaaaatcagccgggaagtgaaatatggcgaagagaacagtcggatagatttactgttacaagcagaacagcaggttaattgctatattgaagtgaaatcagtgacactgctccaagaaaattgtggctatttcccagatgctgtcacgacccgcggacagaaacacttgcgggaattgcagcacatagcagaacaagggcaaagagctgttttattttttgctgttctgcattctgggatcaatcaggtcgcggcggctgcacatattgatcataattattcatctcttttggaacaagcgcaaaactctggggtcgaagttatctgttaccaggccaacatgacgggaaaagggatggttttaggcgataagttaacttttttactgaaatga

SEQ ID NO: 7995 - DNA, 102 bp, Photorhabdus luminescens
atgggttggcaattgttcctgccattagtttcacaatggtgtgaaagcaaatgtattgcacgcctttacaccttgtacaaccgggctgcaaatattaggtga

SEQ ID NO: 7996 - DNA, 456 bp, Photorhabdus luminescens
atgcaagaagggcaaaaacgtaaaacctcgtccttaagcattctcgccatcgctggggtagaaccttaccaagaaaagccaggtgaagaatacatgaacgatgcccagttggcgcatttcaagctaattcttgaagcatggcgcaatcagctcagggatgaagtagatcgtactgtatctcatatgcaagatgaggcagcgaacttccctgatccagttgaccgtgcggcgcaggaagaagaattcagtcttgaattacgtaaccgcgatcgtgaacgtaaattgattaagaagatcgagaaaaccctgaaaaaagtcgaagatgacgatttcggtttttgtgaatcctgtggcatcgagatcggcatccgtcgtttggaagcccgtccaaccgcagatttgtgtattgattgtaaaaccctagccgaaatccgtgaaaaacagatggctggctaa

SEQ ID NO: 7997 - DNA, 951 bp, Photorhabdus luminescens
atgataaaatctgaacgtccccaggcttatattgggcgtttcgccccatcaccttctggtgacctgcattttggttcattaatcactgccattggcagctatttgcaggcccgtgcttgtcagggaaagtggctgatacgtattgatgatattgatccgcctagagaagttcccggtgctgccagccgtattcttcacgcacttgagcattacggtttacattgggatggtgaaattctctatcaatctcagcgccatgaggcctactgtcatgtccttaatcaattgcaacaacaaggtttaagttattactgcacctgtacccgtcaacgtattcaccagattaatggtttttatgatagaaactgccgtgaattaaatttacccattgatcatgcagcaattcgattcaaacagcgtcatccggtttacggttttgaagataaattgcaaggatatctgaacgccgatccggtcatggctgaagaagattttattattcaccgtcgtgacggtttatttgcctataatttagtggttgttattgatgatgattaccaaggggtgaccgaagtggtaagaggggttgacttgattgaaccaaccgtccgtcagattgcgctttatcggcagttaaatctcaaaatacctgactatattcatttaccactcgctctgaataaggatggcaataaactttccaaacagaatcatgctcagccgatcccattggatgatccccgaccattactgattgaggcattatctttccttaatcaatctgttatagaaaactggcaagatctttctcgtgatcaattgttgcaaaaagcaacagcacattgggatctagaccgaattccacgacaaggtaaaatacacatagataacatgaataaagttacggttagtcataacaaccattctcaaaaaatacacagtaggctatga

SEQ ID NO: 7998 - DNA, 1566 bp, Photorhabdus luminescens
atgattagttacttatcgaggtgtaccatttttaaccgagtagcaaatttctgccgtaacttattgatccgcgaagggaaaaataaccgcgaactacaggcagccagtgaaaggccagtcaccggatctgaccgttctgctcaagaagagtacgtaactcttcactctaatcgccaagccccttatcaacccttatctaatgtggagataccaagggaggttgaacaggagaaccctcattcggatttatcgataacgataattccacgggaacaacatcgtatttcccgcagagatatcagtgaaaatgcactgaaagtcctttaccgtttgaataaatccggttttgaagcctatctggttggcggtggtgtccgtgacttattactcggtacgaagccgaaagattttgatattgccaccaatgccacgccagaacaggtgcgtaaattatttcgcaactgccgtctggttggacgccgctttcgcttagctcatattatgtttggtcaggaagtgattgaagtcgcaacattccgtggtccacatgaacaaacgggttctgatgataaaaatcagtcacaacaagcacaaagcggtatgctactgcgggataacatcttcggttcaattgaagaagatgctatgcgccgcgatttcaccataaacagcctctattacggtatcaatgatttctctctgcgtgattatgccggtggccttcatgatctggaaaccggtgttatccgcttgattggcgatcctgaaacccgctatcgagaagatccagtaagaatgctgcgcgcgatccgtttcgctagcaaactgaatatgaccatcagcgaaggtaccgccgaacctatttctcgtttggcttttctgctgagtaatattccacctgcccgtctgtttgaagaatctttaaaacttttacaaaccggtcaaggctacagcacttatcaacttctgcgcgaataccgcctatttcaaccacttttcccattgattcaacgctatttcaccgaaaataacgattcaccaatggaacgtatagtcaatcaggttttgaagaataccgattaccggttacaaaatgataaacgggttaacccggcgtttttattcgccgcaatgctctggtatccactgatcgaacatgcggaaaagctatctcaagaaggtggtctggcttactacgatgcttttgcattggcgatgaatgacattctggatgagcaatgccactccattgccattcctaagcgcctgacaaccatcatgcgtgatatctggcaattacagttacgtctgccacgccgtcatggtaagcgggcaaataagctgatggaacaccctaaattccgtgctgcctatgatttgctggaactgagagccaatgttgaaaatcgcaatgagctcaaagagcttgtccattggtggggagaatttcagcaagtcaatgcatcacagcaacggagtatgatttccgaactgggcagtgagattgtccgtcgtcgtacacgaccacgccgtcactataaaccaagactgagcaggaacggctga

SEQ ID NO: 7999 - DNA, 516 bp, Photorhabdus luminescens
atggctcgtgtttatatcgctgttggtagcaatctggcagaacctatgcagcaagtaaaaaatgcacttgctgcattaaaagatttaccggaaacagaatgtattgcctgctcctcactgtatcgtactaaaccgatggggccgcagaatcaacctgattttctgaatgcagcagtcgcactggaaaccacgctagcaccggaagaattactcaatcacactcaggcgattgaactgacccaaggacgggtaagaaaagatgaacgctgggggccaagaacacttgatctggatatcatgctatttggtgatcaagtgattaataccgaacgcttaacggtaccccactacggactaaaacagcgcgaatttatgctctacccgttagctgaaattgcccctgatcttatatttcctgatggggaagctttatctgaaagactgaaacacatcccagaaaacggcttggcactctggctgcaaccgcagtcctctgattctaatcactacatatag

SEQ ID NO: 8000 - DNA, 792 bp, Photorhabdus luminescens
atgaaaccaatgaccatgactgatctgaatcagctcaagaaagaaaaacgtaaattcgcgactattaccgcttatgacgccagctttgcccacctgtttgccgagcaaggtatcgatgtcatgctggttggtgactcactgggtatgactgtgcaaggggctgataccaccattccagtgacggttgaagatattgtctatcatactcgctgtgtccgtgccggaacaccttatacttttatcattgccgatatgcccttcatgagttatgccacgccagagcaaagttgtgaaaacgctgccaagcttatgcgtgctggcgctaacatggtgaaacttgaaggcggtagctggttatacgataccattaacatgcttaccgagcgttctgtacccgtttgcgcccatttagggctaactcctcaatcagtccatattcttggcggttataaagttcagggacgtgatgaagtatcagcgaatcaattgataaaagatgccattaccttagaaaaggcaggcatacaactgctagtactagaatgcgtacccgttgatttagctaaacgtatcaccgatgaattacagatcccggtaattggtattggtgccggtaatgtgactgatgggcaagttttagtgatgcatgacacactgggcattaccgtaagcccccctaaatttgtgaaaaacttccttgaagaagcagggaatatacgtgatgccattcgcctatataaagaacaggtggaaagtggtatttaccctggtaaagaacactcattttattaa

SEQ ID NO: 8001 - DNA, 855 bp, Photorhabdus luminescens
atgctgattgtcgaaactgtaccgattctacgccgtgaaatccgccgctggcgtcaggaaggaaaacgcattgcactggtgccaacaatgggtaacttgcacgacggccatatgacgttagtcgatacagccaaagggcaagcagatattgtgatcgtctctattttcgtcaatccgatgcagtttaatcgtccagatgatttggcaaaatatcctcgtaccttacaggaagattgcgaaaaacttcatcaacacggtgtcaatctggtatttgctcctgctgataaggaaatataccctgatggtatggaacatcagacttacgttgatgttcctgagctttctaccatgctggaaggggccagtcgtcccggtcatttccgtggtgtttcaaccgtagtgagtaaactgttcaatctggtacagccagatttaacctattttggcgaaaaagattttcaacaattacaacttattcgcaaaatgattgccgacctggcttatgatattacgctggtttcagtacccacggtgcgtgaccaaaatggcctggctctcagttcacgtaataacaatttaaccgccgatgaacatcgaatcgccccagaactcagcaagatcatgcgatctatcgctgaaaaaatggcacagggtgaacgtcacacagaacagttgctcactcaagcttcttcacagctacacgaagcgggctttgtacctgatgagttgtttatccgtgacgctgaaacattggcaccgttaaataccgaaagcaaaaaagccgttattctaatggctgcctggttagggcagacccgtatgatcgataatcagcaggtagatttaacgcaataa

SEQ ID NO: 8002 - DNA, 381 bp, Photorhabdus luminescens
atgttgcgtacgatgctacaggggaaattgcaccgggtgaaagtcactcaggcagatttgcattatgaaggttcctgtgcaatggatcagaatttcatggatgcagccggtattctggaatatgaagctattgatatctataacgtggataacggtgagcgcttttccacttatgctattgccgctgaacgtggttctagaataatttcagttaacggagcagccgcacgccgtgctgcggtaggtgataagctaattatttgctcatatgtacaaatccctaacgaagatgcccgtcaccataagcctaatatcgcttacttcgatggtgataatattatgaggcggatcgccaaagccgtgccggttcaagtggcttaa

SEQ ID NO: 8003 - DNA, 771 bp, Photorhabdus luminescens
atgattcagttgtactgggtggcgctaaaaactatctggattaaagaaattacccgttttggtcgtatctgggtacagactttattaccaccggttattaccatgtcgctctattttattatcttcggtagcttgattggttcgcgtattggggaaatgggcggtgtcgattatatgcagtttattgtccctggccttattatgatgtcggtgattactaactcttatgccaatgtttcttcctccttctttggtgcgaaattccagcgcagtattgaggaattattagtagcgccggttccgacacatatagttattgtggggtttgttggtggtggtgttgcccgtggtgtctgcgtcggtattctggtgacattggtttctctattttttgtgccgcttcatattcatgcgtggtggatgattgttgtcacgttgttgatgacctccattttgttctcactaggggggttgctgaattcgatttttgctaaaacgtttgatgatatcagcattattccgactttcgtattaacgccactgacttatcttggtggggtgttttattcattgacattattacccccattttggcaagcggtttccaagttgaatccgatcgtttatatgattagtggtttccgttatggtttcctggggattactgatgtttctttgataattacgttgagtgttttgactgcatttattgtggctttttatcttgttgcttggtatttaattgaaacagggcggggattgaggacttaa

SEQ ID NO: 8004 - DNA, 912 bp, Photorhabdus luminescens
atgacttatgcattggagttaacgcagcttactaagacttacactgatggtgttaaggcactgcgtgggatagatctgaatgtggaagttggagacttctacgcattattaggtccgaatggtgcagggaaatccaccacaatcggcattattagctctctggtaaacaaaagcagcggtaaggttaaggtgtttggctatgatattgatactgatattgtcaatgctaaacgccagttaggtcttgttccgcaggaatttaactttaacccgtttgagacggtgttgcagattgttctcaatcaggccggttactatggtgtaccgcgaaaagtagcgcaagccagagcgaaaacttatctgttgcagttagatctgtgggaaaaacgcaaccaacgggcgattcgtctgtctggtgggatgaaacgacgcttgatgattgtacgagcgttgatgcatcagcctaagttattgatccttgatgaaccgactgctggtgttgatattgaacttcgtcgctctatgtggaattttttgcaagagctgaatgcccaaggaacgacaattattctaacgactcactatctggaagaagcagaaatgctgtgccgtaatattggtattattcagcatggtgaattggtggaaaacaccagtatgaaaaatttactcagtcgggtggagtctgaaacattcttcttcgatctggcgacacaaaacccaattcttgaactagtaggatatgattatcgactgctggatgcctctactttggaagtggatgttcagcgtggtcagggaataaatagcgtatttacccaattaagtgctcagggtattcatattttaagtatgcgtaataaagcgaaccgtctggaagagttatttgtcagcttggtgaacaataagtaa

SEQ ID NO: 8005 - DNA, 654 bp, Photorhabdus luminescens
atgatgaaaaaaatagaagagctgcttgccaataacaagcagtggtcagaatcggttaacgaagaaaatccaatttttttcaaagaattagcaaaatcacaaaaacctcatttcttatggattggttgttcagacagccgggtaccagcagaaaaactaattgatgccgcccccggtgacttatttgttcacagaaacgttgcaaacctggttattcatactgacttaaattgtctttcagttattcaatatgcagtagatgtactggaagttgaacatatcattatctgcggacactacggttgtggtggtatcgaagctgcaattgatggcaccgaactgggattgattaacaactggctgctacatattcgtgatctttggtataaacacagttctatgctaggtgaattaccccctaatgagcgtctgaaccgtctgtgcgaaattaacgttgttgagcaagtatataaccttggtcactcaaccattatgcaagcagcatggaaacgaggccaaaaagtgatgatccacggttgggtttacggtatccataatggtcaattgcaagatctggaagtcacggctgacagccgtgaaaaactggagcttgcctatcgccagacaatatccaaactgacgcataagaagtga

SEQ ID NO: 8006 - DNA, 282 bp, Photorhabdus luminescens
atgattaaaagcttcaaacacaaaggattggaaaaatttttcaaaactggttctaccgctggcattcagcctaagcatgccctaaagctgcaaatccagctaactgcattgaatacggctaaaaaaccagaagatatgaatgcccctagctggaaacttcacccactaaaaggagcaaatcttagcggtcactgggcaatatctgttaacagtaattggcgtttaacatttagatttgagggcgaagatataattctcgttaattatcaagattatcactga

SEQ ID NO: 8007 - DNA, 279 bp, Photorhabdus luminescens
atgaaaatgcataaacctgcacacccaggcatagttttgcgtgaatatcttggtgacatatctgtcacggaagcagcaaaggctctcggtataaccagagctgcactatcccgcatattaaacggcaatgcaggaatatctgctgatatggccctgcgactggaagccgcattaggtactagtgccgaaatgtggacaggaatgcagtcccaatatgaactgtggattgcctcacagcacaaaagaccagaaataaaaccaatactggctcactcctga

SEQ ID NO: 8008 - DNA, 552 bp, Photorhabdus luminescens
ttggttaactttataatgaaacacactgtagaagttatgatctccgaacaggaggttaaacaacgtattgctgaactgggaaaacagattactgaacactattgtgacagtggtagtgggctggtattggtcgggttgctgagaggttcatttatttttatggctgatttatgccgtgaaattcagatccctcatcaagtcgactttatgacggcttccagttacggtagcggtatgaattccactcgtgatgtgaaaatcctgaaagatctggacgaggatattcgtggtaagcatgtactgattgtggaagatattattgattcaggtaataccctgaataaagtgcgtgaaattttggcgttgcgtgagccaaaatcactggcaatctgtaccttgctggataaaccttcccgccgtgaagttgatgttccggtggagtggattggttactcaattgaggataaatttgtggtgggttatggtatcgattatgcgcaactttaccgtcatctgccttatatcggccatgtggttttgctagaagagtag

SEQ ID NO: 8009 - DNA, 555 bp, Photorhabdus luminescens
atgaaggtaattgagatgattagtgcaagatttgactcagaaaaggctatagaggctattctgtacgttgcctctatagcgccaatttctgacgtttatcatgtgggtaaaattctgtattttgctgaccggctgcatttggagcgttatggtcggttaattacgggtgataactatcttgcaatgaaagatggccctgttgcagtgaatgcctatgatattataaaagtagccaggggagacgggcgctttattccaaataagtgtgatgttgatgtcattcggtcattgttgtcagtagagggacgtcatggaaatcatcaaatacgtgctttgcgtgatttcgatgaagatgtatttagtgattcggatattgattgcataaatgaagcaatcgaaaaatatgggaatctctcgtttaaagaaatacgtgatatcagccacgatagtgtttggatgacggctaaccagaatagtgagattccattggaagtgatagctgccagttgtaaggatggtgacaagttagttgcttatctgatttctactgagtag

SEQ ID NO: 8010 - DNA, 501 bp, Photorhabdus luminescens
atgattaatgatccaaccttgttaacagatgatcacaatttaaatagttttacttcaggaattgataccctagacaactggttaacagacagagcattaaaaaatcaaaaagagaatgcttcacgaacctatgttgtaagcgaagacagagatgttattgcttattattcgttagcgaccggctcaattatgtcagaagaggcgataagcaagtttaagcgtaatatgccaaatcctattccgacgattattttgggtcgcttagctgttgataagcgttatcaaggaagagggtttggtcgctatttagttagagatgcttccatacgtgtcgctcaagcggcagatttggtgggtgttagggggttgattgtccatgctatctcggagaatgctaaggcattttataagtctgtgggttttagtgattcgcttttaaatccaatgacgttaatgatcacgctaaaggatttaaaaacggtttttaaaataacagattaa

SEQ ID NO: 8011 - DNA, 279 bp, Photorhabdus luminescens
atgaacgtaataagtgagaatcgtaaaaataagacactcaacttgaggattaggcaagaggatcgggatttaatagatagagcagcaaaagtgaagggaaaaaccgttactgaatatgtccttgatacaatcaaacgtgatgctgaaaacacgttattggaacattcatttatgattgtatctccagaaatttttaatgcttttattgctaaacttgatgctccggctgttccaaatgagcgtcttatcaaaacggcaaatatgaaaaaaccgtggtga

SEQ ID NO: 8012 - DNA, 546 bp, Photorhabdus luminescens
atgagtaaaccaaaacatattgtagaagttatgatctccgaactggaggttaaacagcgtattgctgaactgggaaaacagattactgaacattatcgtgacagtggtagtgatttggtgttggtcgggttgctgagaggttcatttatttttatggctgatttatgccgtgaaattcagatccctcatcaagtcgactttatgacggcttccagttacggtagcggtatgaattccactcgtgatgtgaaaatcctgaaagatctggacgaggatatccgcggtaagcatgtactgattgtggaagatattattgattcaggtaataccctgaataaagtacgtgaaattttggcgctgcgtgagccaaaatcactggcaatttgtaccttgctggataaaccttcccgccgtgaagttggtgttccggtggagtggattggttactcaattgaggataaatttgtggtgggttatggtatcgattatgcgcaactttaccgtcatctgccttatatcggccatgtaattttgctggaagagtag

SEQ ID NO: 8013 - DNA, 264 bp, Photorhabdus luminescens
atgaataatgttagaaatgactggcatcaagccgatattattgctgcgctacgtaagcgtggtccaaccttagctgcggtatcccgtgaagcgggactgaattcttccacattagccaacacgctgtcacgtccttggcctaaaggcgaatggattatcgctaattatctcaacattcatttatctgaaatctggcctagtcgttattttgatatggacagtaatcttattgagagcaaagttcgcgagaaatcagcagaataa

SEQ ID NO: 8014 - DNA, 465 bp, Photorhabdus luminescens
atgaaaataaaaaaccataaaaacaccttattgtacagagccaaagaaatatcaaaattatctaaaaaaacctttaaaaaagaggctttattttttaatttttttatagtttatattgtctcggtatttatacttagattagacacccctattcttgagtatatagattacagtatgtcaataattttattgattatcatgttcagcactgcaaataaaatatccaatgaattttctttattgaaaaaaaggttcaaaaaagaatactcacatgataaaaaaccaaattttttttataagatatttactctatctattataactattttactgatattagtatcgattccttttttgtatatattaaatcatatccattatgatttttcgttaaaattatttttgaatacaatcataagttcttatatatatttgattgttattatttttagtaaacctgaatga

SEQ ID NO: 8015 - DNA, 375 bp, Photorhabdus luminescens
atgcgtgagcttaccattcaagagtttgatttagttgcaggtgcaggagcaggagaaaccgctggtgaaatagcaggagcagccgcagggggagctgctggaagagtagctggtagtgtagctggaggatatgctggagccgcagctggtgcagcaataggctctgtaatagcaccgggcccaggtactgcagctggtgcagtaattggtgttgttgttggtcgatttgcaggtggtggtgctggagctgccggaggagctgcagctggccgctacatcggaggagagataggaggtagaattgattctggagggaatagcaatggtgctgggaccaattattgtaattcaagtggatctaactattgccactaa

SEQ ID NO: 8016 - DNA, 1167 bp, Photorhabdus luminescens
atgaatccaattaattttcccattgataaaaaagacttcctagaaaatttcttcgaaaagaaaccgtgtgtttttaaaaaaatatatgatgatgattttataaaacatagtgaaatagaaaatatatttaatcgttccaacctgccttcatttgaaggtattaaattaatgtacaatggtattattgataaaacagaatatattgaatcctataatgatttaggcactagacggtatagatatatatactctaagttatatgactatctaaactcaggtgcaacactagttgcaaatggtataattaatgaaacaaaaatagatcaactggctaaggcttgctcttcatttacagatagtcatccgttttcaagcctatatttatcatatggagaaaaaagttcttttaaacctcattgggatagcagagatatattcgcaattcagttatcaggaaagaaaagatggataatttacaaaccaagctttcctgaccctgtatatttacatcaatcaaaagatatggaaaatacgtatccatgcccttctgaaccatatgatgattttgtgctggaaactggagatgtcctttatctaccaagaggatggtggcataatccattacctcttggtgaagagactatacatttatctgttggcatttttccaccttatgcccatgagtacataaactggttatcatataaaataaccgatattgacattggaaggaaatcacttccgagatcatggaaacaagctaaagatgaaattgatatcttagcaaaatatgttattgataatattacttcagaagattcatataatgaatttttaaaatctttcagcgatgaaaaaagggttccatcaaaattaaatctgagactattttgtggaaaaaaacatcattccatatccaagacatcacgcttaagaataaattcaaataataatctatccatagatgaaggatatattatttgcaacggagcaaaagtaaatttagatcaattctctatacatcttcttagtaaaattagtgagataccatatatatcattcgagaatctactttctttttttgatcatagtaaacaaaaaaacatagaagatttaatttataaactaggttaccaagatatattagaaattatagatgatttataa

SEQ ID NO: 8017 - DNA, 429 bp, Photorhabdus luminescens
atgatttataaaagtgaattttttcgcaaggaggctttaaagcataaagcaatacctttggctggtcgagtaattttgaccagcccctttatttttaccgttttaacatatatttcatgccttcttgtattgtttataataatatttattatgtttactgattactctaggaaaacaaccataaaaggacaagtttaccctgaagatgggatcacaaaagtctattcaagagagacagggataattaacaaggttatgattaaagatggtcaatttgtaaaaaaaggcgaggttctgggtgttatatacaaagctcaaaacttaaacacaggaatactgcaagataaattaaaagagcaagccatcttaaagaagaaaacgttagatcaagccattgataaaatagataaaataggcggattcgactaa

SEQ ID NO: 8018 - DNA, 969 bp, Photorhabdus luminescens
atggcctatacacaactgaccgaaacagaaagataccagatttccagtttaagagaagcgggtttttcacagctttttattgcgaagtcacttaagcgaagcccatcgaccatcagcagagaattgaagagaaatcaagaagtccagacatactgccctgaacaggctcatttgaaggtattggcgcgtcgtcattttgctaaaaaggccgtgaaaataacgccggaagtaaaaagatggataaaacggttaatttggaaagatttaagccctgaacaggtggctgattatttgaagcaacataaagggatatctttgcatcatgagacgatttatagactgatttatcaagataaaagagaggggggggatttatggcaacatctgcgaatagccagaaaaccctatcgcaaacgctatggtcgctatgaaagaagaggtaaaattaaaaatcgggtcagtattgatgaacgcccggaaattgttgataaaaaagaacgtattggggactgggaaggagatacgataatagggaaagataaaaaaagtgtcttattaacattggttgaccgcaagacgctgtatacaattatcgttaaacttgatagcaagcaggcatcagaagtcgcgaaagcagcagtgaaagtattatacccgttaaaacaaaaggttaagaccatcacgttcgataacggtttggagttcgcagatcatgaaatcatcggtgaagaattagaaacccaaatttactttgctcacccttattcgccttgggaaagagggatcaatgagaatatcaatgggttaatcagacaatactttccaaagggaaccaattttaatgaaatctctgatcaggaaataaattttgtggtaaaccgattaaataatcgtcctcgaaaaacacggggtgggaaaacaccgaatgaattatttaaaggaatacgaacatgtttacttccagattaa

SEQ ID NO: 8019 - DNA, 912 bp, Photorhabdus luminescens
atgtttacttccagattaacgatgttgcacttattatgtgaatccaagatacataaaagtaaactagattcactacatgagcatgttgaaagcttaatgaaacaaaaagaaaatattaaggataaattaacatcacaacagaataaattagatagactaaaaaaaaataccaacagatacaaattattagaaagaaaaggatttatatcaaaagagcacataaccattgcagaaaatagtgaatcagaccaattaataaacttaagtttaacaaaaaaagaattgattgacatagaaagaacaattagtgaaaagaaatttgagttagaagaacttccattaaaacaatttatagaaaaacaagagatagatagaattttagcgtcagttaatcaagaaattataaatattgaaagccaaacggaatctgttatcgtggctagttcatcaggatttataaatattaataattttgatttaggttctcatgtagaacaatctactttattgttgaatatagtccccaataccaaaaaattctctattaatttatatattcctagccaatctatagggtttgttaaaaatggtgatatagttaatataagatattcagcatatccatatcaaaaattcggaatatttaaggctaaagttatttccataagtagaaccgcaataccagctcaagaggttaaaagcataggaaccgtattccatacattagacatagcaaatgaacctatttatttagtaaaggcagaacttgaaaaacaatacattgaaataaataaaataaaaaaggcattagagataggaatgactctagatgctgatattttacacgaaaaaagaaaattatacgagtggatattcgagccacttattactattaataaaaatagcatttga

SEQ ID NO: 8020 - DNA, 2094 bp, Photorhabdus luminescens
atgatgaaattagaaaaaatcatattttggcattctcataatttgccatctattttacaaacagaaatagctgaatgtggcctagcttgtttagcatctatttcttcttatcatggataccaagttgatttatcttcgcttagaaaaaaattccgtattcctcttacaggtacaaatcttaatgatattgcttactacgctaaagagttaaaactatcttatagagctgttaaactagacatcaatgaaataaatcaattaaaactgccatgtattttacattgggagcttaatcattttgtagttttaaaaaaaatatcaaaaaatacaataacaataatggatcccagtattggatttagacgtttgagttataatgaattctctaattgttttactggaattgctgttgaattctggccaaataacgatttcaaaaaaaaaattgataaagaaaaagttgacattttaagtttttttaaaaacatatcaggaataaaaagatcactagtaaaaatattattgctagcttttgtattagagttctttgcactaatcgggccattttacatgcaattaataattgatcatgggatagtttctgaagataaaaatttaatattgttgctatcaataggttttggagtattacttgttttcgagcaagtaataaacattattcaaagcctattgactacatatattagtacaaatttgaatatacaatggaaggcaaatgtatttactcatttaatgaatttgccagtttctttttttgaaaaaagacatttaggtgatataatttcaaaattctcgtctattgatagcatacaaaatacgttaacttcttctttttttatttccatatgtaatagtcttgtttctgcaacaactattattatcatgacaatgtataattttcagttaacattaatatcaattgtcactattttcatatatataataatcaggataatatggtattaccctttaaaagaagctactaaagaaaatatcgtacaatcagctaagctgagctccaattttatggaaacaatgagaggaataagagcaataaagattttctgcaaagagaatcaccgatataattcttggttaactttatctataaatactgtaaactctgcccttaaatctcaaagactatcgctaggattttctttttccaatagaattatatttggaattcaaaacatcctaatagtttatataggtacatcttttatctttgataatacatttacagtaggtatattaatatcatttcttgcttacaaaactcaatttgagtctagaactatatctctcattgatctatttatttcttttaaaatgcttgggatccatattgaaagattatcagatattgtactatctgaaacagaattaaaatccaatatactactaaaaacagaaacaataaaatcaaataaaattgaaattaaaaatctttcctttaaatatgagggaaataataattatttaatagagaatttatattttgacattcagcctggagattcagtggcaataataggtccatcaggttgtgggaaatccacactattaaatttaatgataggaaacattttacctacaggaggagaagttaggattggaggagttatagttaataaaacacatccaaaaatcatcagagataatatcgggtatgtagcgcaagatgattcactattttctggttctattatggaaaatataactttttttgatgaacatccagacacagataaagctattaattgtgcaaaaatagcagctatacaccatgatataaaaaaaatgccaatggaatatgaaacattgattggagatatgggaactatcttatctggtggacaaaaacagaggttatgcttagcaagagcattatacaaagaccctaagatcttatttttagatgaagccacgagtcatctcgatactgaaaacgaaaaaataatttcatctaaccttaaaatgttaagcattacaaaagtaatggttgcccataggaaagaaacaatagaatccgcgaataaactaattgatttaacaaaaaaatgtgcataa

SEQ ID NO: 8021 - DNA, 381 bp, Photorhabdus luminescens
atgcttcatactaacaaccctaccattaaacataaagccagtttgttgaacctggctgaagaacttaacaatgtgtcgaaaacttgcaagatgataggcatatcccgcgatactttttatcgctatcaggaactcgtcgaagaaggaggagtcgaagcgttagttaatcgcagccctaacctcaaaaataggatcgatgcaacaacagaacaagcggttatcgattatgccattgagttccctgctcacaaccagcaccggaccagtaacgaattacgtaagaaaagcatttttatctcgtataggttgcgttttatttatttcgtcaaaacaggctacccagtgacggatttcacaccgtatgagaagataatgacctaa

SEQ ID NO: 8022 - DNA, 234 bp, Photorhabdus luminescens
ttggagcgccccactttaggtcgttaccctgatatgtcactaaaagtggcaagagaaaaacgtggacagtgcagaaggtggctcgctgaaggttttgatccaaggatggagttggaattgagaatagaagaaactttaaaaccggtgactgtcaaagatgctctggaatattggttagtgcactatgcacgcgcaaaaagagcagatgaagaacttgcaagagcgcgcagctag

SEQ ID NO: 8023 - DNA, 195 bp, Photorhabdus luminescens
atgaacggtgtatcactcagacagagacactatgttgaggtaatgaatggcacggacaaacaactcagtgacaaaaaactaaaagcattgctaggtgttaaaagggattctccggctatgattgctgctggtgaagggttgagcattaaggttttcaaaagtggacagttaagttgggtatttatatatcgctga

SEQ ID NO: 8024 - DNA, 486 bp, Photorhabdus luminescens
ttgaatggtggaggcatcatgactgaaaaatgtttgtactgctccttttgtgggaaaaagcaagatgaagtagctaaattaattgctggtccaagcgtttacatctgcaatgaatgtgttgctttgagtcagggaatcattgatgaagaaaaaaagcttaaagttttagcagtaagtcatcctcactcagcctcactgtatacgtttttggcatataattctggctgttttattgaaagttcggttatttgttccgatgaaatccttgcagaaacattggaaataagcattgatgatttacataaggctcttagaactcttaaaaggaaaaaattaatagaaattctaccttgtgctgatgggatgacgttatattttgtgagtgggaaaaatataagtaaaacttatgatgaagaaactaagctttacagagttgccgctaatgttttgttacaacctaatcccaaattaaagatgttgccatag

SEQ ID NO: 8025 - DNA, 774 bp, Photorhabdus luminescens
atgtgggcagctgtggttattgttgttttagtatgtggttatgtttatacaaatagtcatctaccctctagatttaagcaaaataaagccattggttggaacgcttactttgaagtagcacgacaaggtggtttttttcttatcacaggtttttgtctggctttaacactgagttgtttaatctttgctgttatgatgctactgaacattcctgtatattttggtgcaaaatatatcccttttacttttgctcatgatttattcaactctcggttagtggggacgagtattttttcttttctcatcttaagttttaccgtgttgatcagtatcagtgcatcctataacgcagagaaagattttagaaatcctgaaaagcgcaatggtatttttaaagaaattgcatctaatagtgctattgaaagccttcttttggaatcaattgaaagtggtctgttgctgttaattactttaaagtcgagaaaagtttatgttggaatggttgatgaagcgagatttcatcatttggataccgatactatcgttatcattccttttatgagtggttacagagataaagatacgctgacattttgtgccgagcataattatgctgatcattacaggaatgaaggtattacactaacttcaaagcctttgagtgtgtatcagtttcgtcatgttcttccgcttgagcagatagagtctctatcgctttttaatcctgaaacctatgataagttccaggaagttattaaagataaatctaattga

SEQ ID NO: 8026 - DNA, 225 bp, Photorhabdus luminescens
atgtctagttttttcaagaatatgggatatgctcttgtttctccggaaagggtgatggcacgcctcgttggcgcacataaagaaacttgttctgatgctgatcagaaagatgaaaagttcatcattaatcgttctggaacagttactctgaatcgttgtaatcctgatgttcagcgggctttcgctttaaacgttgagtggttgagtactaaaaaagagggataa

SEQ ID NO: 8027 - DNA, 1545 bp, Photorhabdus luminescens
atgcaacgacgtgattttatcagattaagtgccgttatgggcctatccagtatgttgcctgtatggagtcgtttctcctttgctgaattttatccggtattacctattcctccacaactagagccagatgcggcaggtaaaattgctattgaaatcaaagcgggaaaatccagttttaaagcaggagtggtgactaaaacttggggttataacggtgatttactcggtccggcactgaaattgatgtcaggtaaacctgtcactattgatattcgtaatcatctaccggaagagagcacggttcattggcatggtctggagattactggggaagccgatggtggcccgcatgcgatgattgcgcccggcgggagccggacggtcagttttacgcctgaacaaccggaagcgacttgttggttccatccacatacgcatggcaaaacgggttatcaggttgcaatggggcttggtggattagtactgattgaagatgagaacagtattaatacgggtttgccaaatcagtggggcgtggatgatattccggtgatattgcaggataagcgcttgaataacgagggtcagattgattatcaactggatgtgatgagtgccgctgttggttggtttggcgatatgatgctgaccaacggtgttgttttaccccaacatactgcaccacgcggctggttacgtttgcgtttgctaaatggctgtaacgctcgtagcctcaatattgcgaccagtgatggccgtcaattgtatgttgttgccagtgatggtggcttgttagcagaaccggttgcggttaatgagttaccgattctgtcgggagagcgttttgaggtggtgatagacgcttcggatggcaaatctttcgatctggtgacgttacctgtggttcagataggaatgacattaccgccatttgatcaaccgttgccggttttacgtattcaacctcagcttttttctagccgcacaatactgtcggagcagcttgccacgcttcctgcattaccctcttttaccggtttgaatcggcgtcgtttacatctggcgatggacagtcgtctggatatgcaggggatgatgatgttgtctcagcgctatggtgagcaagctatggcggggatgggaatgcatcatgggaatatgagccacggagatatgcatcatggtggtgaattaaatttccatcatgcgaacaccattaatgggcaggctttctccataacagaacccgcttttgatgtgaaacaggggcagtatgagcgttgggtgatttcaggtgttggcgatatgatgctgcatccgttccatatccacggtgcccgttttcgtattttgagtgaaaatggccgcaagcctgcggctcaccgtagcggttggaaagatattgttcatgtggaaggcaaggagagtgaagtgctggttcagttcaagcatactgcgggagtgaagcatccatttatggcgcattgtcatctactagaacatgaagataccggtatgatgctgggttttactgttagtaaataa

SEQ ID NO: 8028 - DNA, 348 bp, Photorhabdus luminescens
atgcgaaaattagctctcttgacttacatactcgttcttttcggtctttcccaccccgcaaaagcgctgacagaaaatgaagctgaagatctagccgatctgacagccgtgtttatctacctgaaatatgactgtggttacagccaaattcctgatcgggaaattaaacgagccattatttattttgctcaacgcaataagtgggatttaactaattacaacagccaattgatggacaagctcaatgaagaaagctaccaagatctcaaaggaatttacctgtccaatgcgataaagtgccatgctctcgccagagattcgctgagtttattcgcctacgttaaatag

SEQ ID NO: 8029 - DNA, 870 bp, Photorhabdus luminescens
atgtcacaaaaagaaatttggtccgaaaccctgcacgccaactttggtcagtatttttctgtcgataaagtgctttatcacgataaaactgagcatcaagatttgattatctttgaaaatgcgacattaggccgcattatggcgctagatggcacagtacaaacgactgaacgtgatgaatttatctaccatgaaatgatggctcatgttcctttgttcgcccacgggaacgccaaacgagtactgattatcggcggtggtgatggcggtatgttacgtgaagtctgtcgtcatcaataccttgaaagcatcactatggttgaaatcgatgccggtgtcgttgaattctgccgtcagtacctgcctaaccataatgccggtgcttatgatgatccacgcttcaatctgatcattgacgatggtgttaatttcgttaataccaccgatcagaaattcgatgtcattatctctgactgcacggacccgatcgggcctggtgaaggattatttacctctgaattctatcaaggttgccaacgttgtctgaatgaaggtggcatctttgttgctcagaatggtgtttgtttcctgcaacaggatgaagcagtcaccagccataaaaaattgagtaactattttgctgacagcggtttctatcaagctgccattccaacctattatggcggaataatgacctttgcctgggcaagccaaaacccggcactacgccatgtggatctggcaacattgcaacagcgctttgacaacgcaagttttacctgccgttactataatccagccgttcatgtaggtagctttgctctaccacaatatttgctggatgcactatttactggatgcactatctga

SEQ ID NO: 8030 - DNA, 795 bp, Photorhabdus luminescens
ttgcacaagctgaaattgcacggttttaataacctgacaaaaagcctgagtttttgtatttacgatatctgttatgccaaaagccaagctgatcgggatagttatatcgcttacattgacgaacaatataacgctaaccgtttaacggaaatcctcagcgaaacgtgttcgatcattggtgcaaatattttgaatatcgcccgtcaggactatgatccacaaggggcaagcgttaccatactagtcagcgaagaaccgatggacccgaaggatgtagacaacactgaaaacccaggtccgttacctgattctgtcgttgcccatttggataagagccatatctgtgttcacacttatccagagagtcatcccggcggcggtatatgcactttcagagctgatattgaagtatcaacctgcggtgttatttcacctctcaaggcgctgaattatctgatccacaaattagaatcagatattgtcacgatggattatcgtgtccgtggtttcaccagagatgtgaatggcatgaaacactatattgatcatgagatcagttctattcagaattatatgactgaagaagtgcaatcacagtattacatgatggatgttaatatttatcaggaaaatctatttcatacaaaaatgatgttgaaaagatttgacctgaatgattacttatttaatgccacaccagagcaactcagtgaagctgaaaagcaggaaattacccatcttttgaaaaaagagatacaagaaatttattacggccgtaatttacccactgtttaa

SEQ ID NO: 8031 - DNA, 540 bp, Photorhabdus luminescens
atgaaagcgttgatcgtgatcgatatgttaaacgattttgtcacaggagcactcgccaatgaggcggatgcgatgaagatcgtaccggtaattaaacggctaattgatcatgcccggcgtcaaccggattggctggtggtttatgctaatgacgctcatcgcgctgatgatcgggaaatgagtatttggggcagacatgcaatggctggaacgctaggtgctaatgtcattgaaacattggcacctattgggacagatcgtgaaattgtttcgcctaagcgattttatggggctttcgatggaaccgatctggaagaggttttgaaagtatatggtgtgacggaagtggtgttaaccggccaacatactcattgttgtgtcagacataccgcctatggcgcgtttatacgcggttatcaaatcaaggttccatcagatgctgtgtgtgttttccccggtgtcgatcagcaagatgctattaattaccttaaaaccatttacggtgctgaaattacaatgagtactgcattagtcatgtaa

SEQ ID NO: 8032 - DNA, 1920 bp, Photorhabdus luminescens
atgaaggaaactgctgtgaaaataagaacgttaaataaaattacgttgagtttattagcgagttccatgttgtataacaccccagtctgggcagatagctggctgttggacggtaacaattaccatgtaactgttagcgacgaacacagtaaagtgacacaattaaaatttgaaaatcccaaaaaccacgatcaaatcattatcgacaatctgtttgaaatcacgttgaaatcaggggaaaagctcacggctaaagattttcagattactgatattagcaaaaagcacaatcgtattgttgtctccctgaaacatggcgacattcaggtaagaaatatcattactgtggaggataaagataagtacggctcgtttgaaatcactattacaccgcaggaaaatgcgttggagctcagctctgtctcgttgatgccatttcgcactaaaaccccttttgttcacggttctatcgtcagttcaccgattgtcagcgatagcttctttattgttcccggtaatccattgattaccactgaggcgtataaagggagcgcttcgcaaaaaattgcgctctctatcccgttagagccggggaagacgttaagttataagacgtatattggtgtttatcaggcagggcaattgcggcgcaacgtcaatgagtttttgaacaatgctcgtccgcgtgaatatagtccttacctacattacaactcttggtacgatattggttacttcacgccttataccgaacaagaggcgttgacccgtatcaatcagtttgggcaggagttggtgactaagcgcggtgtgaagttgagtggttatctgtttgatgatggttgggataatctcaaaggagattggggttttagtcaggcatttccccatgagttcaaaaatcttaaacaggcagcagatcaatatcgtgctcgtttaggtatttggctttctccttggggcggttatggtaaaccgggtgagcaacgtgtttctcatgcggaggagtttggttatgaagtgatagatggcagatttgcgctctctggccctaattactacgccaatttccataagcgggtactcaacttgattcaacaacaaaatgtatccatgtttaagctggatggcaccggcaatgctgatcgtgtgattaaagggagttcattcaccagtgattttgatgccgctatccatctgattgacgatatgcgcagtacggaaagtgatctgtttatcaacttgaccaccggcaccaaagccacgccttcctggctgtttttcgccgattctatttggcgtggtggttatgatgtggagtttcacggcacaggttctaaagtgcagcagtggcttacctatcgtgatgcagaaacttatcgtaatgtcgtaagaaatgggccgctgttccctctgaattcgttgatgctgcatggcattgtttatgccaaacaggccaagcatctggataaacagtcacctaaagattttgccgatcaggtttggagctattttggcagcggcactcagttacaagagatgtatgttacgcctgacctgttgaccacagaggattgggatacactggcaaacgcggcgaaatggtcagagaaaaataaagatgtgctgtttgatacccattggattggtaaagatcctaccgatctagcggtgtatggttggggagcctggagtccgaaaaagtcgattattactttgcgcaatcctgctgatgaagtgaaacaatattatctggatttgcaaagtgatctcgaattgcctgatgatcaaccttcggtatatgacgttaatatcgattatggcgagaacagctcgctgccgaagcttatcaataaaacggtgttgattacccttcaaccgttagagacactgaccttttctttgaccccatcgaaataa

SEQ ID NO: 8033 - DNA, 861 bp, Photorhabdus luminescens
atgtacttgatttccagtcgtcaaatgttgaaaaaggccctgcgtgaaggctatgcggttcctgcttttaacgtccataatctggaaactgtccaggtggtggcggaaaccgctgcacgcttggcatcaccggttattctggcaggtacgccgagtactttcagttatgcggggactgactacctagtatcaatctgtcaggatgctgctcgtcgccacaatctgccgctggcgttgcatctcgatcaccatgaggaattggaagatatcagtcataaagtgaccgcgggtgtgcgctcggtaatgattgatggctcgcatttaccctttgaagagaatattcgtaaggtagctgaggtggtacgattttgccatcgttacgatgttagcgttgaggcggaattggggcggctaggcgggcaggaagatgatttgcaggtttccagtgccgatagtttttttaccgatccgctggcagcaaaagcctttgttgcccgtaccggtattgattctctggcggtagcgattggttctgcgcatggtttgtatcatggtgaaccgcatttggattttgatcgactagcggcaatctgtgaacaggtggatattccgttggtgctacatggtgcatcgggtattcctgaagtgatgatacagcaggcgattggtcttggtgtatgcaaagtcaatgtggcgaccgatctgaaaattgcttttgctgatgcggtaaagcgttatttcattcagcacccagatgcgaatgatccacgtaaatatatcgcgccgggaaaacaggctatgcaggcagtagtagaagaaaagatccggatttgtggcagtgtaggcaagctgtattcgtga

SEQ ID NO: 8034 - DNA, 435 bp, Photorhabdus luminescens
atgttaggtattgtaatcaccggtcatgggcatttcgccagtggattgttacaggcagtggaacaagtcgtcggacgacaaccgcagtgctgtgctgtcgattttcctgaggggatcagtacgcaacaattattggtgtcgttggaggcggcctgcaccgcctgtgatagtggtgagggtatcattattctcagtgatttactgggtggatcaccgtttcggcaggcggcgcaactggcaatcgctaatccatgttatgaagttattgccggtaccaatatgcaattagcggtagagatgatgctggaccgtgaaggtatgacgctggaaacatttcgtgatacggcgctggagtgtgggcggcggggattaaccagcctgtggcacgaacagcagaaacgagggtatgacagcccgaatctggatggcatttga

SEQ ID NO: 8035 - DNA, 894 bp, Photorhabdus luminescens
atggcatttaacgacaccgatgcggctatggcagctaaagctgagaacaggatggcgcaggcgctggcaaccagtcaggttgagcaggatgactatcaggacacgataccgagtgaggatctgaccaaaggcgatttgaatcgtatggcgtggcgctctttgttgctacaggcgtcgtttaactatgagcgtatgcaggcaggaggctggttgtacaccttgatccccggtctgcgtaagatccacaagcatccgcaagatctggcgaattcgatgaagatgcatatggagtttatcaatgtacatccgtttgatgtcaccttcctgtctgggttggtactggcaatggaacggaataaggagaaaatttccactattcgcgccgtaaaagtggcgctgatggggccgttaggggggattggtgatgcattgttctggttgactctgctacccatctgcgcgggtatcggggcttctctggcgctacagggtagcttgtttggtcccatcatattcttgttgttgttcaacattgtgcatttcggcttgcgttttggtttagcgcattatggttatcgtgcaggaaccagtgcgttggcattgttgaaaaagcataccaaaaagatttcccatgctgcttcgatagtaggaatgacggtaatcggggcgttagtggcttcctatgttcatctctcgacgccggtggtgataaacgccggtaaggccagtgtggcgttgcagaaggatgtgctggacaaactgatgcctaatttgttgccgttgtgtttcactttgctggtgttttggttgatgaaaaaaggattttccccggtcaagttaattggtttgacggttgtgatcggtattgtagggaagtttgtgggttttctttaa

SEQ ID NO: 8036 - DNA, 798 bp, Photorhabdus luminescens
atgctgattgatgcgatattgattggattactggccggattggccggggtggatctgttcgatgggttgactcattttcatcgtccagtggtgattgggccgttggttgggctgattttaggggatgtacagacgggtttgctggtcggggggacactggagctggtctggatgggaatggtgccactggcaggggctcagccgccaaatgtggtgattggtggtgtgattggtacggcatttgccattttgactcatgctgatcctaaagtcgcgattggtatcgcggtgccattttccattgcggtgcaaggctgcatcaccctgctgtttaccctgttctcacccatgatgcataaatgcgatcagatggtgaaagcgttgaactggcgtggcgtggagcgtgtgaattatctgggtatcaccattctgttttgcttctactttatcgtggcatttctgccggtctatttcggtgctgacgctgccagtgtcatggtacaaaaggcaccgcaatggttgttggatggtctggcggttgcgggtggcatgatgcctgctatcggtttttccatgctgatgaaaatcatgatgaaaaagagttatatcgcttatttcattctgggtttcatttcagtcacattcctcaatatgccgattattgctgtagcacttggcgcttttgcgattgcactgatcgatttctttaaccgttcccgtatggaagaggccgctgaacgcagcgtatctactactcaatctcacactcaatctcaggagatggaagatggcatttaa

SEQ ID NO: 8037 - DNA, 483 bp, Photorhabdus luminescens
atgtcgataccgaatattttaatgacccgaattgataaccggttggtgcatggtcaagtcggtgtgacttggaccaattcactgggggccaatttggtattggtggctaacgatcacgttgccggtgatttgatgcagcaaaatctgatggatatggtggtttctgatggggttcagacgcgttatttcaccctgcaaaaaaccattgatgtgattcataaagcggctgagcgccagaagatttttatcgtttgtaaaacgccgcaggatgtactgacgttagtaaaaggcggtgtaccgatccgttttgttaatgtgggtaatatgcattttgctgagggaaagcgtcaaatccataagacggtttcggttgatgacagcgacgtggtggtgtttcgtgagctggagcaactgggcgttacttgcgaaattcggcgtgtgccggatgaagcgggagaacctatcgccaaattgctggtttga

SEQ ID NO: 8038 - DNA, 1224 bp, Photorhabdus luminescens
atgaatgaactgttttcctataccgaagcttggttgcgtgagcatcatgctctgcatactgccagagagattcatcaacagcctgagctttggcgtcagttatatcaaaatctgcaacgtgaggaagcgttatggcgaccctttttgcagcctttgttatccgatccagagctacagctacagatagtgctgtgtggtgcaggttcctccgcgtttatcgggcgcacgctggcaccttggttgcgtgagcagtgtggactgaatgtggtcgcgtacagcaccacagacattgtgccttctcctttgcaatatctcgatccaacacgttcaaccttgctgatttcttatgggcgatcgggcaatagcccggagagcgtggcggcggtaaaactggcggatcagctcctgccacgctgttatcacctgatgctgacttgtaatcccggcggtgcgttagcacgttatgccgaagggcgctctcacgtctgttcgttgaatatgccccagggttctcatgaccaaagttttgctatgacgtccagcttcagttgtatgacgttagcaacagtgctgctgctagggccgttgacgttggaacagtgtgatgagccgttgatggcgatgatcgcgttgtgtgagcgggaaagggaacagtggcagacacagattaagcggctggcatgcagcggttttaaccgcatgatgtgtctgggttccagttgctttactggaatagcggaggagggagcgctcaagatgctggagttgactgccgggcatgtcaccacccgttacgattcatcaatgggggtgcgtcatgggccgaagtttatgatcgaacgggatacgctggtggtcatgatgctctccgctgatcagtatcgtcgtcgttatgatctcgatctgtggcatgaactgaatcatgacggattggcgtgtcaaattgttgcactgagtggcactcaggggaaagggttcacggtgattaacagtgaacaagatgatatctggctgttgttcccctatttgatatttttgcagatgttagcgtttgaaacctcgctggcactgggcataacgccagacaatccatgtccgacaggggaagtcaaccgcgtggtgaagggggtggaaatttatccttatcatccaccgtattcaccaagaataaaatgtagcaggagtgattatgtcgataccgaatattttaatgacccgaattga

SEQ ID NO: 8039 - DNA, 1296 bp, Photorhabdus luminescens
atgcagtcgctattacaacttatccgtcgtcataaatcaggtgaagccgtggggatctattcggtctgttccgctcatccttgggtattggaaagtgctttgcgcgtcgctaaagagcgtaagacttcggtactgattgaagcaacctctaatcaggtcaatcagtttggtggttataccgggatgcaaccggctcaattccgggatgcagtttggcaacaggccgatcgcattggtttaccgcgtgatcgtgtctggttagggggcgatcatcttggacccaatgcttggcaggatcttcccgctgaacaggcaatgaaactggctgaaacgttgatacacgattatgtggcggcagggtttcgtaagatacatctcgattgttcaatgtcctgtttggatgatccaacgccgcttggcgacaaggaggttgcggtacgtgcggctcgtttgtgtcaggtagcagaacgttgttggcagcaggtggggggagaaccaccggtttatgtgataggtaccgaagtgccggtaccgggtggagcgaaagaagcattagcaggaatgcaagtcacgacgcctcaggctgcggcgacaacgttgagtgtacatcaacaagcctggcagttggctggattggaaccggtatggccacgggtgattgcgctggtggtgcaacccggggtggagttcgatcaccattgtatcgaacattatcaacctgaacgtgcagcggcactgagtcaatatattgaatctcaaccctatttagtctatgaagcccattccaccgattatcaaacggcgcaagcttaccgtgaattggtacgtgatcactttgccattctgaaagtcggtccggctttgacttttgctttacgtgaggcgctgttcgcactcgataaaatcgatggtgaatggaatggggaacagggcgcggctcatctgcgtgccacgctggaacaggtcatgcttgagcagccggagcactggaatcgctattaccacggtacaccacatcaacagtttattgatcgtcaatacagtttgagtgatcgcattcgttactactggccgcatccgcaggtacaacaggcagtgaataccttgatggataacctgcgtggtcgcccggtttccctttcactgctgagtcagtacctgccggagcaggcgcaggcggttaatgccggaaggttggataatgacccacactcatgggtgttggataagattcgttctgtgctcttgagctatgcgctggcttgtgagcccgaggtacaaggagttttagtatga

SEQ ID NO: 8040 - DNA, 774 bp, Photorhabdus luminescens
atggctgtggataccgtaaaaagacgtgaacagattatcgacttgctgtgccatgagggcagcgtgcgtgttgaacatttgagcacccgttttggggtttccagcgtcactatccgtaatgacctgcgttatctggaacaaaaaggttgtgcattgcgttcctatggcggtgccatgttgaatcagcaattcgcctttgatcgtcccttgcaagataaaggccggatcaatcgtgatgtgaaatcgcgcattgcggctagggcggcacagtttgttcaggatggtgatgctctgatccttgattccggctcgacgactacgcaaatcgcgccatttcttaaagagcggcgtgatctggtcgtcatgactaacgcgttgaatatcgcctatgaactggcggggtttgaccggatggaggtgatggtgcttggcgggagtgtacgccagaactcctactcgctttatggtccggcggcggaacagcaattgcgtcaatatcgctttgacaccctatttcttggcgtcgatggttttgatctggaagcagggataaccacgccacatcccggtgaagcccaccttaatcgcgtaatgtgtgaggtggcgcatgaaattatcgcggtggcggatgccagtaaatttgggcgcagaagcttttgcctgatccgtcaggccggacagattcatcggctgattactgacagtcggatccctgataactacaggcgggcattaattgaactcggcgtggatgtggttattgccgacgaatag

SEQ ID NO: 8041 - DNA, 1158 bp, Photorhabdus luminescens
atgacaaaacgattttcggtgctgactggcggattgctgcttaccgcttctctcggcgctcaagcctcgaataccgccgatcagacccgtctgacaaatactgttgataagaccatacactccctgatgcaggaatatgacattccaggaatggcgattgcagtgactttccacggtcaacattttttctatcaatacggtgacgcatcaaaagagagcaacacgccggtcaccaaagagacaatctttgaattaggctcggtcagcaaaacctttaccggcagcctgatttcttgggcgcaggtgacgggagccatttccttctccgataaggccagtcagcattttcaaccgcttgcaggtagcgcctttgacaacataaacttgctgaatattgccacctataccgcgggtggcctgccattacagttccctgatgagatcgacagcaataacaaaatggtggactggttccagcactggcagccaacgtacacgcccggaacctaccgccagtactctaatcccagtattggccttgcgggttatatcgttgcccaacgccttgaaaaaccttactcaaaactgatggaaaaccagatcctttcaccgcttggtctgcaccatacctggtttaacgtacccgcacaggagatgaaaaattatgcgttgggttattcaaaagagaataaaccgattcgcatcaaccccggtgtgctggatgaggaagcctatggtctgaaaaccagtgcacaggagctaattagcttcgtagatgcaaatatcgatccttcccgcgtaggtgacagcaagctggcacaggccattcgggcaactcataccggttattaccgggtgggggaaatgacgcaagggctgggctgggaactttatcactggcctgttacccttgagcaggtactgagcggcaactcggcgcagatcgcttatcaggccaacaaaaccacggaactagcgctaccagagccgccaacggatgcgctttttatcaataaaaccggttccaccaatggcttcggcacgtatgttgcgtttgtgccgcaagagcaaatgggcattgtgctgctggccaacaaaaattaccccaacgaggcgcgtattaaagcggcctggcaaatcctcaacgcgctgaaataa

SEQ ID NO: 8042 - DNA, 1299 bp, Photorhabdus luminescens
atgtctattcaaagtcttgggcaaactttcaaaacgacggcattgtcgcccctttcgaacggagaggtacagacaccatctcgcaataataatgttcatcatcatcttgcttcccattacaccagtacgggtcttggtactcaggtgtcgccgggcaaggtgctgaccactacactgaaatatctgacattgagtgctccggctcgcaagattggcactgccatacagggaggacatgattcccacgcacagagtgccaaaggtaaggcgcgctactggactggggccattatcaagggattggctaatatcacgggcggcaccagtagtgtaacgagcggtgcaatttcggtcggtgttgtaggcgttaaaaacctggcggaatccacagggcgtttgctggcatcttctgccttggggctggctggagcgggcgcgaagggagtctcgcacttacctcttggcgcgtccgatcgtttgcaggctggaacgcgtgccgagcaattgctgaattctgccaaggtgatcgccaaacccgcgtttgtggctaaagcagaacaagagccgttgaatgctgtgggagctaaagcagtaatggatgcggcccaattggcgagaatcagttgctccagtagctatcgggatatgccagcaggttacagtcatgccactttagctgatatcccgtcctcgatattggctcgccgggaggatggcactggcggaaccggcagtgagttaaccctgcatgttcgccccagcaaaggggagaatgatcctttaatccttgagggagatagctggtctgcgctcaaggttgctgtctataagagtgacgacactatggtgctctcctttgtgggcactcagccgaccaagcgccctggcacggtgaagagtgatgtcggcgctgctttggggatcaaggacagcgcgtttcaggatgctgaccgcttggtcaaagcctttactaaacaatatggcggtaaggttgaggttctgggtcactccttgggcggcgggctagcacaatatgcgggcatcaagcatgggatcaaggtcactgcatttaacagcatgggattgcatgtagggttgcgagatcggttggccgacaagttggatagtgccaatgtcacccacatcaataccagtagcgatccgctgagtcagaaggccgaacatggtatttggggcttggatgcctcttctcaggtaggcaagcgttatgtgattgagcattcaggcggtcaccgtatggagtcagtgaccgcaggtttggaagctttactggcttaa

SEQ ID NO: 8043 - DNA, 411 bp, Photorhabdus luminescens
ttgagcattggcggcgatgatcactgtacagtgcctttcggccaaggtggagagtgcatcgttgaagtaccggataacgacgacgttcaggcattttatctctatattcctttgttgcgattacctgtagatgaaccgggccagttgatgctgactcgggctgcccttgagctgaatatgttcggtctcaccaccggcggcagtcagatcagtctggacagtcgtaccaattatctggtgttgagcttctctgcgttgatcgagatgttcgacgaaactgcatttatgcaaactctgggtgagtttctcgatcttggtgtcagcttgcaggcccagtttcaggcgatcaacacccagcagaacggagcgtctgcgccgcatccattacttggctcagccatcgcatgctga

SEQ ID NO: 8044 - DNA, 141 bp, Photorhabdus luminescens
ttgcatggtgcaacccaactgccgataaggcgctatttcgacgtcgatataaaaaacttcgccctagggataaatcacggcttgccagtgattgttaacatgatcacactttctattgcgtgcgaagcccttggtctgtaa

SEQ ID NO: 8045 - DNA, 246 bp, Photorhabdus luminescens
ttgattaccgcatctcctgaggttcgtgattacattaatggattgactgcctattacagcggtagtttgatttgggtgcgtgataataagcgttattgttccgtcagtggtctttcctgcgacaatctatttgaagggggattgttcaccgatatcctgctgctggaaagttttgagtcgtcacggcttccctcttttgagtggtggtgggaatacgatccagcccgtacaactcatatgaattaa

SEQ ID NO: 8046 - DNA, 2115 bp, Photorhabdus luminescens
atggatggattagttttcacctgccgaattggcgcactgccccaaaccacctttcaggtcgcgcaatttactttacaggaagagctgtcacagctttatcgcctgacgttaaaggtggtgagctcacgtgatgatattcccctgaatgaacaactgggggacagtgcatcattggtcattacccgtaatggcatcaccgaacggaccattaatggcatgataaccggcgctgaacagggtaataccgatggtcgtagcactttttatattttcactgtccgtcccacaatgtggctgatgacgctcaatcaggatagccgtattttccatctgaagtctgtacccgaaatcttaacgatcttgcttaaagagcatcgtattttatttacccgcgatacgctctataaacgccatgccgaacgggaatacaccacgcaaaaacgcgaatccgcttatgatttctggtgccggctggcggcggaagagggcattatcttctggtttgaggaagaacagacgttgttctgtgattgccacctgggcatgcaggcggatatcgctctgacttacaatacgcatcctgaaacggacgagaccgataccacggcgtaccagtggagttatggcgaatacctgtgttcgaatggcacggtccagaaagatcataactttcttaaccccaaatattcgcttgagcatcagaagcaatccgacgatagcgggcaccattcggtgtttgaaagttacgggcgtttccagtgggacgaggaaggaaaaccttttacccaattgcggctggaacagttacgaaactacagtaaagtcggtaccgccaaaaccaactgtatccggctgcggccgggcaaaatttttaccctgcaatcccatcccatagaggccatgaacgaccgctggcaggtgatctctgtcacgcatcatgggtggcaacctgtcgcgtcaaacggcgggggcgaaggcacaacactgaccaacgaggtcgcctttattcccggaaaccaggactggcggcccccttaccgctacaaacccctggcggacggtgatgaagtcgccacggtggtcggggtgggaagcgaagagatttatgtgaacgaacacggcgcgatacggatccatttccactggaaccgttacgataaggcggacgaccacgcgtcttgttgggtgcgggtggcacagggctggaacggtaacggtttcggttttatggcgataccgcgcgtcgggcaggaggtgatcgtcagctatctcaacggcgatatcgaccgtccgattgtaacggggtgtacctataacggcctcaaccgcccgcctcttaatttaccgctggagaaaacccgtaccacctttaaaacccggactctcggagggcagggatttaatgaactgcgctttgaggatgccagaggaagcgaggaagtgtttattcatgctcagcgggatatgaatacccagattctccgggataaaaccacgcagataggccatgaccagcaaacagaagtggcgcataaccgtaccgcgataattaaaaacgatgatgatgaagccgtgcagggcggccagacgcttgaagttggtcagaatcaaacggtgactattaaaggtcagcaagccctttccgtgggtaaaagccatcaattaaacgtcgccgataaccagcaaattactgtgggtaaacatatcacggtgcactctgaaagcgggcaaatcaccattgggaatgcaggcggacagatagttattgacccgatgggcaatatccgcatcgaaggggtcagcatcaccatgaccgaccatatcatcggcaagaaatccgccggtgcgctgtttgactactccgcccgctataccctgctgagtgagcacagcgataagccgctggtgaatgtcccctacaccatcaccaccggcgagggtcaggttatcccgggtaaaactgacgcgctgggcagaacggtgacggtgcagagtgaggcggaagaaaatctgcaactgagttcaccggaagcctcaccgaaacctaagcaaaccttataccgagtcagcggtaacacgcagatagagtatgtgatggaatttacggagaaataa

SEQ ID NO: 8047 - DNA, 1359 bp, Photorhabdus luminescens
atggcaatatctaacagtggtaaaatgtgtccggccgtgacctcaattaactgtacgatggaaataggggtctttcccgccgatgaagatccctgttatctggcggaaaaagccgagtatgccctgcgcctgccggcaatgattatcaccaaactgggggctattcgctttctcaatcaagtcattatgagtgggttgattaaggttgaagagcttaagcatgactttctgtggccctataaagcagaagtagtgtttgctatccgaggagagcaagatgtccccttacccatgctggcaaccagtcaagactctaagcaacgttatggtgataatttaccgcaatccagtaatccgtttgcccggccttctgccgaagacgcggagaaatttggtgttgttagtatccgccggcccgatattattctggttaaagaggaagctctccgctggccgggcagaaatgccacctacttcgatggttctgtgcaccctgataatttgaagatgttgattgaggtgaaatttccgggcgataaacttgctgaagatcaagaaatagattacatacagattgcgaccgaagatcgctttggtgtaatgcgtatcagcgataatcgcacagaagagcaaaaacagtatgacgaagcgtggcgaaaacattatcaacccgactcccaacactataaaaaccccatacctctagccccgctgccacccggttcgccgcctgatgatgaagctttacccgctcctcccgcagagggtgtgccggggactattccgcagccgctgacaaaaaatccaccgcttctcagcacttcccgctggtcgtttttacccagctatgaagactgggttgtcctcgggcaggaggtggctggtctggccgaaaatgggctgaattatgtcctcgacagtacccgagagcttcttgcccagtttggttcatggctcaatcaaaccggcaagtgggtgtgtgaagagattattgacccgataagccatcagatcagctacgctttttcctgggttaatgaacaaacggggaaaatcgtgacctggacggagagtgagataaaagcccggtggcagactgtgcaacagggttcagacatcaccctggaagagcttaaaaacattagctggatgcagatattgaaagaggtgggggaaggcatgctggaaatggtggtgattattgccggtgttgccgttgttatcctggtcactcttgccgtcgctgctgcgctgattgcactggtggaaattttagccgcggctgctgcggtaagcgccgctgcgttagctgccgttctgacaatattggcgagtgtgacattcgccaccgcttcataa

SEQ ID NO: 8048 - DNA, 1158 bp, Photorhabdus luminescens
atggaaaatatgatggaaactgtagattactttgcccagttgagatcacaactggccgcgtttaccttcctcaatggtgatgggctaaccatttctcgtcttgggatttctatcactctgttttttaaacagggctacactcaggagaaaaaacaacgcattctggcctgctaccggcgctttcgggaggagttcggtactcatctgcgttttcacagtcattcattaaagggattaagcaaatattcaccggaaaatattattaagatggaggaaggtattctcgccaggaaaaaaaaccagctctgtggttgggtcgttagtgatgctaaaaatgaagatgaggcacctaagtatctgatgcgttacctagattcccgagaaattgatggtgatgatggtagctcctacctgagtctagtgctgccctgggattatctgaaagaacaagagggcatgacccggtttatggcctggctggactttctgtgtgaacaactcgaaccggacagtggagactgtggctactgtctggtcctgcccaaagattattatgattactttcccttagagtaccagctagcgcagcgttaccccgcattgcaggttaattctgcggttcatacagccaaattacagtatggacattccatccgtggcattaattggatcaccctgctgtccaaacgatttgtaaaccgactgggtggagaattctggatacgtcaggtgctgcgcccctaccgggatgtggtgattacttcttaccgtgatggcctgattatccgggccggtgaatacccggacttaaccccactcccgggcagtgtcccggagagttattttgctattaaccagttgatacgtccgatacgggtgatacctcgtgaaggccattcattgcacttctatggtgaaggtcattttaattcaacttctaccctggcctggtatgcccgttatgaccgaagtccgctgcaagtgacccctttgaaaggtgaccatccggcactggtcagcgggatctggcaaaccgacagcctgcctggcaggcagtacttctttgctcagggtgcgatggcttttgatgttgaaggtgcagagacgggtacaactatctggcatctgatacgggaagcggcaaatatgtgggaataa

SEQ ID NO: 8049 - DNA, 234 bp, Photorhabdus luminescens
atggaaactgtagattactttgcccagttgaaatcacaactggctgcgtttaccttcctcaatggcgatgggctgactgtttcccgtctgggtctttcgattaccctgttttttaaacagggctacacccaggagaaaaagcaacgcattctggcctgctaccgctgttttcgtgaagaatttggtactcatctgcgttttcattgtagtggtctaataaaacctaaaacctaa

SEQ ID NO: 8050 - DNA, 1227 bp, Photorhabdus luminescens
ttggaaaagataatgccaatctcacctattagcggccatatgccgcttagccaaatacaagttccgcaacatgccacaacttctcctctactcgaacagggcaatcgtctgttcgaacagtctgttcggcgtggccctcttcactttcagagttcgtcgctcaaacatttgtgcgccgagctgcgccaattgcagaatgctcccagcagtatgcaagcccggcgggtgcaggatgctattcagcactgggagaaccaccaccccaaagaggtgatggcccgtagtacccgccttgctgaacttaaacaggctctggcagaacaaggcaccgtggggcgcactctacaatcaaaggtgatggcaaccggtccccaagtaatattaaaacagcccatgccggccttaccacaatctatcgccgctcagatcaccaaagcccagactggctgcaccaccaccttggtctcctccgcgacagccgaactgataaagcacaatcaaaacaaccaacagcacatcaaagacagtgatggacgaaagcctgttaataacatgccaccgcccccaccaccgccaatggcagataaaacgcaaaaagtaaagaaatgggtagtcaatacggactctaagcagctccaggcactcaggtattattccgcacagggatataatcttataaatacctacctgcgtggaggagagtacgttaagcatcaagctattgaaacattattgtcgagaaattacttacacagtaatgaaccaacgcctcaagaatttgatgcaggaatgcgtgcatatattcaagacgtcacagagggattaaatgagcttgctatcacggatcataaaaaagtttatcgcgggttaaaattcgataaatcagaacttaagaatttactggatcaatatactacagagggaaacatcattgcggaaaaagggtttcttagtacctcgccagataaagcctgggtcaatgatactattctggtcataaatcttgagtcaggccataaaggtcgtattttaggggacgcagctcattttaaaggagaagcagagatgctattcccccctgagtcaaaaatgttagtggagaaggttttgaatcgcgatgataaagaatttgattcccacttttcaaatctgagactaacagatgatgcgtcagcagataccacaaggattaaaaggattattaatataaaaatgctgaacgaataa

SEQ ID NO: 8051 - DNA, 234 bp, Photorhabdus luminescens
atggatggattagttttcacctgccgaattggcgcactgccccaaaccacctttcaggtagcgcaatttaccttgcaggaagagctgtcacagctttatcgcctgacgttaaaggtggtgagctcacgtgatgacattcccctgaatgaacaactgggcagaagaaaatctgcaactgcgttcaccggaagcaacccccaagccgaagcaaaccttataccgtgccagcagtaa

SEQ ID NO: 8052 - DNA, 1359 bp, Photorhabdus luminescens
atggcaatatccaacaacgacaagatgtgcccggctgtcacatcaatcacctgtacgatggaaatcggcgtctttcccgccgatgaagatccctgttatctggcggaaaaagctgaatatgccctgcgcctgccggcaatgattatgaccaaactgggggctattcgctttcttaatcaaatcattatgagtgggttgattaaggttgaggaactcaaacatgactttttatggtcctataaagcagaagtggtgtttgctatccgggggaagaaggatgttcctttgcccatgctggcgaccagtctggcctctaaacagcgttatggcgataacttaccgcaatccagtaatccgtttgcccggccttctgccgacgacgcggagaaatttggggttgttggtatccgtcggcccgatattattttggttaaagaggaggctctccgctggccgggcagaaatgccacctacttcgatggttctgtgcaccccgataatctgaaaatgttgattgaggtgaaatttccgggggatgtgctctctgacaatcaggaacgagattatatccagattgcaacagaaaaacgctttggggtaatgcgcatcgacgataaccgtacagaagagcaaaaacagtatgatgaagcgtggcgaaaactttatcagcccggctcccaacactataaaaatccgatcccactggccccgctgccgcccggttcgccgcctgatgatgaagctttacccgtaccgcccgcagagggtgtgccggggaccattccgcaacccctgacaaaaaatccaccgcttctcagtacttcccgttggtcgtttttacccagctatgaagactgggttgttcttgggcaggaggtggctggtctgactgaaaatgggttgaattatgtccgcgacagtacccgggagctccttgcccagtttggtacctggttaaatcaagctgggaagtgggtgtgtgaagagattattgatccgataagccatcagatcagttacgcgttttcctgggtcagtgaacaaacgggaaaaatcgtgacctggacggagagtgagataaaagcccggtggcagacggtgcaacagggttcagatatcaccctggaagagttaaaaaacattagctggatgcagatattaaaagaggtgggggaaggcatgctggaaatggtggtgattattgccggtgttgccgttgttatcctggtcacccttgccgttgctgctgcgctgattgcactggtggaaattttagccgcggctgctgcggtaagcgccgctgcgttggctaccgttctggcaatattggcgagtgtgacattcgccaccgcttcataa

SEQ ID NO: 8053 - DNA, 1146 bp, Photorhabdus luminescens
atggaaactgtagattactttgcccagttgaaatcacaactaaccgcgtttaccttcctcaatggcgatggactgactgtttctcgtctgggtctctctattactctgttttttaaacagggttacaccctagagaaaaagcaacgcattctggcctgctaccagcgttttcgggaggagtttggtactcacctgcgttttcaccgtcatgagctggaagggctcaaaaaatattcaccggaaaatattgccaaagtggaagaaggtattcttaatcagaaaaaaaaccagctttctagttgggtcgtcagtgacgccaaaaatctctatgaagcgcctcgttatctgatgcgttatctggattcccgagaaattgatggtgacgatgatagctcttacctaagcctgacactgccttgggattacctaaaaggacaagagggcatggctcgttttatggcctggctggagtttctgtgtgaacaactcgaaccggacagtggggactgtggctacagcctggtcatccccagagactaccatgactactttcccttagagtaccagctagcgcaacgttacccctccctgcaagtcaattctgcggttcatactgcggtattacagtatgaacactccattcgtggcattaattggatcaccctgctgtccaaacgatttgtaaaccgattgggtggagaatattggatacgccgcacgctgcgcccctaccgggatgtggagattaccccttattccaatggtctgatgatccgggccggtcaatacccggacttaacaccactgccgggcagtgtcccggagagttattttgctattaaccaactgatacgcccaatacgagtcattccccgtgaaggccattccctgcacttttatggtgaaggtcattttgatgatatttccacactggcctggtatgcccgttatgaccgtggaccgctacaagtgacccctttgaaaggtgaccatccggcactggtcagcgggatctggcgaaccgacagcctgcctggccagcagtacttctttgctcagggtgcgatgtcttttgatgttgaaggtgcagagacgggtacaactatctggcatctgattcgggaagcggcaagtatgtgggaataa

SEQ ID NO: 8054 - DNA, 1146 bp, Photorhabdus luminescens
atggaaactgtagattactttgcccagttgagatcacaactgaccgcgtttaccttcctcaatggcgatggactgactgtttctcgtctgggtctctctattactctgttttttaaacagggttacactcaggagaaaaaacaacgcattctggcctgctaccagcgttttcgggaggagtttggtactcacctgcgttttcaccgtcatgagctggaagggctcaaaaaatattcaccggaaaatattgccaaagtggaagagggcatcctaaatcagagaaaaaatcagccttctacttgggatattagtgatgctaaaaatatctatgaagcgcctcactatctgatgcattacctagattccgatgaagatgatggtgacgacagtagctcttacctcagtctggtattgccctgggattatctaaaggaacaagagggcatgacccgattcatggcatggctggactttctgtgtgaacagctcgaacctgattggggagactgtggttactgtctggtcttgcccagagattatcatgattattttcccctagagtaccaactggccctgcgctacccttccctgcaagtcaattccactgttcacaccacactggatgattatgcccactccatacgaagcattaactggatcaccctgctgtccaaacgatttgtaaaccgactgggtggagaatattggatacgccgcacgctggcaagctacccagatgtggtaatcagcccttactccaatggtctgatgatccgggctggtcaataccctgacttaacgccgctaccgggtagtgtcccggagagttattttgccattaaccagttgatacgcccgatacgttttgttccgagagaaggtgattccctgcatttttacggtgctggtcattttaattcaacttccaccctggcctggtatgcccgttatgaccggggaccgctacaagtgacccctttgagaggtgaccatccggcactggtcagcgggatctggcaaaccgacagcctgcctgacaaacagtacttctttgctcagggtgcgatggcttttgatgctgaaggtgcagaaccggggacaaccgtctggcatttaatacgagaaacggaaaatacaacggagtaa

SEQ ID NO: 8055 - DNA, 273 bp, Photorhabdus luminescens
atgcgcagtgtagtggaaggaaaaaaaattatccttaaaggtgataccacaacaaccggaggtgaggttttaaagggttccgatttggtaaaccaacaactatcggttgcctgtaaaggtgacccggtgttttgtcccgcctgtaaacaaaccggcgcgattgtggaaggttctaacttgttcaatatacaaggaacacctgtcgcgctggagggacattttgttaattgtggttgcccgactggcgtttgtcgattaaaggtacggtcataa

SEQ ID NO: 8056 - DNA, 294 bp, Photorhabdus luminescens
ttgcctgactgcaacaagtttacgaaaaatcagagacaaaaccgagcggcctttagattaaccccagaaaagcaagaatgtttagtaatattaaaaatgattaaagaaatttgtgttaatcttaatttcgttagcagttctgccaccctcactggttttaaacctaaaaaatcaaatacagaaaaagagaaacgagaaacgagaaaacctaaatatcagtttaatgaaaacaaggaggttaaatacgattcagaaaatgtaaaagctattaaacttaccacaattaagcaataa

SEQ ID NO: 8057 - DNA, 633 bp, Photorhabdus luminescens
atgattaaagttgcacttattgacgaccacgtagtcgtccgttccggttttgcccaattactcacgcttgagaatgatcttgaaatcgtcgggcaatacgccaatgccaaagaagcctggtcgggtttactcagaaacccgattgatgttgccgtgatggatatcgctatgccggatgaaagtggtttgcacctgctcacccggttacggcaaaaacggcctgatttccgcactattattctcagcatttatgacaccacagcatttgttcaaagtgcgctggatgccggtgcctgcggctacctcaccaaacgatgtggcccagaagaattagtacaggcagtacgttccgtacatcaaggcgggtgctatttgtgtgccgatgcactaaaagcactgcgtcaaacatcacagaaggttacagcactgcaagtcctaacccccagagaacgggaaatatttgatctgctgatcaatggcattaatgttaaaactatcgcagaacaactctatctcagtcataaaacggttcatgtgcatcgtgccaatattctcagcaaactccagtgcgatagcaccattgatctggtccattacgctctgcaacaccagattctcatggggaatccatga

SEQ ID NO: 8058 - DNA, 1545 bp, Photorhabdus luminescens
atgaacagaggatcacgatttggcctgttatcactctttctgctgattttttattcgctgagctggcttgctctgtggaccatcagcttctacctgaatgacaatgggcaacaagctgcactacttctgccacaagggttgcggctagcgctgtttatcctactggggcgtcgttacttacccaccttgttagccactgagattaccattttgctatggcttagcagcgaacaacttattactcacaatatcattctgttatccccctttctcagcctaatacccacctttatcgtgcaacaattttggtggcgctatcccctatattggcaacgactctcaattctgctggctggcgtcgccgccaatagcgtattgcaggctatttgtctaggatttacgctgactgccggtgccagccacctgtttctcacctcgttaaccggtggcgttttattgtcaccttttgtttatctgatctatgaatatctacgtcagcaacatctaaaaaatatgttgcaaccgagtgaccctgatccgcagttacgcccttcgttgttgatgtggtgttgcctattctgcttgctaggattgagcgcccagatctttatgtcaccagaaattgaaagccttttggtgattctcatatttatccctaatgtctttatggcctaccgctacggctggcaaggcggcgtactggcggctttactcgggagcctaatgatcacatcagctcgacaattcagtggcgcttttaacgatttaggtgagctggaaatgttcctgactattcaggctttattaggcataggtctggggatagccatcagccgtcaacaacagctcgctgaaaatttacaacgttaccgtgaactcttagagcaggagttaactgcccgccataatctgatgaagaaactggttcacacagaagaagacgtttgtaaaagtattgcccgtgagttacatgatgaaattggtcagaatattactgccattcaaattcaggcaacgctgataaaacgtaccgccaccaccccggcaacagaaatgatcgcagaacagatcaataacctggcccaacaaattcatcaatccacccgtcaattattacgccaattgcgcccgccggttctggaagagatgtccttagaaaaagcacttcaccatctgatccatgaattggcatttaaagaacgagatattgattgccagttgaattaccagcttccgcaaaatccaaccaatgaaacggtggtttttaccctttaccgtctggttcaggagttactgaacaatatcagcaaacatgccaaagcgactcgaatcgctatcatcctgcgacagcaccgggatgtgattgaactcagaatcagtgataacggcatcggcattacagaagataaaagaaaaggtggatttggcctccaaggtattgaagaacgtatccgtgcgttaggtggcgattggcagttaagcaatgataacggcacgcgtataattgttaagctgcccacaaattctgatgaaaatcaggcataa

SEQ ID NO: 8059 - DNA, 1326 bp, Photorhabdus luminescens
atgcaagccaccagtcaggaacagatttcacaacactatcgccgctggcgcagccgtttgctgatttccatgatcattggctatgccgcattttatctgacgcgaaaaagcttcaactttgtcatgccggttatgcagttggaactgggactggataaaggacacattggctggataaccactctgttctatctggcttacggcagctcaaaatttatttccggtgtatttcatgatcgcaccggctatcgctggtttatgggtgccggattagtgatgacaggtgtgttaaacattatcttcgctttctgttcatcattttctgccctgctgatcatttggacactgaacggcttctttcagggctggggatggcccccctgcgccagattgctgacacactggtactcccgcaatgagcgcggcttctggtggggatactggaatatctccatcaatattgttggcattactgtcccaatgctgtccgcttttctggcgacaacttatagctggcaaacagcgctgatgatgccgggaattatcggcattttattaggcatctggctttgctatcagttatgtggcaccccacaacagcacggtttgcccagtgtaggacagtggcgacaggattcactggagcttcgacatgaacagctatcgcaccccatgccgatgatgcagatactgcgggataccatcttaactaacagaactatctggttgctaggatgctcctacattctggtttatctcatcagaatggcgattaacgattggggaaacctgtggttgtcagaaacacatggtgccaatctgctcagcgctaatgcgacgctctcactgtttgaactcggtggtttaaccggtgcgctattttccggttggggatctgatttactgttccgcggccaacgcgccccaatgattctgctgtttgctcttgggctatttatggctgtcaccgcattgtggctcactcccattcatcactacacgctgttggcagtctgttttttcagtatcggtttttttgtatttggcccgcaaatgctgattgggctggctgcaacagaatattgccataaacaagccgccggcaccgtcacgggttatctaggattgtacgcctatttgggcgcagcaatcgcaggctggccgctaagtcaggtggttgcccactacggctggtccgggatgtttgccctactcaccgccgcagccgccatgatgggtttgctgttgatgccaatgttaatggcagacgtgagtaaaagggaacatggagtagcatcgcgactttccaataataagcagttttga

SEQ ID NO: 8060 - DNA, 1035 bp, Photorhabdus luminescens
atgatgaaactgaaacctctctctacacttatcgcagccggtctggtcgttgctgcatttaccaatagcgctcaagccgccggacgtttgatcgtttattgcagcgccactaacgccttgtgtgaaactgaaaccagagcattcggtgaaaaatataatgtaaaaaccacttttgtccgtaatggttcaggcagtactctggcaaaaattgaagccgaaaaacgcaatccacaagcagatgtctggtacggcgggactctggacccacaatctcaagcgggagagatggatctgctagaaccttataaatcccctaatctgacacaaatcatgccgcagttccgcgacccggctaaacgcaaaggcaactacagctccgccgtttacgtcggtattcttggttatggcgtcaacactgaacgtctaaaagagaaaaatctgccgattccaacctgctggaaagatctcaccaaaccgatatataaaggcgaaattcagattgccgatcctcaaagttcaggcaccgcttacaccgcgttggcaacctttgttcaattatggggcaaagatcaggcatttgattatctgaaaaaactcaataccaatatttctcagtacaccaaatccggtattgccccagcccgaaatgccgcccgtggcgaatctgcgattggtatcggtttcctgcatgattactcattagaagtagaaaatggcgcaccactgaaacttatcgcgccatgtgaaagcaccggttatgaaatcggcggcgtaagtatcatcaaaaatgcccgcaacatggacaacgccaaacggtttgttgactgggtgttatccaaagaagcacaagaattgagttggaagaaagggaaagcttatcagatcctgaccaataccacggcaaaagcttctcctttggcgcttaaattatccgatctaaaactgatcaattacgacatggataaatatggtgccaatgatgtacgcaaagagttaattaccaaatgggtgacagaagtgaaaatggcgaaataa

SEQ ID NO: 8061 - DNA, 2067 bp, Photorhabdus luminescens
atgtctcacgcattcagacaaaagcaggatgccgtgttctggtggattgccctaatgtggttggccttcgcgcttctgccatcatggagcctggactacggcctttttgaatctactcaagatgaactgctcgccgcctacggctggaacggattaaacatcagcttactgtggttcctgctgccttcagcgctgctattacgtccactcacaccagcaaaccgcaatcaaccttaccgccactattttgacgcgggttatgccttactatgcgcgctatttgtggttattagcgcggccattatcggtcgtgggctgggctacgctacgattttcctgtttatctcactgggcgcgatgattactctagccctgtctcgccttgaatggctaggtggtgatagttttgttatcggttcattagtcgcagttattgccctcatcggcctatttatcctttatccgagtattgccatctttattccgatgtttacggatgatgccggtcagtttgccccatttgcttttatatcgatcctagggcaagcacatattattcaggttatcatcaactctgttctactttcgctggcggttggcgcaggttgcaccttcttcgggttggtactggcaatttataccgccagaatcgcccgccgctccgccattattggccgagtattctccatcttacccatcgtcacgccgccgtttgtggtcggtttaggcgtcaccctgatgatgggccgttccggttatatcactgaatttatggcaacctggtttggcctaaccaacaccaactggctgtatggctttaccggcatctggctggcgcaagtgctagcctttacgccaatggcatttatgatccttgatggcgcaatcaaaaccatccatccctcattggaagaagcggcttatactctgcgtgccaatcgctatcagacgttcttcaatgtttttattccgctgttgaaaccggcactggcgaacgctttcctgattgtcattgtccagtcgctggctgatttcagtaacccattggtactgggcggtagctttgacgtactggcgacccagatctatttctatatcaccggttctcaactcgactatcaagccgccagtactctcggcgcttcgctgctggttttctcgctgctggtcttctgcgtgcaatatctgtggattggtaaacgttcctacgtcacggtttccggcaaatcctaccgtggtgatgtacaaccgttgccaacgtcactggtttggggagtctgtgccatcctatttatctgggttgtgttcaacattttgttatacggcagcatcttctacggcagtttcaccgtcaactggggagtggattacaccctgaccttagataacttcatcaaactatttggtcaaggtatgcacgatggcgcatggccatcattactggataccctactctacgccggtatcgctgcccccattactgcgatcctcggtctgttgattgcttacattgttgtacgccaggaatttcgcggtaaaaaaaccatcgaattcaccactatgctgtgctttgccgtaccgggtaccgtcgctggggtttcctacattctagccttcaacgattcacctttttatctcaccggaacggcggcaatcgtcattatctccatgaccatgcgcaatgtgccggtaggtatcagggcagggattgccggtcttggacaaattgataaatcactggatgaagcttcactcagcctgcgcgccggatcgatgaaaaccatccttcatgttctgttacccttactgcgcccggcgattttatctgcactgatctacagctttgttcgtgcgattaccaccgtcagcgcgattgtcttcctggtcacacccgacacccgcgtagcaaccgcttatattttgaatcgagtggaagatggagaatacggagtagctatcgcttatggctcgatcctgattgtggttatgctggccattattttcttatttgactacctgattggcgaagcgcggatctctcgttccaaagccaaaaatacacagtaa

SEQ ID NO: 8062 - DNA, 1056 bp, Photorhabdus luminescens
atgacacaacaaaattttgtcgaactgaaaaatgtaaccaaacggttcggtaacaacaccgtgatcgataatctggaactctctattccgcagggacatatggtcacgctgttaggaccatccggctgcggtaaaaccaccgtattacgtctggttgccgggctggagaaacctagcgcaggtaaaattttcattgacggtgaagacgtcacagatcgctctattcagcaacgagatatctgcatggtatttcagtcctatgctctattcccgcatatgtcactgggggaaaatattggctacgggctgaaaatgctagggcagcctaaagcagaaatacgcgaacgggttaaagaggcgctggagctggtggatttaggcggctttgaagatcgttacgtagaccaaatctccggtggtcaacaacagcgtgttgccctcgctcgcgcactgatcctcaaacctaaagtgttacttttcgatgaaccgctgagtaaccttgatgccaatctgcgccgcagtatgcgcgagaaaatccgcgaattacagcagcaatttaatatcacctcgctatacgttactcatgatcaaagtgaggcatttgcagtttccgatgcggtactggtgatgaataaaggtaaaatcatgcaaatcggcacgccacaaacactctatcgccaaccggcgtctgaatttatggcaagttttatgggagatgccaatatcttcccggcgactttggctactgattatgttgagattttccaatatcgcctgccacgaccagccaacttcaccaccaaccggcaatcggtaacggtaggcgtcagaccggaagctatcaccctgagccgtaatggaaatattagccaacgctgtaccatcagccatgtggcttacatggggccacaatatgaagtcacagtcgattggcaaggacaaactctgttgttacagattaacgccacccaattgcaacccgatgttggcgataattactatctggaaattcatccgtttggaatgtttattttgaccgagaaaaatagcggttaa

SEQ ID NO: 8063 - DNA, 201 bp, Photorhabdus luminescens
ttgaacgaaatgcttggctttgccaaagaattggaagaggtaggtatttctaacggtgatttaaccaaaaaacttgaagctagaattcaggttagcaatttaagtactgcactgcttccaaaaaaacagtcaaccagtaagcaagatgtagaacttgccaaaaaatgctttaacgcactgatacaggagcggaaatcatga

SEQ ID NO: 8064 - DNA, 312 bp, Photorhabdus luminescens
atgaaaatgcagacttttgaaagcgtatgggacgcgatcagtgatacaccagagcaggccgaaaacatgaagatccgtgctcaactaataaatattctcaatgcatggatagcaaaacgggaatttacccaagctgaagccgccaaagtactggggattacccaaccccatgtttcagagcttgctagggggaaaatacaactttttagtgtggataaactgattgcgatgatggctcatgcaggtgtgtatatccggcatatcgagataagcgagccggaagtcactttaaccacgttacccatcgtttaa

SEQ ID NO: 8065 - DNA, 237 bp, Photorhabdus luminescens
atgaacaatacgttaaaaattgacggccatgtggctgttatcacttttgatccagaaatcgagatgtttcgtggtgaatttgtcgggttaaatggtggtgctgacttttacgcttataacattggtgagttgaaggaagagggcgctaaatctctggctctcttttttgatgagtgtaaaaaagagggtataaaaccttacaaattgtatagcggtaatgaaatcaggggcttttaa

SEQ ID NO: 8066 - DNA, 4416 bp, Photorhabdus luminescens
atgaaaaatattgttgctaaaaaattagctgagagtgttcgtgatggattggttggttattacttggggcatatttcaaaaacagataatgtacctgatttaaaaacgccggatgatttgtatcaatatttacttattgataatcaggtatctagtcaggttaataccagtgtcgttgcacaagcgatttccagtgttcagcaatatattaatggcattatgcttaacatggaaccagggtatgattatcaatatgaagataaagtaaaaacatggaataatgttttaagccaatataatatttgggctggttttcaacagttatctaattatccagagaattatattagccctatattacgccatggtaaaacaagtgattttaaagagttggaggataatttaaataaaggtaaattgagtgatgaggttgttcaggaagtcatattgaattatttgaataaatttgaagaaataagtaatttagagctgatgagtggctatattaatgcgactaaagaattagctcccgctcaggctgaatattattttattggtaagatgaatattacgccaggtcaatattattggcgatcgctgaatatggctaatcgaaatgtgcaagatgtcattaatcctacggcttggaaagagtgggaaaaaattggtattcctgctactggggaagtgattaagatccgcccagtcgttattaatggtcgtcttcatatcgtttggttggcacatgaagcagataatagtaaagaagaaaattattatagtattaatttgatatatcgaaaatttaatggtgaatggagtcttccaaataaattacggacttttacgggtgataagagtaaaattaatgatagttttgaactcattgcattaatggatttgcgagctgagcctgtattagttatttctgctatttgtaagccagtaaaaacagaaaataatacatcgggagaaaagaattatccgtactcctgtaatttactatttaacgaagttcctgtgcctctggtgggtgaaaagtcattagatctctatatctatcaacagattaaatctaatcctacgcaagatctgacacaatcaaatatgttgtcagcctattttggcgatgcatataaattagttgataagcctgtttatctggagtcaggaagttaccctgggcttgcgacaaagaaaatgacactatttgctgaaatgggtagtggaaaactgcgtctcagtggtaataatagtttgtcgattgggaaagagattattagatctgtagcatgtgatattaatcttaaaagtaaatcgagtgaagcaggaaaggttaatatttcactcgcggatggtgctaaagaaaacaatggaaaaataacagtttctgtcgcggtgactatcaatgataatagttatgcatcaggtgactatttttatattatgtttaattctagtcagagtggttatcctgagttgaatgttaatttttctgaatggggacaaaaacaaggtaatgtttatcattttactaaagaaatggaagtgcctctgtctggattacaagaagctaaagtatttagttccgaacttaataaatcgggtggtaagcttgttgcttctggagagggaacgccaaaaatagatattgatcattcaggttctagggaggccgatttctgtttatggcatactaacggggggagcgatagcctgttatattcagaacgccaattactcaatggaaagagtattatttctactgtagaacttgatctcgataaaataaatggtaaggattcgagtgtatttttaaaattaggttataagaaagagggcgaagatgcggacttaggttataaccattatgaagttaaactaagtaaaacttcctatcctaacctgctgttgacctataataaaaaaacgcaagcacagtatctggatattactgaattacaatttaaatatcgatctatcagattaaataccctatttggcaaggagcttatttcacgggctaacaattctattgctgatgtattgagttgggaggcgcaaaatattaaggagccgcttattccggggggtggtgaaaataatgattctgcgcttaacggggcaaatagtatttatttctgggagcttttcttccatgttccttatttagttgcgtatcaactcaatgcttcacaacaatatcaggatgcccaaaactggttgcactatattttcaacccaggagtaaaaaataaggctaatggtagcccaagctattggaattgcagcctgttagaggtttctcaagataactcagtacaattaaaaagattacaagatccagatgcgatagcttatgccgatccggtacattataagaaagccatatttcaaatgtatgtacagaacttaattgattttggtgatagtttttatcgctttctgaccaatgacggacttaataatgctaaattacgctaccttcaagcacagcaattacttggccaaagacccgattttgatttagttagtcattggctaccgcttgagttggcagatgtcacctcttcaaagaataataaattacgcgaatttgagagtaatattgatcttgatatattaattgatcttccagccactaaagtcagtgcttatacggtggttgataatgcaatattcagagtccctttgaacaatgatttactgtggtattgggatattttatctagcagattttataatttgcgccataatttaactttagatggtaaacctttgtcgctaccattatatgcaacaccggtcgatccaaaaaatttgcttgctttactggcaaacggtggatcgttattggcagcaggcagtaccggtattttgaatataccgccttatcgtttccgggcattattacccagtgtttatcatgcggtagatacattaagtcattttggtgatttacttttaagtacgcaagaacgtaaagattgtgcggaacaggaagagttgaatcaattacatttgaaagagttagctattttcgccatttcattgcagaaagatgctgtcgtaattgctgaaaaaggaaaagaggcattattaaaaagtcagcagacattacaacaacggattgatcattataaggcgctttatgatgaaaatatttctacagatgaaacctatgctctgaatttacaaggtacggcaaaaattatttcttctgttgaggaaggaatgttaaccgccgccggtgccgcttcgctgattcctagcatagcgggaacatcatttggtggacaacaatggcatatgccgcttgtttgtactgcgggtattacacgtactgcatcattaatcatgcaaatggcgagtgatacgttgagtgttaaagcgggttataaccggcgacgtgaagagtgggaaattcaatataaacaggcggaaagtgagctggaaatgttgaaaaaacagattgaacagcaagaggcacaaatctccgccgcgaatacaacattacaacaatctcaggctcaactgcaaaaagagcaggatatgtatcagttttttactgtgaccagggtaacgaaatcttcgctttatcaatggctgaatgatcagatgatgtcattatatcgtcaggcttacgatgcagtgctttcgctatgtttaaatgcacaagcatgctggcaatatgaaatgggggattttgccacacaatttattgtgcaaaatagttgggacgataaccataatggtttattggtaggagaaaagattaaactgaatctactgaaaatggaatcggcttatttgaatcgtaatgaacgtcgtttagagttaactaaaacgatctcgttaaaaaatctattatctggtacgaaaaaatgggacgatattcaatctgagcttaaaaccggtgagggagttacatttatactgaacgagaaattatttgatcaagattatgccgggcattatttacgccagatcacgtctgtatcggtcacgctgccgacattaatgggtccttatcaggatattaaagcgactttaactcaaacgaaatgttatacattgaaaacgccggatattaatggtgtgaaatatttactttcaaataaagagggcgataataaacaaattgtcacgaatttgagagcgagccaacaaatcgcactttcatcagggattaatgatagcggtacatttaatcttaattttggtgatgatcgctatttaccttttgaaggaacgggggcggtttctgactggaaactcactttcccatcagcggcaacagacaatatacagcgagatattctggataatttgtcagatattattttgcatgtacgttataccgcgaaggatggcggtgaggcatttgctggtcaggtaagagaactacttaaataa

SEQ ID NO: 8067 - DNA, 2946 bp, Photorhabdus luminescens
atgactaatgatatcagcccgttgttaaagagattaggtgataaatataacttcaccgataagataattgaatcaggttataaatctatttttgatattataagaacaccccgtcatctatttttagagaagtataattcaaatcatcaggtagcagatatttatgatacagcaaacagctatgctatacaaatatcccataaatttcgccagcagcattatattcataatacatataccagtcgtcaagtggaccgtaaatttctccgccagcgttacgttcataatacatatgccagaagttattcttctctttcattaaaagaagttcctcaatatcaatctttatttcaggataactggcagcaatattgtccaaatggcgcaccggaagcgaataattcaccggttgcttatttagcagagatttataaattagcgatggatattgaatccaatgcggatgctgaggccattaaaatagatgagcgccgcgctgatttagcgcatttaatgctggatgaagtgagtattaaccaggagatttcagcactgtccttggttaatactatgctaagtcaacgtttggaagctatgttaaaacaacaaggaaagacaaatttatccagttatgatcttttggctaatgtacgttatccatttcaacttccttatgattatgcacaaaaccaaattaatctaacatttgataatagaaaacttttttgtttgaaaatgatgcaacagacagataagagttatccttattttcttaaatccaatctgaatactgctaatggagaatttgtcacacctttagcaaatcagctaggtatttcccaacaaaaaataatcaatgagccgttaaaaccatctaataaacaattctatcgggataattacggtgttaatagtgcaggcttacttgaattgttatcgatttttactgcacaaacggctctttctgtcgcagaggttgagcaattattatgtgtgaaagggatatctaccaataaaggggggacattagagcaaaataatgtgagattatctcaaaatgtgcttaatttaggtctacctgcggctccttatcattatggtgccgtttttattaatgggccgaaggcaaaagagagtgatttcctacatttgtatcgtgagtttgtctcaaatgataatttaccacaagcggtaaataaattatcaggtgtgaatcatgaacgctttgataggctaaatcgcatgatacggttgtggaaatggattaaattgccggtagataaaattgatttattggtgacggcaacgatgcgggcagaaggggatgcaaataagcaattacagatgaatgagaataccttacgtatgctaggtattttccatcattggagcaaaaaatatcatatttcacctgatgattttgccgcgttgatatatcaaattactcctttttcgatgggtaaagatattcctttctttgatcagatattcaatttatcttcgctatttgatgcaccattggtgattgatgatcgtgagttttattcagagaaaaaacaggatgataatatcattaataagttatgtgctggattgaaaattaaagaaaaagatttttctttattagcaccattagttgctgaatcgatgggtaaaaagagtttaacatgttcactttctgttgtttctgcgttttatcgtattgtgcaattgtcgagaattttagggttaacaccacaggaaggtgtggttattttaacattaatcggtggaaataaagtattaaagcaggtcacgggtatgccttatttatcgcaatcaggaaataataggcaaacagatattttggatattatgattgcaatggagcaaaccatagaatggttgagaataaataaattatctgttggtactctgcaattattcttattaccggctaatgaagttattatgacaggaaatgcggcgcaggtggcctttattaatcaagtgggattgcatcgtaattcggaaattttaactctggaaagtttatcgtcaaatatcttaccagcattagacgataatgataatttgattgattggttaactccacgtcaaactgttttaaatgcagtatctcatcaaaaatatggtttagttaagcataatgttaatattattgatgaaattaataaaacgataaaaagtatattacttgatgataaaatcaaagtatctattactgagcaatgggctgcaattattaatcaagctcaatctgcacaaaatgcaatatcggccagtatgttggcaaatgcatttcagctatcacaaccgtttcctttatttattctaaactggatcggctcaagtagttatgattttttattgaagtcatttgaactgtttgataagaaaaatttacagccagagatgatcagtcaggattatttgatactgatgtatgatttatcgcgatatatttcagtgattaagactttccgactgagtactgtgatgttgcatcatttttctgaacatcctgaatggtttggctgccagaacacgcaactttctttgtcggttatttattatttcagtcgctaccgagattggataaaattagttgcttctttagataacgcggaagataaaatattgcgttatttggagttagttaatacgaataatcaaagtaacgataaaactaatatggtgaaaatattaactgaactattgtcatggcagcgtgatgaagtgctatcagctaattcacatattattggcaaggaagataatacagcaaaaacattggctgaaatagatatcatgatgagacttaaattttggtctgaggaaatggcactttccatgcattcattattagcaacgataaatatcaatgctcattcctcttatcaggattataagcaggtcggtatagcgatggtagcaactctgtaa

SEQ ID NO: 8068 - DNA, 2310 bp, Photorhabdus luminescens
atggccacggaagatagcattattgatgattttaacggtaaaacaaagactcttggatgggatattattgctgcctatgatagaactaaaataaatatgctgtttgaacagcaatatgtaagaaaagtaagtgaaggtgcacatttttcacctattttctgggaaagcgaaaataaaaagataaaatttgacaacttgatattgggagtaccgttaatttcctttgaaaattcatcaattgaaggttctcaggcaacggtaaaattaaattttatttctggcacgataatagaactttatgatgatggtagagtaaagaattatcaaagaattaccccgaataataattaccatatgacaataaccgtagacttgattgcggcgacaggttctgttgataataatgggaaagttgtcgtggagtttaaaaaaggaattttgggggtagtcaatgttatcaacgatgcgccagcagaagttaaggagtttttccgtaattggctcaaagataatgatgtcacttatgagttaggtattttgaagctggataatatggttggactggttccacaaatgtttaaaatcagaacgcaaccggcacccggtgctaatttatatggttctgataattatggtcatggggcagtgttgttatttattgcaacaaactataatcctaacggtggagtattaccaactagctcaagtaattttccttatttgataccagataatcgttctgcgatgctaattatcagtaataagacactttttgagaatattcttaagccgcaatatgagcgtttattacctagcccaacgggtgtaaatttagaattagttaagttagatagtcaggcggatgattcagctagctatttgaagataacaaatgggtatgctgagagcgatgaacctgtacaatatgaaggaggagggtataaagtatggacaggattgtctaaaggtgaaactaatatttggctggagaaggtaaaaattccttattctgggatgtatattaagcctgagaaggaaaaaattatcttttctggggaggataataatggtcactcttatcattttatccaaacatttggtgttttttacgattcagcaataagtggtggttggaacgactctaaaattgatttttatattgatggttcaatagatattacgcctcatgtaaaatctaatgatgagattgaattaaaattaaataatagaatgagcaccagatatgacaaacaagatgaacctgtttggggaatacacttttatcctaaagaaaagtttgttaataaaacagcagaagttgttaaagatattgttgaaaataatttatccaacgttgcaaagattaaattagatagcattagcctatttgcagttaatcatcttctttttcctgaaagcaattatcttgaatttgataaagtatatgtgcctggggatatggtgctatttggtgatatttccccaacatcaactgcatttagaattaatgatcttcaactaactataccattgaaagctaagcataaatttacaaccaacaccaaggcaacggtaaattggtctattactccagcagaattggggagtattaatgcgaatacaggagattacatggcaccgactaagataaaagggaataatcaaattgtgacaattactgcgacagacccaaatacaaacgctaaagcttcagcggttgtaattttggtgccttcctcagtatcgattagtccttcttttgttgttatcaatgaaaatgatgttaataagaatgccaattttactgtttatggcgataaaaaagtgaattggcgtgtggaaacgggtactggctatggtgttgttgatgcgaatggcaaatatacgcctccagccgctttcccggctggatataatatggttacggtgacggctgttgctgataatggcgatttagataaagttaatatcctgcttatcagtaaaaacacgaaagctgagttcacgattaatcctagctataatcaagagttattaacacccgatgccgtaatgaaattctcttctgttggtaatgatttgacttctccaagtgaatggagtcttatgccagaaagaggaaatattaaggtaggtgaaccagaagtcacaaaagatgagtttggtaatgacatcgaaaagtatactgcaacttatactgcaccaagtgatattacttgttcagaaattgttttactcagagtgacacataaaaataaacccaatcgtgcgggatatgctttgattacacttgagccgaaaatcagctaa

SEQ ID NO: 8069 - DNA, 969 bp, Photorhabdus luminescens
atgaaaaatatttctgtttatgatgatgtcattgccgccgcccggcgaatagaagcttatgcttaccgtacgccagtcctgacttcccgcactgctaatgaaatgacaggagccaggttatttttcaaatgtgaaaattatcagcgaatgggagcctttaaatttcgtggtgcttttaatgcgttatcacaatttaatgatgaacagcgccgcaatggggttgtcacttattcatcgggtaatcatgctcaggcaatttcattggcggctcgtatactgaatatttcggcgacaatcatcatgccgttcgatgcgccagtggctaaggtcgccgcgaccgaaggttatggtggcaaaattgttttctatgatcgttatacggacgatcgtgaacaaattagccgtgaattatcagaaaagcagggattgaccttaattcctccctatgatcatccgcatattattgccggacagggaactgcggcaaaagagttgtttgaagaggtcggtgaactgaatgcgttgtttgtctgtctcggtggaggagggctgctttcaggcagtgcgcttgcagctcgccatttctctcctgaatgtaaaatttatggtgtagaaccggaaaccggtaatgacgctcagcaatcatttcgtcagggcaaaattattcacatcgatacgcctaaaactattgctgatggcgcacaaactcaacatcttgggcaatatactttcgatattattcgaaaaaatgttgatgatattttcactgtttctgatgaagaattggtggatgcaatgcgattttatgcagaaagaatgaagatgattgtcgaaccgaccggctgcttgagttttgccgctgcccgcaaaatgtgtgagtcattgcgaggccaaaaggtagggattattgtcagtggcggtaatgtggatatcgaacgttactgctcgttgctggcaaaacaaccttag

SEQ ID NO: 8070 - DNA, 627 bp, Photorhabdus luminescens
atggcaatgatagattcgaagacgaaaactcattttactggtactcggaaaaaaacttatacattgctaatcaatgcggcattggcgctttttgaacagagagcgataccttcggtttctgaattggcaatgcatgctggtgtttccagagcaacagcataccgctattttccgacacaaagtgatttaattgatgcgattgttggtgccagccttgggccgatcctcacttggaagcctgctagtgaaaagactgaggagcggattacggagttgttggactttgcttatccccgaatgtttcaatacgaaggtgcattgcgagctgctctgttagtttccttgcaacaatgggctcagggatgtttatctgagggtaagcaggaaaagaaattggtacgtgggcatcgtaaagatatcctggcaatggttgttgaaccattaaaagggcattttccgccggatattttggaaaatgtcattcggtctttttccctaatttatggctccgaggtctttctggtgatgaaagatatctggcagatggataatgcggaaattattgagatcactaaatggatggcaaaagcgataattaatcaagcgcacagagattctgaactatag

SEQ ID NO: 8071 - DNA, 1212 bp, Photorhabdus luminescens
atgaaaaaaagccaaggctatgtttatatcgctactatttttgataccaagcgcacagaaattttctacgtcagggatctgatcaaaaaagcgggccttgccgttcgaactgtggatttgactactcaatctgactcgccgcaaagaggtgcggatattaccgcccaaacagtagcagagcatcacccgcaaggcaaagaagctgttttctgtggtgatcaggggcaagccatttccgcaatgtcagtcgccttcaatctctttttatcaaaacaacctgatgttttagccattctaggtctgggaggttcctgcggtacagcactgattacaccggcaatgcaatctttaccggtaggtataccaaaacttatggtttctactatggcttccggcgatgtttctggctatgtaggtgttagcgacatctctatgttgtattcagtcacggatgtctctggtcttaaccgtatctctcgccaggtattaaaaaatgcggccaaccaaattgcaggggcagtctattttcacgaagagaacactattgaagataaaccggctatcggcctgacaatgtttggcgtgacgacaccttgtatacaattattaaccagagagttggaacaacagtatgattgtctggttttccacgcaaccggcagcggcggtaagacaatggaaaaactcgccgaaagccgtttgctttacagtctactggatatcacaaccactgaagtctgcgactatctgtttggtggtgttcttgcctgtgatgctgaccgtctgggggcaatagcccgcacgcaaataccttatattggctcttgcggagcgttggatatggtgaatttcggtcatctaaattctatcccggaacgctacaaataccgacaattttaccgccacaattcgcaagtaacattaatgcgcactatacccgaagaaaaccgccaaatgggaatttggatcgctgaaaaactcaatcaatgcgaaggaaaagtaaaatttattattccagaaggtggtttttctgctctggatattaaagatgggccattctggaatcctgatgctaatcaatcatttatcaatgcttttgaagcaacattgatagaaacggaaaacagacaactgattaaaagccctcatcatataaattcacctgatttttgccaacaagtgattaaagaataccggcaaatgatggcttag

SEQ ID NO: 8072 - DNA, 1245 bp, Photorhabdus luminescens
atggctactttgccgataaaaaaatcgtctccatctttatttggcggtgccatgatcattggtggaacggttattggtgcgggcatgttttctttaccagttgtcatgtcaggggcatggttttactggtcaattgccactttgatttttacctggttttgcatgttgcattcaggattaatgatattggaagccaatcttaattatcgaattggctcaagtttcagtactataacaaaagatctgttgggcaatggttggaatatcattaatggtattacccttgcttttgttttatatatactgacttacgcttatatttccgcgagcggatcgattattcaacatgctatgcgagaagtatcgatagatttttcacctgggtttgctggttttttatttgctcttgtggttgcatttattgtctggttaagtactaaaacggttagccggatgacgtcgattattcttggtgctaagatattaactttctttatgacgttcggcggtttggtttataacgttaaaccagcggtattgtttaatacaactgaagttaatccaacttactggccttatgtattaatgactttacctttctgtctggcctcctttggatatcatggtaatgttcctagcctgatgaaatattatggaaaagaaccagagaaaataaagagatgcctgtttattgggacatcaatggccttggtgctttatttgatctggttgattggaacaatgggaaatatttcccggcctgattttgtcgaaatcatcgcaaaggggggcaatattgatgttttggttcaatcattaagtggaggattgaacagttctgctctgggtttattattgactcttttttctaactttgcggttgccagctcattccttggtgtcacgcttgggttgttcgattacctggctgatctgcttaaatttgatgacaccaagctggggcgctttaaaacggcattagtgacgtttcttccgccaatggttggtggaatgatttatccgaatggttttattcatgcgataggttttgctggccttgctgcaacagtttgggcggctattgttcccgcattacttgccagagcatcccgtaaacgatttggtagccctatgtatcgagtttggggaggtaatgtgatgatcggcttgattttgctatttggcgtactaaatgctgcggcccatatcttgtcaaattttaacctgctgcccgtttattcataa

SEQ ID NO: 8073 - DNA, 1401 bp, Photorhabdus luminescens
atgaaacgtattccagaacctttccgtattaaaatggtagaaaatattcgcatgactactcgtgccgaacgtgaaaaagcattagaagaagccggatataatccattcttattacccagtgacgcggtttatattgatttgctgacagattctggcactggagcaatgagtgatcgccagtgggcggggataatgatgggggatgaagcttatgcaggttcccgtaactattatcatctatgtgataaagtcaatgaattaattggctaccaatatactattccaacccatcaagggcgtggagcagaacagattttatttccgacattaattgctcgtaaaaaagcgcaaggtggtgcaacgcatccggtctttatttctaatttccattttgatacgacagcggctcatgttgaattaaatggcgcgaaagcgattaatgttgttacgtcaaaagcctttgatacaaccacctattatgattggaaaggcgattttgatattgatgaattggaaaaaacgatagcagaacatggcgctgataatgttgtcgcgattatcacaacggttacctgtaatagttccggtggtcagcctatctctctcgctaatatgaaagccgtgtatgagattgcaaagcaacatgatattcctgtggtgattgattcagcccgtttctgtgaaaatgcttggtttattaagcaaagagaaaagggttatgaaaataaatccgttaagcagatcgtcaaggagatgtatcaatatggtgatatgttaaccatgtcagctaaaaaagatcccttggtcaatattggtggtctttgttgtttccgtgatgatgaagatctctttaatgaagtgcgtacccgctgtgtgccaatggaagggtttgtgacttatggcggtcttgccgggcgcgatatggaagcattggcaattggtcttgaagaggggatgaatgagggttatctggcatatcgtattaatcaggtggcttatttaggtaatagattaagagatgcaggtattcctattcaatatccaaccggtggtcatgctgtatttgttgatgctaaattattattaccgcatattccaggggaacaattccccgctcatgcattgaataatgaattatatctggaggcgggaataagaagtgtggaaattggttctttgttattaggtcgtgatccaaaaaccggaaaacagaaaccatcaccgatggaacttttgcgattaactattcctcgtcgcgtttatactaatgatcatatggattatgttgtagaagcctttatttccttgaaggagagaattcctcagattaaaggattaacgtttacttatgaaccatccgtattacgtcatttcgttgcaagattaaaaccaattaaataa

SEQ ID NO: 8074 - DNA, 1341 bp, Photorhabdus luminescens
atgcatcaaactgatgttactgagcgctcgctcttttcgttaagctggccgatttttattgatattcttctccatctggccactttattaattaatacttatatggtgagccatgtttctacttcttatctggctgctatggctgtaggtaatcaggtatttgatctgtttatcactatcttcaactttatcagtgttggttgcagtgtcgttattgctcaatatattggtgcaggcaaacgggataaagccagccaggcgatccatatttctattgcattcaacttcttgcttgggtttagctgtgcgctgattactatcttcttcggctataagatcttgtctatcatgaatatgccggaacatctgatggaagatggttttaactatctacacattctgggtatctgtcttatccccgaagctatttcgattattctggctgcttgtttgcgggtttatgggaaatcaaaaccggcaatgtatgttactttgattgctaacttgctgacagtgataggtaatatgatcgtcctgtatggtttcttcggattacctaaatatggtctggaaggcgtcgcctggtctacagtctttggccggattgttgccgtgatcctattattctgtctgctcagttatggcctgcggatcaaatttacgctggcgggtttcctacgctggtcacagggtatgttgggcaaaatcttatatatcggtttacccgctgcgggtgaaaacgtcgtgtggatactgcaatatatggcggccatagcattcattggactgatgggtgaaatttcactggcagcacaaacactctatttccagctatcactgtttgtgatgttatttggcattgccaccagcattggtaatgaaattatggttggtcatctggtcggcgctaagcggtttgaagatgcttatattcgtggcattaatagtctgaaaatcggctgtatcgtcactattggcgtggtcactgctttctggctgttgagaatgccgattctgcattttctgacgcaagatgaagctattatcaaactgttgttgccgctattcttgctatccgtttttatggaaccaatccgtaccgcgaatatcattatggtgaacgcattacgcgcttccggtgatgcgcgttttccactatatgcggccatattctttatgtggtgtattgctattccagtgggatattttttggggatcaaaatggaaatgggcattttaggtatctggatcggtttcttctgtgatgaatggctgcgtgggctcactaacatctggcgttggaaatctaaaaaatggcaaactaagcgactcgatatttga

SEQ ID NO: 8075 - DNA, 777 bp, Photorhabdus luminescens
atgataagtaaggaaacattcgagatatttccctcggtggatattgttgacggaatagcaatgacatcgaattccgcaattcgattaacccgaggtgaaagctcaacattacggagacctttaggtaccccggcagaagtagcactagcctggcaaaatgccggggcaaaatggattcatgttgttgatcttgatgctgcgtcaggacgtggctcaaacagccatcttattgctgatgtcttggctgcggtcgatattaacgtacaagtctgtggcggaatcagagatgaaaccatcttgcgcaaagtattagccactggatgccagcgagttaatttggggaccgcagcattagaaaatccagattggtgtgcccaagccattgcagaatatggcgataagatcgccattgctctggatgtaaaaagcacatcggaaggttaccaattggcaacgcatggatggaatgtcagcaaaggcaatctctgggatctccttgagcgcctagacaaacagggttgtcaacgctatgtcgtcaccgatgttgagcggggaggcatgatgagttcgccaaacttcacgctattacaggaagtctgtgcgaaaacgtcatcacccgtgattgccggcggcggcgtatcgagcctggatgatctccgcgctttagccgatttgtctactatcggtgtcgagggtgccattcttggtcaagcgctacatattggtaaggttcctctcgaagatgcccttgctgcaacacaatcaccgagacgttga

SEQ ID NO: 8076 - DNA, 1155 bp, Photorhabdus luminescens
ctgggcgaattgcgcggcgtacctgaaacagactatttaactaaagaagtgatggcgctgcctggtttactcacggagaagccagcattcgtcggatcccgcggtgcagcctattacgaacaaaaatcttgtcacgaactactgatgacggcgaaatattacacagaatacatcgctcaacttgagtgtagcgataagctgtgtactgccccatcaaaatacatattggccgatcatagcttggcaaaattgctcagaattgttgatagcttattaagttctccgcagacggttaacgaagatattgtgtcatttatcgatgggatcaaagagtgtgcaaaagtcgtcagctcaacgctgatgggcacaccatttactttttcaccctcgccgatccatgacttgaaattgccgttggctacggaacacaaaatgcccagaccatttattgaaggggataatcatctgttaactttggccgcagcccaaattgacaaatgccccaactcctctgttgttggcatcatgttaggaggatcagcggcagcggcagtcacagccgcagcatgggatagtgagctcaatttagtgaaagtctcacgttacgatgatacgtctcacaaaagcagccatctctgggggcgcaaaattccatcagggagaaccgtgacaattattgatgataattgcggaacaggcgacaccttacgtcaggcaatcgatctggtcatggcccaaaccggacaacgtccaaaggcccgtgccgtcgaactacattgggaaaaattattacgtactcgcgtttatgggcatgctgatcgtgtattcaaccctgaaactttagatgtcttgacgccttggtgtttcaggcatcatcaggtcctgaatcgtttaattgatcagcctttcgctgatgataaatatgttcatacaactacggcggattgggttgcctattcatacagtttattgtctgtccttcatgacaccctgacaaactcaacatgggcagccaaattattgcgttttttattaaatctaaaagcacaaacaccgctgaattatgaacaaccaatcgatgcatttaaggccctggcacatcaatgtcctgaatgttcagctcgcaaaaactcgtttgaaaaaggagttaattga

SEQ ID NO: 8077 - DNA, 660 bp, Photorhabdus luminescens
atgacaacagcacatattatttgggattggaatggcacattacttaatgatgtcaatgtttcattgagtgcaaccaatttcgcattggcagaaatgggtattgatccactaacgctggaacaatatcgcgaatattattgtgttccagtacaaactttctataaacaagtgattggccgtgaaccctcatcttctgaatggtcagtgatcggaaaaatatttaattttcactatcggccgggtattcagaaagccagtttaacggaaggtgtgagccagctcctcgcttcccgctatgaaacaggtgcaacccaatcattatgttcactgatggagcataatgaattagtccctatgcttgataatcatggcattggcaaattctttacccaaatagatggtagaaatacgccattattgaccaccggcaaatcagagcagttagctaaccatctcaaaaaactcaatgttgctcctgagcaaagtgtggttattggagacgctactgatgacgcaattgccgcattagcggcaggaactcatgccattctttataccggaggaacccacagtcgtgtcagtcttgaaactgccggtgttcccattgttgatacattaagtgaagcgttattaatagctgactcgctaatccagaaataa

SEQ ID NO: 8078 - DNA, 1260 bp, Photorhabdus luminescens
atgttaacggctgtagttggactccaatttggagatgaaggtaagggaaaatttgttgactatttatctggcaatatcaataacattgctcgatttaatggcggcgctaatgcaggtcattgtgtgcaacatggtaatctaagaggctcattttctcaattacccgcatcactcaacaaaaagaacttatatatctgccaaggtgctttaatcagtcttcccattctggttaaagagatcgactttataaaaaaagaagatattgattctcatatatttatcgatccgcgatgccatattgtcttaccattacacgccgagttaaatcgagcgtcagaaaaatataaaggtaaacagaagatcggctcagtgggtgtcggtgtcggagcctgtgttgaagacaaagccaaccgtcatggcattcggcttattgatacctttgataaagagaaattaaggagtaaattagaatttctttggagtattagggaaaagcagattaaccatgtttttaatgcacaagcttcattagattttgaagagatgttagaaacaacacatcaatatggcaagaggatagaaccctatttcacgttcactaatgaaattatcggtgatttacttaattcgggagaagatgttttacttgagacatcacaagccactttcttagataatagttttggtacttatccttataccgtggcatatcagacactagtgcaaacctgctttgccatgataggtataccggcacagaaaatgcatattgtcggtgtaatgaaatcctatatgatccgtgtcggcaacgggccattccccaccgaattatcgacagaacaggctgattatattcgagagcgtggaaacgaatatggcaccgtttcaaaaaggccaaggcgttgtggctggttggacttatccctgattaaacacgcggtgaaacttaatggtgtaatagaactcgcgataacgaatgttgatgttcttgctggtttagatgaaataaaagtcgctgttgcctatgaaattgatgataaactcgtctgttgcgataatgcattattgcagctcgatagagccaaacctatctataaaacatttaaatcctggagcacacttaactcatcctatacagatttaacggagctacctattgagctgattgacttcttatcttttattcaagactatactggtgtcccaattaaatatatttcatatggaccagacaggaatcagacattagtagtgaaataa

SEQ ID NO: 8079 - DNA, 429 bp, Photorhabdus luminescens
atgattaactatgtaacaggatttatgttttctaaagataaaaaacatgtctcgctaatttcaaaattacaacccagttggcaaaaagggaaactcaatgggattggtggaaaaatagaagcgggagaaagcccccaacaggcaatggcaagggagtttgctgaagaagctggcattgaaacacgtcctgaagagtggcgactatttaccgtattaactcgtcctgatgtttatcaggtaaattttctctatatgtatgatgatcgtgtctattctgtcaattctattgaaaaagagatcgttaatatctatgaagcaaattcattacccgataatgtgatctataatttacgttggctgatccctatggcggccgatgagcatttacgcttcgataaagaaatagaaataacagaaatgcggggttag

SEQ ID NO: 8080 - DNA, 1155 bp, Photorhabdus luminescens
atgttaaacactgaacgtttgtggggctgtcatgtagagaaccccgttccaaccctcataggtttggggatatcactgctctttttattgactgctttgccccttcaagcggcagagcgttatcaggactgcgagattgaactggtacagatggttcgtcatgttacgggttatgccacggtgccaaacaacaaagataaacgtgattactcacgtgatgagatagtgggttataccaccagtggcccccttgactggtcgacaacctgtcgcgtcccggctggaacgcagtttatggcctacacggtggaatctggaacgaacccattaatctcttcgtcgtcaccgagtcacgtccgagtgggacgatccggcgactttatggttgatatcgggcaatcttcactctcttgccagacgcacggtttatccggtacgtatcgctctgccagtctgacagggcggagtgccggcgttaacattccctgtgttcccgatgctaacggcttggttgatgtcagtgtccgtaccgtgacaggcgcaatttacccggacagtgacggcaatttcaatgcgaaggcaggaggcagccccctgtcagtgggcgcgatcggctggattcccgccgccatatcgggttctaacgggaggctgaaacccctgtggaccacagtcatcctttcatccgttaaaaagccgtccacctgtgcggttgtcctgacgccctcatcggtggattggggaacagtaaaaagagccggtaaacaggcgggagacccactggcaccggccagacagatcgggataagcagcacctgttctggtgatgacgcggtattccaaaattcacgcctgctctaccggatcgatggacccttcgtgccgggcaaaccgcatgcgctggcctcgtcaatagatcaggtcgccttcgcgttcttcgattttgccaataaacccttatcactcagtaccgggcaccgaggtgcagggcagtcggcgagatatgtaaagctgggggacgatagttataccgcctcaacgcaactgtctgtggtaccgattctgttgaagactgacggtgccggcgggcaagccaaggccgtcgcggttatttccgtgtggtcggatattaacttcgttgagccatctgcttag

SEQ ID NO: 8081 - DNA, 2643 bp, Photorhabdus luminescens
atgacaataaacattttattttcgtctgtgcggccgacgggtagccaatgttcgcccggtcagccgggcagtttccggctccgtcctgtatatgtctgtctgttatgctcactgacggcgacaaccttgcccacctccgcgcgggaatactttaatccggcgttcctgatgggggcgacgggggagcaggagcatatcgatctttcggcgtatgaaaacgcgggctatgttgcaccgggacgctatctggtggatatctacatgaaccaagataaggtggataatcgcgagattgaatttagattggtggatgatcatctgcaaccggtattaacggttgcacagctcgaagagtatggggttaatattcgtgggttaccggctttccagggaaaagcgagtgacagccccatcacggatctgacgaaacagatcccacatgccagcacgatattggatttcgcccgtttacgtctggacctcagtgttcctcaagcagctatgcagccccaccattccgggatggttgacccatcactgtgggataacgggatcccggcctttttgatgaactacaccgtcaatggttcggaaggtcgttatgacggtcaggaagctggcggtggatcacgctcccgtaacctgtttgcctcttttcgtaatgggttgaatctggggccgtggcgtctgcgtagcacgcaaacttacagttacaatcgccagcgcaacggaggtcccgctggtttttccccctctacgcagatccaatggcaggtgagtaatacctatctgcaacgtgatgtgcaatcactgcgcagtgagtttacggccggtgaaatctataccggtggggatatttttgacagcatcccgttgcgtggcatgaaattggtttctgaggaggctatgttgcctgaaagtcagcgcggttttgccccggagataaccggtgtggcgagctccaatgcgcaggtgacggtatcccagaatggttataccgtgtatcaaaccacggtagcgccgggaccatttcgttttaccgacctgtacaccaccggggattctggcgacttgacggtcacggtcaaagaggaagatggcagttcccgtgtctcgaccctcgcctcttcatctgtcccgatgatgcagcgtcccggtggcattaaatatgagttgacggccggtcaatatcacggcggcaacctcactgatggcagccgttccccggtatttgcgctgggcagcctgatctatggtttgccacacaatatcactctgtatggcggggggctggccgcgggcaattatcagtcaggtgtattcggctcgggcgtgtcactgggggcattaggcgcactgtctgcggatgtgacgtttgcccgtgcccagttgcaaggggttaagggacaggaaaatagctggcaacagggtcaagcttatcgggtgaaatatgccaagaatttgatcagtaccggcaccaacattgatctggccgcctatcgttattccactcagcattattacagtttcagcgatgttaacagcatggggtacagcctgaatgaatatcaagtgccgtgggcgcttgaccgacgtcaaaacacttggcagttgagtttgcatcaaacgctgggacgttggggcagtctttacgcctccgggacgcgcaacgattattggaatggccgtaccgacaacaatctgaatttgggttataacgcgatgctaatggggatcagctataacctgagttataacatttatcgcatggaaggggcaggcaactggtcggagaatcgtcaggtgtcattcaatatgcaggtcccacttagtctcttcggatcatcgtcggcgctacggggagtttacagccgctatacggcctcgcgcgactcgcaaggtaacctgactcagcagaccggcatcagtggcatgttatgggataaccgcctgaattataacctccagcaaggttgggggaatcgtggccagcaaaacagtcgggctttgtctctgagttatcagggcagtcagggcaacgttaatctgggctacaacgacagtaccaatagccatcatttcacttacggggcttccggtgccctcctaatccacccttacggcatgacgctatcacgttcactgggtgatgaagccgtattggttcgtgcacccggagcgaaaggggtgacggtcggtgacggcaatgtgcagaccgactggcgtggctacgccgtactgccgggcggatcggtctaccacaaaaacaccatcaatctggacccgtccaccctgtcggaagggatcgatattgaccagaccagcaagaatgtttatccgaccaggggagcagtgacgctggccaattatcaggttcgctcaggcagccagttactgttgacgttgatacatcatggcaaaccggtaccttttggtgccaccgcgacgctggaagagaatgccaatcaggccggcagcggcattgtgggcgataacggccgagtttatttgagcggcatgcctcccgccggtcgcgtgaaagtcaaatggggaaacggggcagcgcaacaatgcactactcgttatcaggtaccgcccgatacccccgggcaactggtgcaggcagacgccgtgtgtctataa

SEQ ID NO: 8082 - DNA, 858 bp, Photorhabdus luminescens
gtgaagagagtcagtaacgggaatgggcgagcacccggtggatcaatgatttaccctttctgtttcgccctgctgttaggtggcctgttaaaggtgcaggcggcggagaatccggggttatcgttctccccgatgcagttatcttatgtggctaacgatagcccgcgcggcgtgaccctcagcatgattaatcacacggcacagaactatctggtacagggatttgttagcccgatggaccccgataccggtcgctttgacacccaaaccgggcaagttcccccttttatcgttctgccgccgttaaaacgggttgaggctggcgagcaattttcgttccgtattcgccagcttggcgggcaattaccgtcggatcgggaatcggcctttgtggtctcgctgcgggctatccccggcgtcgctgtaccggacatgggagcaccagagcgccagaccggcaaagattcgcaagtgcaggtcgccttacaaatgaatatccgactgttttatcgccctcaaggggtacctgctcgggataacgccacggtggctaaacaggtgaaattttcccttcaagggacgcagttacgggtggaaaaccccacaccctattttctgaccttttcggtcctgaaagtcggcggacaacaggcagatgaccgtacccgtcaggcaatggtgcccccgaaaggcatacaaaactattcgtttcaaacccattcgtttcaaacccatttgtttcaaacacattcgtttcaaacacattcgtttcagacccattcgtttaccgctggaagatcggggtcgctggtttggcgttttcccggcgatagtcaggatcgccatgttccgttatga

SEQ ID NO: 8083 - DNA, 750 bp, Photorhabdus luminescens
gtggaaacaggtcgggtacgccctgcgtggtaccggttggtgctattggtgttctggctagggttagggatgagcggtatggaatcctgtcgagccgccggtatcagcctaaataaaacccgggtgatttttacccaaggggaacgggcacaaacgctgacggtggtcaataccacacctcaggcgtggctggtgcaggtaaggataatggaagatcaggagaaaatcgcaccggcgtttgtggtgacaccgccgctgttcaggttggaagccaacagtcagaacagcctgcgtattttgccaacctttaatcagcccctctttccggtggatcgggaatcgctcgggtatgtccagatgaacgctattcctgcgactcaacagatgacggatgagtctgttcgggaacaggcatcgatgagcgtggggatgcgaattaagtttttctggcgaccgcatagcttgcctctgttgccggaagcggcgtatggacagttgcgctttcagtcgcaacccgatggcatcaaggcgtgcaatcccaccccgtattttctgtcgctggacagtctcacgctggatggacaggcgctcgatctgaaccgctatccctccatgatagcgccgcaggattgtgtgacctatgttgggcaagtgagtcaaagctcggtgagctggtcgatgattaacgattacggcggggcttcaaacctatttaccgccaaagtggttaccgccaacgtggcgcgttaa

SEQ ID NO: 8084 - DNA, 573 bp, Photorhabdus luminescens
atgcgcaaaccgtgggttcttatcagacagacaacactagccggtctgctctgtaccgtttccctgcccgggggagcgagcccaaacacggcagaactgacgttggcattgacgctggagcagccaacctgtgagctctacatgcagacatcccatgtggtgttttcatccgtaccactcaccgaggtgcggtatagcacgcaacatattgcggcggcgggcagcaaacccattacgttggcattgtcaggctgtgcgggatcagccagagcaggccgtaccccggcgattaaaatagccggtaccacgctagaagagcacccgacgttatttcgggataaagcgtctacggtggcgggaaatgtgggatttggccttcgctatcaattgccgggaggcgggttggggatctacctgaaaaatggcgattatgtgaatttggcaccatcgggtaacgccgttaaagaccgtcaaattaccttcctgatggatatgcggcatgaatccggcacggctgtgccgactcccggtgaactgactgcgcacattcaatttcaatttgactatcactga

SEQ ID NO: 8085 - DNA, 717 bp, Photorhabdus luminescens
gtgaaaagattgatgacagcaatgatagtgaccggtctgttaggctggccggttacttccgcgcaggcggaaggggtggggatcaacactacccgcattatctatccagcggatagccgcgcgacaaccgcctcagtgagcaataccagtaaagaggcggtctatttgatacaggcgacagtcagttctacttctacgggagataaaaccgccccatttctggtgacgccgcctctgtttcgtatggaaccagacagccagaatcaggtgcgcatcatcaaaacgggtccgtcgctgcctgctgaccgggaatcgctgttctggtttacggcgaaggccattccgttaagctctgaatccgataatcgctcccagaggaatgtctccggcggaatacagtttgctatagccaacacgattaagctgatgtatcgcccgtcaggattgtcggtttcgccggagcagggatttggttcactgcgcttcaaaccgacagccgcgggaatcatggtcaccaatccatcaccttattacatcactttaacctccctaaaagtgggtggacaggaggtgatgacgcagcagaaagtgaacatggtctccccgttctctgacctccctctactacttaaaggaggacgttatccagccaaagtaagctggacggtgattaatgacttcggcggagaatccacctatcagggggagataccgtaa

SEQ ID NO: 8086 - DNA, 561 bp, Photorhabdus luminescens
atgaaaaaacaaattttgaagacctgtgcgatagcggcactgtgtctgggggggatgtcgcaggctatagcggaggatgtgagtgccggtaccttggcagtaagctcttccgtgaccgcagagacgtgtaagtttgcagcaatagagcctgttagtctctccgctttggtatctgatttcactgcggtaggaaatggagcaatcgtagctaacacgcaaaaattcgtcacgattaaaacggaaaaatgcccgctgtggagttccgcgaaaagcgttaaattgacggttgccggtaccacattagcatcatccagtagttactttcagcttcttaacaccacgggtaatgctgcaatcaccgaccatgcggttgctattacgataaatgataaggctttaccgccaaatgcaggaattaacctaaaagatccccaatatagccccgcagtagccggtgataatgccatcacgcttaaggtagggctggctaggattggtgcgacggcggtaaaagcagcagactccaaagcaaacctgaccgtgaaagtctcgtatgactaa

SEQ ID NO: 8087 - DNA, 1155 bp, Photorhabdus luminescens
atgttaaacactgaacgtttgtggggcggtgaggcagaaaaccccgtcccaaccatcatggggctgggggtatcactgctctttttattgaccgcattacccctccaggcggctgagacttatcaggactgcgggactgaactggggaataaagttagcaatgtctccggctatgccatgatgccgaacaataaagataagcgtgattattcacgggatgaaatcgtgggttataccaccagcggcccttttgaccggtcgacaacctgccgcgttccccccgggacccagtttatggcctacaccgtgggatcggggaccgactcattgatctcttcgtcgtcaccgggtagcgtccgggtcggcaaggctggcgactttatggttgatatcgggcaatcgtcactctcttgccagacgcatggttcacccgatacgtatcaatcagccagtctggtcaaaggaaatgctggcgttaaccttccctgcgtcccggatgccaacggtctggttgatatcagtgttcgctcagtgaccggagccatttacccggaccgcgacgggaatttcaatgcaaaacccggtggaagttatttatctgtgggctctatcggctgggcttcaacggccgtatcgggttccagcagcataccgacccccctgtggaccacggttatcctttcaccggtcaaaaagccgtccacctgtgcagtagtgcttactccgtcatcggtggattggggaacggtgaaaagagccggtaaacaggcgggagagacactggcgtcggccagacagatcgggataaacagcacctgttccggtgatgacgcggtatttcaaaattcacgcctgctctaccggatcgatggccccttcgtgccgggcaaaccgcatgcgctggcctcgtcaatagatcaggtcgccttcgcgttcttcgattttgccaataaacccttatcactcagtaccgggcaccgaggtacaggggcggaagcgagatatgttaagctcggggacgacagttataccgcttcaacccaactgtctgtggtcccggttctgttgaaaactgacggtgccggagggctagccagagccgtcgcggtcatttccgtgtggtcggatgttaacttcgtcgacccatctgcttag

SEQ ID NO: 8088 - DNA, 2643 bp, Photorhabdus luminescens
atggcaataaacactttatttccgtctgcactgcggacgggtaaccagcgtgcgcccggtcaaccgggcagtttccggccgcggccggtatacctatgcctgctgtgttcactgacggcaacggccctgcccgcctcagcgcgggaatactttaatccggcgttcctgatgggcgctgacggtgaacgcagtcatgtcgatctctcggcgtatgaaaacgcgggctatgtcgcccccgggcgctatctggtggatgtctacatgaaccagaatcgggtggacagccgcgagattgaattcaggcaggttaacggccatctccagccggtattaaccgtcgcacaactggaagggtatggggtcaatacccgcggattaccggcttttcagggtaaagcggacgacagcctcatcaccgatctgacgaaacagatcccgcacgccagcgccacactggatttcgcccgtttgcgtctggatctcagtgtcccgcaggtcgctatgcagccccactattccgggatggttgatccgtcactgtgggataacgggatcccggcctttttgatgaactacacggtcaacgggtcggaaggccgttatgaccgtcagggaaactggggaggatcacgttcccgtaacctgtttgcttcttttcgtgacgggttaaatctggggccgtggcgtctgcgcagcacgcaaacttacagttacaatcgtcagcgcaacgaggccgccgccggcttttccacgccggcacagacccaatggcaggtgagcaatacctacctgcaacgtgatgtcccctcactgcgcagcgagttcacggcgggtgaaacctataccggcggcgacatttttgacagcatcccgtttcggggtatgaaactggcttctgaggaggcgatgttacccgacagtcagcgcggttttgccccggtgataaccggtgtggcgaacgccaatgcgcaggtgacggtatcccagaatggcaacatcatatatcaaaccacggtggcaccggggccgtttcgtttcaccgacctctatagcaccgggagtgccggcgacctgacggtgaccgtcaaagaggaaaatggccgtacccgcgtctcgacaatcgcctcgtcgtccctgccggtgatgcaacgtcccggcggcgttaaatatgaattgacgaccggtcaatatcacggcggcaacctgaccgatggcagccgttccccggtatttgcgatgggcacgctggtctatggtttgccccacaatatcaccctgtatggcggcggactggtcgcaggcaactaccagtcgggtgtattaggctcgggggtgtcattgggggcatttggcgcgctgtctgcggatgtgacgctggcccatgcacagttgcagaggagcaaagatcaggaagaaagcggacaattcggccagtcttatcgcgtgaaatattctaaaaacttgctgagtaccggcaccggcattgatctggccgcttaccgctattccacccagcattactacagtttcagtgatgctaacagcatgggctacagcctgaatgaatatcaggtgccgtgggcacttgaccggcgtcagaacacctggcaggtgaacctgcgtcagacactgggacgctggggcagtctttacgcctccgggacgcacaacaattattggaatggccgtaccgacaacaacctgagtctgggttacaacgcgatgctgatggggatcagctataacctgagttataacatttctcgtatcaggggcgagggccactggccggaaaaccgtcaggtatcattcaatatgcaggtcccactgagtctctttggatcatcgtcggcgttacggggcgtttacacccgctataccgcctcacgcgactcgcagggtaacctctctcaacagaccggcatcagtggcatgttatgggataaccgcctgagttatcacctccagcaaggctggggacacagcggccagcaaaacagccgggccctgtcgctgggttatcagggcagtcaggggagcgttaatctgggttacaatgacagcgcagacagccggcatgttacctatggcacgtccggtgcccttctgatccatccttacgggctaacgctgtcacgctcgctgggcgataccgccgtgttagtccgcgcacccggggcgaaaggggtgacggtcagcaacggcaacgtacagaccgactggcgtggctacgccgtactgccgggcggatcggtctaccacaaaaacaccatcaatctggacccgtccaccctgccggaaggggtcgatattgaccagaccagccgcaacgtttacccgaccaaaggggcggtgacgctggccaattatcaggtccggctgggcagccagttgctgctgaccctgacacatcatggcaaacccgtgccctttggtgccaccgcaacgctggcaggcaacgcagcccaggccggcagcggcattgtgggcgataacggccgggtttatctgagcggcatgccgtccgccggtcatgtgaaagttaaatggggaaacgaggccaatcaacaatgcaccacccgttatcaggtgtcgtccgatacccccgggaaactggtgcaggctgatgccatatgtctataa

SEQ ID NO: 8089 - DNA, 783 bp, Photorhabdus luminescens
gtgaagagagtcagtaacgggaacaagcgagcacccggtggatcaatgatttaccctttctgtttcgccctgctgctaagcggcctgttaaaggcgcaggcggcggagaatccggggttatcgttctccccgatgcagttatcgtatgtcgccaaagacagccccggcggggtgaccctcagcatgaccaaccatacggcgcagggctatctggtacagggatttgtcagcccgatggaccccgataccggtcgctttgacacccaaaccgggcgggttcccccttttgttgtcctgccgccgttaaagcggattgaggccggcgggaaattttcgttccgtattcgccagcttggcgggcagttaccgccggatcgggaatcggcctttgtggtctcgttgcgggctatccccggcgtcgccgtaccggacacgcacgtgcctgagcgccagaccggcaagaactcgcaggtgcaggtcgctttacagatgaatatccggctgttttatcgccctaaaggcgtccccgcccgggataacgccgcggtggcaaaacaggtgaaattttcccttcaggggacgcagttgcgagtggaaaatcccacaccctattttctggccttttcggtcctgaaaatgggcacacagcatgtggatgaccacacccgccagacgatggtgcccccgaaaggcatacaaacctattcgtttaccgccgggggacaagggccactaatctggcgttttcccggcgacaatcaggatcgccacgtcccgttataa

SEQ ID NO: 8090 - DNA, 735 bp, Photorhabdus luminescens
gtggaaacaggtcggatgcgcacaacgtggtacaggctggcaccactactattctgtctagggttaggcatggccggcacagaaccctgtcaggcagccggtatcagcctgaataaaacccgggtgatttttacccaaggggcgcgggcacagacgctgacggtggttaacaccacacctcaggcgtggctggtgcaggtgaggatcacaggcgatcaggagaaaaccgcaccggcgtttgtggtgacgccgccgctgttcaggttggaggccaatagtcagaacagcctgcgtattttgccgacttttaatctgcccccttttccagtggatcgggaatcgctcgggtatgtccagatgaatgctatccccgccgcccatccgatggcgaatgagcacgctcgggatcaggcgtcgatgagcgtgggaatgcgaattaagtttttctggcgaccgcatggcctgccgatgttgccggaacaggcgtatggacagctccgctttcagtcgcaacccggtggcattaaggcgtgcaatcctacgccgtatttcctgtcgctggacagcctcacgctggacggacaggcgctcgatctgaatcgctatccctccatgatagcgccgcaggattgtgtgacctatgtcggacaggcaggcaaaaaagcggtgagctggtcgatgattaatgattacggcggggcttcaaacctgtttaccgccaacgtggcgggttaa

SEQ ID NO: 8091 - DNA, 573 bp, Photorhabdus luminescens
atgttaaaaccgtggacccttatcggacggacagcactggccggtctgctctgtaccatccccctgcccgggggagccagttcaaacacggcagaactgacgctggcactgacgctggaacagccaacctgtgaacttaatgtacagacctcccatgtcgagttttcatccataccgcttaatgaagtgcaacgcagtgcggaacatatcgcagcggcggacaacaagcctgtgacgctggcgttgtcaggttgtgcgggatcagccagaacaggccgtaccccggcgattaaaatagccggccccacaccggaaaaccacccgacgttatttcgggataaggcttccactgcggcgggaaacgtgggatttggcctgcgctatcaatcaccggaaggcgggctggggagctacctgaaaaatggcgattatgtggatttggcatcaccgggtaacgccgttaaagacggtcaaattaccttccagatggatatgcggcatgaatccggcacggcggtccccacccccggtgagctgaccgcgcacattcaatttcaatttgactatcactga

SEQ ID NO: 8092 - DNA, 789 bp, Photorhabdus luminescens
gtggaattggacagggaagtccaattcttactttacgtaacaccaaaacagacattttcaggtgattcagtgaaaagattgatgacagcgatgatagtggccggtctgttaggctgtccggtcacttccgtacaggcggaaggagtggggatcaatgccacccgcattatctacccggctgatagccacgcaacaaccgcttcagtacgcaacagcagtaaagaggccgtctatctgatgcaggtgacggtcagctctaccccagaggggggcaaaaccgcgccatttctggtaacgccgcccctgtttcgtatggagcccggcagccagaatcaggtccgtatcatcaaaaccggccaggcactgcctgccgaccgggaatccctgttctggtttaccgcgaaagccatcccgttaagccccgaatccggtaatccctcgggtaagcagatcaccgggggcatacagattgctatggctaacacaattaaactgatgtatcgcccgtcagggctgccagttgcaccggagaaaggatttggttcactgcgcttcaaaccgacagccgaggggataacggtcacgaatccgtcaccctattacatcaccttcgcctccttaaaagtgggcggccaagagctgatgacgcagaaacagaaagagagcatggtttccccgttctctgccctgtttttccccctcaaaggcgtgaattacccggccaaagtgagctggacagtaattaatgacctcggtggaggatcatcctatcaaggggagataccgtaa

SEQ ID NO: 8093 - DNA, 579 bp, Photorhabdus luminescens
atgaaaaagcaaatgatgaaaaccagcgtattagccgcagtgctcttaagcatggggatggggatggcacatgctgctgcgggcgatgtgcttgctagtaattcagtggttgtgaatggtgttgtaggagcggcaagttgtgtactcaacgtcacagacggaggagcctcaactacctcgatcgacttaggcgcgattaatcagagcgctattaaatccggtcaattaatcggcacgaagaaaatcaaggttgaacttggtgattgctctcaagtcgttgattcaaatgacaataccaaacttaacaccggagttggtttgagaatttctggaacagcttccactgtttcagcggattactttgccgcgcctggcgacactaataataagttagctgtagctgtgcagaatggtagtaaattcttaaaacccaatgatgcggttagctttacaaaaggtgctctactaactgatgtgatgcaagaattggacgtaggtatgattgctaaaacccctagtgatgtgacggcgggaatgagtgtcagtgtaccactgactttccaacttattgagaaataa

SEQ ID NO: 8094 - DNA, 300 bp, Photorhabdus luminescens
atgaaacaagatcatctattagtagggaagcgtattcaaaaaagaaggaaagagttgggcatgaccgcggtaaaattggcggaaaaaataggcattagtcagcaacaactctcacgttatgagagagggataaaccgaattaatttatcccatttggtgcagatcgcttcaatattggagacaccgataaactggtttttccttgattgtagttatccggcaagcaataacagcatcaataaattaacagaccaatatatccctattgcggaagcgacattgggtaaatttggatgttaa

SEQ ID NO: 8095 - DNA, 816 bp, Photorhabdus luminescens
atgaaaaaattattctctgtttgcctggtatttttatcactgttttcatcaagtgcggctgcatcaatattttcatatatcactaaatccgaaggtgttcctacgaatgcctattatacttttgtcattgagcgttgggaccaagaaaacgattttacgccaaatccttgttatggttattctgcatgttggatatcggttaaccatcgccattttgctgatggttattcagggcagccctataggatatttaatactcgcgtggaaagatttaagacaatgaaacaagtgcaggcggagatattgaaatataccagttttccgatcaccggagtggcaaaacattttggccctgcgattcggtctcatcaggaatgtgtcgggctattttacgaaaccgatcaaaatggctttcatggaagattattgcctggctctttatgtggtgttgcaccaccgccgataggcttttgtcaagtcagtgaaggttccgttgagcttaattacggcagcattgatgaggcaaaactagacggtgcaacccaaacgggaaatatcaatgtgacctgcaatgtagacataaagattatcgtgatagcaacgggccttaatggagaatttgtaccgttgagaaacgatggtagcttgaaagctaagttgttattaaatgatagcaaaggtgaagatggtgtggctgtgtttgtaccggctggaggaaatgtacccgttacagtgaaatcaattttacaaaaaaatggcagagtagaggcaggacctttctcaggatcagggacaataattttggcgatgccataa

SEQ ID NO: 8096 - DNA, 546 bp, Photorhabdus luminescens
atgaaatatttaaaattattcgtgttgcgggtgggttttatggttattgctgccacggtttatggccatcaaggggtacaggctgcggataatatgcgttttcacggtgcattggttaaagaaccttgcacgattaaaccgggtgatgaagatatccagctcgattttgcaacaatttctgaaaaatatttgtatctgcatggtagaacccatagcgaaccttttctgctcagattatctggttgcgacatgagtgtgggcaaatcgttcaaactgacatttagcggcatagaaaatacgcaattgccgggtttattagcattaagtgcgggaagccaagccgctgggattgccattggtatagaaacggcagaaggcagacggttgccgttgaataaagagggagatgcctatccgttaaaagagggtgaaaacttgattgcactacaagcctatgtgcaggcagaacccatagcgctagctaaccagacgattacgcgaggcgcatttcatgcgattgcgacatttaatctgaattatgactaa

SEQ ID NO: 8097 - DNA, 483 bp, Photorhabdus luminescens
ttgatctatcgtgttttctggacggtttgcttaggtttcatcaatgtgatgccgggacaggcagccgataatatgtggtttcacggcacactgcttgaagcgcctccttgcgttattgatgacggcaatatgattgatgtctattttggtcacaatgttggcatccatcaggtggatggagtgaattatacccagcccgtgaattatcagttggtctgtgcgcctaatatctcaggttggagtttaggattgacagtgattggcccgtcaacctcatttgatgccgccgcgttgcaaaccaatattaccgatttaggcattcgtctgacgttggatggtaaagcattcacccttaatgagcgtattccggtgacatcacagaaacagccggtaatacaagcggtgccggtgaaaaaaccaggaagcacgttgccggaaggggcgtttgaagtgatggcgacattgctggcggaataccagtga

SEQ ID NO: 8098 - DNA, 492 bp, Photorhabdus luminescens
ttgagtgtgagtgctcaggctgatttactgacaacaaggggaaatatagccgcaagacctgccggtaatttttcgggtaaaaccccgatcaacatttacggcgtggttatcgcacctccaccttgtgtgattaataatggtaatactatcgatgtagattttggcgatgtgatgattacccggattgacggggttcattatatgcaaccggtcaaatacagcatgaaatgtgaaaaaatgccggctaatgccatgaaaatgatgatatcgggcaacaccgccagttttgatccggcggtgttgcaaaccaatcacactgggcttggtatcgctgttattcataacggacgaaaattgcccgtcaatgactggatgaaatttaactatcctgattttcctgaattatatgcggtgccggtaaaagatatggctacggtattgaaaggcggcgactttggcgcgggtgcgaccatgatggtggaataccagtga

SEQ ID NO: 8099 - DNA, 594 bp, Photorhabdus luminescens
atgaacatcaagcggataggctacggattgacactggcgatctggctgataccagtgatagagagtcaggcggcggaaaagcgagcagccgatatcgaaggcttgcatggcgaactgcatgtgtttggtgagctgactgaggcggcttgtcgactggacatgacctctgcatggcaggaggtgaatttgggggtaacaccaaacagtgatttacgtcggtcaggtgataaagggacaccgataccgttcacattgaagtttcgtgactgtctgcgaaccaaaggagccgtacatgatatgcggaccggcaatctgacgtggagccatttacagccggtggtgacggtcagttttgtggcaccggcggatcgcgattatccacatctggtgcgggtgagcggtatcagcggattggggttacagataacagataccgctaacaatgatatccggttgggagagcggggacgcccacgttttgtggctgcgggacaggacagcttggaatattacgtgacgccagtacggacgccgagagcgctagggattgggcaatatcgcgcggtggtggatttcagggtgaattatgactaa

SEQ ID NO: 8100 - DNA, 750 bp, Photorhabdus luminescens
atgaaattgaagaatacaattaatgtagtcacgatcgctatcttaagtctgtcggtgatcagtgagtcaatggcggccattgcgctggatcgtacccgcgtcgtgtttaacggtggggacaaatccaccagtatggatatcagcaaccagaacaaagagttgccgtatctggcgcagggatggatagaagatgagcagggtaacaaaatcaatggtccgttagtggtgacaccaccggtgcagcgggtggaaccgggcgctaagagccaggtgaaaattcagtcactgccaacaatcgcacagttaccccaagatcgggaaagcttgttctattttaatttgcgtgaaattccaccacgcagcaagaaaccgaataccttgcagattgcgctacaaacccggatcaagctgttctatcgtccgaaagccatttttgccagccgtaccgatttggataatccgtggcaagagaagatgactttgacgcgtcagggggaccgatatcaggtgaacaacccgacaccctattacatcaccgtggtggatgcagcaagccagcttaagggtaaaacggtggtggactttaagccattgatgatcgcgcccaaaagtaatgtggtgctgagtgggagtgccggggcattaggcagtgcgccggtgctgacatatgtcaatgattatggtggccggccgcaattgatttttagttgttcaggcaaccattgtcaggtggctcaacgttcgtcgtga

SEQ ID NO: 8101 - DNA, 2517 bp, Photorhabdus luminescens
gtggtctcggttcggtgtgtcctgaaacctcttattgttttggtattgcttgctttaatgggtactcatgcggtgtatgcggaagaggaaattgaatttaatacggatgtgttggatgttcaggatcgggctcggattgatttaaaagaattttcccgcgccggttatatcatgccgggggattatcagatggcggtacgtctgaataacagcgagctgccggagatgccggtgacttttatggtaccaccggatgatccgaaggggagtgtggcgtgtttgccgcctgagctggtgaagcagttggggctgcgggcggaatgggaatcaaagatgacctggtggaacaataatcagtgtctggagattaaaacgctgcctggcatgacagtgcgcggtgatctgagcagtgacacgctatacctgagtatgcctcaggcttatctcgaatatcactcaccagactgggacccgccgtcacgttgggatgaggggattttcggaatgatgtttgattataacgtcaatgctcagatcgctaagccggcgaagggaagtgaaaatcagaatgtcagtgctaatggtacgaccgggataaatttgggggcgtggcggctacgggcagactggcaatcacagtataaccacgtcacggggcgggcagggagcacagagaaaaactgggattggagccgttattacttgtaccgggcaataccacattggcaggctaagctaacgttgggtgaggattaccttaattcagatatctttgacagcttccgttttaccggtttgagtctggtgacggatgacaatatgttgccgccgaacctgcgaggctatgcgccagaggtgacgggggtagcgaaaaccaatgccagagtgactattcgtcagcagggacgggtgttgtatgagacccaagttgcgccaggtccattccgtattcaggacatcaatgatgcagtgagcggcaaactggatgtgcgggtagaggagcaggatggcggtttacaggagtttcagatcgatactgcgaatattccctatttaacccgtccgggccgggtgcagtacaaactggcggcgggtaagccgactaactggaaacatcacagtgagggatcgggctttggtcttggtgagttttcttggggaataaacaatggttggtcgctgtacggtgggatattgggggccgggaattataacgcgttgtcattggggattgggcgtgatctgatggtctttggcgcactttcctttgatgtcactgaatcccgcgcccatttaccggatgaggaccaaacattgactggtggctcttatcgtctcagttattccaagcgttttgaggagtatgacagccaggtgacttttgccggttaccgtttctcggaacgtgactttatgagtatgagccagtatctggatcgccgttatcacgatggtgatgcagagagtaataaagaactttacaccattatgttgaataagcagttcacacatattggtaccagtatttacttgaattacagccaccagacttattggaaccgttcgaataacgatcgctataacttatcgatatcacgttattttgatattggcagttataagaacattaacctgaatctgtctgcttaccgtaataaatatgaaggtaaaaatgacgacgggatgtatatgacattatccctgccgtggggtaattcaggaacgatcagttataacgcaatggccaaccgggaaggtaattcccacacggtaggttattacgaccggattaatgaaaacagtaactatcgtttagcggttggttccagtattgacggcaaggccgcggctaacggttatttaacccattacggcgatcgcgctcaactgacgaccagtgcgagttatcaggatggacgttataccacgggagcgctttctattcagggggggatgaccgtgacgccgaaaggcgcggcactgcatcgtattaatatgcccgggaccacccgtttgatggtggataccgatggtataggtggcgtaccggtgaaaggcttcggcgcgattacccataccaatatgttcggtaaggcggtgatctctgatgtaaacaactattaccgtaacagtgcgagtattgatttgaacaaactgccggacaatgtggaggcaatccggtcggtacaacaagcaacactgacggaaggggcgattggttatcgtaaattccaagtgatatccggtgaaaaagcgatgggtatgatccgcttgtcggatggtagctcgccgccgtttggggcaacggtgctgaataaggatcaacgggagatcggtatcgtcagtgatggtgggaatgtctatctcagcgggatcaatccggcagagaaactggatgtgcgttgggatggggagttgcagtgtgtgattgagctgccacaagaattaccaaaagtcgaagagatggcttcgttattactgctctgtcagttagccgacgacaataaacagccataa

SEQ ID NO: 8102 - DNA, 438 bp, Photorhabdus luminescens
atgcaaggcaccatcattgatacggcctgtgcgattgacgcaggtagtcgtgaccagacgattgagttagccacgatcccggtaagccggatgatacatgatggacagggacccgtgcgtcctttttctatccgtttgattaactgtgtactgacttctgccactttgggtaaacccgattggcgtcactttcaggtgatgtttgatggcataccggatgggaacaatttccggttatcgggtgtagctcaaggagtggcattacaaattacagacatgtacggcaatcaggcatatccgggaactcctctaccggtggaggggttacaggcagggcagatgacccttaattacgcaatgcgattagtgagtaatcaccagttattgcaagcggggcagtatcgaaccacggttcggttcaggctggattatcactaa

SEQ ID NO: 8103 - DNA, 540 bp, Photorhabdus luminescens
atgagattgaataaattggttatggccctggggttaggtgtggctttggctgcgggttcggtaaatgcagcgaatcctagccaaggtcacggaacggtgacttttaccgggtctattactgatgcaccttgttctatcaccccagaaacggttgatcaggtagttccactgggctctatttctagcgcatctttgcaaaacggtggccgctcttcttccacgcccttcaaaatttctttagataactgtacgactgaaacgataagtacagtcaccacgacgtttgttggggctaaatctagcatcgtcggcggtgatggtttgctaggtatcgaaggcgttgctaaaggtgcgggtattgcgatcactgatgcgggcggtaacaaaatcaaactaggtaccccttcaccagctgtcgctctgcatgatggtgataatgatctgcattttgctgcctatcttcaaggtgatacttcacctgatgccgttgttccgggtaatttcaccggcattgccaacttccagctgacttaccaataa

SEQ ID NO: 8104 - DNA, 573 bp, Photorhabdus luminescens
atgaagaaacgtaagtttttaacccgatatgaaattaatgcgattttagaaaaagcgcgtcaaggatgtcatgctgagcgagattattgcatgctactaatgtgtttcatccatggatttagagtgagcgagttatgcaatctcacgttatccgatcttgatcttaactcagaacttattcatgtcagacgattaaaagggggattatcaacaacacacccactaataccagaagaaattaaagctttaaatcaatggcttaatattagaaagagttggcgagaatcagattcagagtgggtctttttatcacaaaaatcaggggctatttcacgccagcaagtttatggtttattaaagcgttatggcaaacaagcattagtcaatatttcacctcatccacatatgctaagacatgcctgcggttatgctctcgctgatttaggaagagatacacgccttattcaagattatcttggccatcgaaatatatcccatactgttatttacaccgcaagcaatgtaaaacgatttttcaaaatatgggaggctcctgcaaaaggactcgattaa

SEQ ID NO: 8105 - DNA, 615 bp, Photorhabdus luminescens
atgaatgaaaaattctatcaattaaaaataacacttacagactcaaaacccgctatttggcgacgatttgttgttcctgcttctatctcattcgacagattgcacgatgtgatacagatcgtgatgggatggcaggatagtcatctacatgaatttcgtattggcaaactacgactaacggaaatgccagaaagcccgtctgatagcaaggaagaagatttatatcgcctaattgatctgattaaacaaaaagggcgatcttttacttatctctatgattttggcgatggttgggaacacgaaattattttagaaaacagtcaatatcctgcaaatgacctcccgcttcctttttattgtctggatggcgcccgcgcttgcccctttgaggataccggcgggattgatggttatgaaaatttaatcgcaatactgaatgatcctgaccatgaggaatatacagaaatgcgacaatggataagtgaattacttgagttagatgaagatgaagatttcgacttcgaacaatttcccattaacaatattaatgcttttctagcgctctattatcgctggtcacgagatcgttatcatctcttgtgggattgggaatga

SEQ ID NO: 8106 - DNA, 204 bp, Photorhabdus luminescens
ctgctggcgcaaagtccctggctagttcagcccaagtcaggctgtctgtcagtaattggtcatctgcttgatagtcatactctgagcgataacagttggggttgggcttaccgcagtgatcagtcatggatacagcagcatgcccgaaccgcagatttattatcggccagtaaattaccccgttgttatcccgaagagatgtga

SEQ ID NO: 8107 - DNA, 264 bp, Photorhabdus luminescens
atgaataaatcagaaatcttttttatgattaaaaacattttgacgaaagaattaaatgtcggctctcttaatgacatgagtgaatcaacatcattacgtgatgagcttgggctagattcgatgactacactgacatttttgatgtcactagaggataatgttccaaattttatgattgatgcaaatacattggaagccagtcatgtacaaagtattggttctgtctgtgattatgttttagaacgactaaatagtgtatcatga

SEQ ID NO: 8108 - DNA, 879 bp, Photorhabdus luminescens
atgatttacataaatcaggttttctgcgaaataatgaataagagatctctcagaaaaactccaagaaaccgttactccatataccagaaagacttacatcgtatttctcaagatgaattaactgattcaaccctattagaaggtgatcaatactcttatactgaattaggcgattctgttcttaaaaaaatggaagattctattcttttaagtgatattgatttatctatatttgcctattggacacctgagtttgatccagatcattcagcttttggtccatattttatggaccattataaccttaaaggatactcattcgacatttgtgacaatggaagtttggtatcaaccacagctttaagtattgctggtaattatttatctagtggtagtgcgagtaaaatattattattaggaatggagcaaaatactattcctcgtaatatttctaacggatttccaataccaacgcaatcttgtgctattgcagccttactcacaacagaaaaaagcgatgaaaataaatggatattattaaaaacagggcaggtaagtgaatgggagtcggctgaaagtttggatgcctttggcatgttaagaaatatattgcatcaattgcagttagatgaagaagatactatattattaacagagcgtacaggttatttctttaaaaaaatacgttttcaaatggaagcggaagatagaaaaagttcaatcaaatttgctttcttcaaacctgaagttacaggaatgaatgcattgttacttctagcggataagacactaacaccactaaatagaaggaacatattattagtagaacatgatatggaaagtttaagaatagcatggtctgtcttacaaaaaatttag

SEQ ID NO: 8109 - DNA, 675 bp, Photorhabdus luminescens
atgtttaatatcagctatccattcgaatcaaagaaagaacaacgttttcactggttgatggaacaattagcccaaacagttttctctacatcaaaccaaattgttgtgagaaacgggtttgctgtagtttcagaagaacaatggaaaaattcagaattatgctttttagacgaaaaacaatatagctggaaagaaagaaatactgtcaccatccttcctgtctgtaatagtatgaagcgccagagattattattatgcaaattggaggtaaaagacggtgatattgcttcacaagagatagcgaaaaaatatgtcaactatcaatgtgaaatgatacgaatgcagcttatttggattgaacgatggacatcgattttacttgatcatacagcccagcgtaagattggcagtgtttctctattatcaatttcctctattcgtctccgtttggcacaagttatacaacgtcaattattattatctcagtgtgtaggagacataaaagaagaaataccttcacagtttgctgagcatgcggctgaagaaattgaagaaatggttaatatcctgattaaaacaacgggaggaagggctcttctacagcaagggttggtcgaaatgcagcacattttttctgttctgaatcaagtttatctgagggagttccatggttaa

SEQ ID NO: 8110 - DNA, 1080 bp, Photorhabdus luminescens
atggttaattttgacagttctattgcctgtacacattatggaaaaaaatggttagagttagctcaactatttcgctctttgtctttgaaggtgctagatgataaggatactgtattatcacatcttgacgcaccgcttttcgaccaactttatatggatcgcagtagtagctgtctggaaaggacaaaaatgtatgaggtgcttacttacggagatccaaatgtcctgctgtcatgtccaggcccatctctttccggtatcattgtacgagaattaggctcaactaaacaacaagactatttttttgaatatgttgctcagcataaagctcgcacctgtatggcagtcacggagcctggcaaaggctctgatgcaggaaatccgtcttcattgttgagtgataattttgaacttaacgctgaaaaatggctagtaggtaatggactcgatgctacgatcggaacaatggttgtcagaactggaacagggccatacagtatcggtgtaattttgttgacacctgaaaccctttctcatcctaaagtttttcgtcagttgctacctgttgctggactgcaaggtgctggcttaagccacctatattttgacaaaattcctatctctgaagagcatattttgggcttgcaccgtagaccattagagagaggtatgcactcagtgataaaaactttttatcgtatgaggccttgtgtatgtgctatggcgttaggtagtgctcaatcactacttgattttgccatatcgcatataagaaatgtaaaagctagagagctccactcctccttgcagattgaaattgaagccataagaaatctgaattaccgtgccgcttcgagaatagatgatgacatattggatggtgcagctgtttcactggccaaagcttgttctaccgagtttgtggaaaaagttgttcatatcatgccacagcttgtgggaacagagctctttctaacagatatctggttacagaagacaattactgacattcaaggatatgaatggatggaaggaagtctggatatgcagcgtctaaatattttagctggatctatatag

SEQ ID NO: 8111 - DNA, 1401 bp, Photorhabdus luminescens
ttgaatatattaaataaattggtaattgatatgacaatgcaatccatatttcagcggagacattttcagcgatatcagtggttgaaattactcagtgatctttggaataccagcattacactttggggcactatggtagtttctgcggttgctgtgttaatcaacattagcattattagtcataattcacctaatatgttatatgtaattggattattcttaccgcttaattatatgatgatgtccatccatgaaggattgcgtgtacctgcattgcggtatagttcacatttaagaagtgctaatttttctctactaggacaacggttgttattgttgtttttagctatgttagcattgatggcaatacttatattcaatgtatggtattttcaaagtggtatttcttatttgtttcatattgaatcttcacagcaagatgaagtaatgaattttattattcctatgctttttattgggataatgattggttttgccacgttaattttatccactttatttggtcttggatttaatcgttgtggaagtttactaggaatatcaggtacagtactaaatataggtgcaacttacttaactgaaatatattggcataagggcttacaaagcctgatttggggggcaatttttggtagcagctatcttatttcagtaggcagtattttactctatcgtcaaggcgtggttatatcttggttaggaatgcgtgatcaagttattcaagtaataaaagatatatctacgatggccttacccgtaatgggtagtttctcccttgtttttatttttttattttcctttaattatctggtgtctttttatgatgcccatgaaatagcagggtttagcatagcttttcgtatacagtcgtttattattttgcctgctattgccttaggaacagctatggcaattcactataataattctttatctaaacggaattttgtcagagctaaccaagtatttttgattggtcttagtctcactggtgttatatatatatttattagtgttgctgtattctttttgaaagtttggttagttaaattttttactttagatgaactgattgctgaggcggctttacgctatttaaattgtgtatctccatcttattttagcttaggcatagtattggggttaatgactgctttagagcagattggtcaaggattacgtgtactacttatcaatatcaccttatattctctggagattggaatcgctgcattattaggattaaagcaggaggatgctacacggttgtatctaactattgctatttttaattggatttctgcgctttacatttttagtatttttaataaaaaaagcgattttaatattaaatactcttccggtgatatacactcttaa

SEQ ID NO: 8112 - DNA, 1578 bp, Photorhabdus luminescens
atgaattataatttggttgagattattagagatgctgaaatggcatatccccaaaaaacagctttaattttcaacaatcagaattatacttataaagatatatggaggcaaatatgtgctattgcagcaggtatgcgactgaatggactacaacaaggagacaaagtagtaatttgtttaggaaatcatataaactctattgctatattttttgctgcacaaaaattaggtgcctgtccatctatcatagcatttgatacaccagaagaaaaaattaaatttattttaaacaacagtggagctagttttttcttcacttcttcaataattgctgcgacattactaaaatatgattatttttatttttcaaatattaatttgattattgataaagttgagaatatatatgctgaaaataatttaattaattttgatgattttatttccgatccaatttctgaagctaatattccacttcaggcaattagtgttgatttggcttctattatttatacttcaggttctactggtgaaccgaaaggggttatgttaagtcaccaaaatatgatggcagctacacggtctctggtaaattatttagaataccaccacgatgatacggtaatggcagtattaccgattgcctttgattacggactatatcagataattttagcattttttgttgggggaacagtggtgcttgagtcaaataatacgcctccaccagtagtattaaggcatattcaacaataccgttgcacaattatgcctgggctatcatcactgtatagtttacttgatatttatgctagtaaaggttcttttgatttgagttctatacgccttgtctccaatacaggtatggctttgcgtaagcagcatgtgtcaatgattaaaagactattccctacagccaaaatattttctatgtatggactaacagaatgtaaacgttgtacgtatcttcctccagatgatctagaccgcaagccagatagcgtagggattgctatcccaaatactcaaattatggtggtagatgataataatcaaccctgtacagcaggcgaaattggacagttattaattcgcggagaaaccgtaatgcaaggatattggcgcaattccgaagcaacagaaaaaagaattggcatacatcctatttatggggatcgttgtctatattctggtgactatggttggctagatgaagaggggtatttttatttcgttggtcgtatggatgaagttgcaaaaatccgtggccgcaaagtgattttcagtgaaattgaaaaagttttgtttggccatgactctattatagaagccgcagttattgtacattctggtgaagaaagctctgaagatagtattattgcttttgtggcaactcagacacaagagaaactattagaatctgatttaaaacatttttgttctaatttattagaactgcaccaaatacccagtgtttttatacaactatctcggttaccaaaaaatgcaaatggaaagtttgataaacatcaattacgtcaaaggtaccaatctataattcaggagcggttcgcatga

SEQ ID NO: 8113 - DNA, 1074 bp, Photorhabdus luminescens
atgaaacgccatcatgtgatattgacatcttgtgctattgtagcagttatttttgcgggaatttctatcaacgtggttgctgttcggggacttaatagtactgaggagaaagatagcaaaatatctgttacacaaaaaggaccacagccaatcttggttgaaacagcgcaagtcacttcaatgaattggcaagatagaaaaagtgttattgctacagttaagtcaatacgctatctctctgttcgagctgaaatatctgggaccattttgcaaattgcacctgccggagggcaggtaccaatcaatggggtattgtatcattttgacgaccgcgttgagcgttttcagcttaaggaaaaagaagctcacttagatatgacccagaaaaatactaagcgtgccgatttgctggtgaataaggcaatctcacaagctgctcaacaggctgagcacgttaacttagctcatgctgtcagtgaagtagaaaaatttaaaaatacattgcgtaaaatgatggttacagcgccatttactggagttgctagtttacatgatttgacgccaggacaattgattcaggaaggccaaacattattttctttttatgatccaaatgatttatatgttgaatttagtatccctgaaactgatattagagctctgtcacctggtgtccaaattaatgtaaatgatactgtcgctggctttactggtatagctaacattacattggtcaatactgaaataaatcctatcaacagaactctaacgttacgagctaaattggaaaaaggccattttcgtcacggcgctagcgttagggtgacttatcctgcgagtgctcctcagatgacacgagtaatacccaaagtttctgtacgttatagtgcctatgggcaatcagtatttgtagtaaaagacaatcgagtccagattcgctctattgttactggagacgataatgagggcgttgttcaagtaaagaaagggttagaaaaaggtgaattagtggtaacggccgggcaaatgcgtctatacccagatgctcctattcgtcaggaaacccaccaatga

SEQ ID NO: 8114 - DNA, 3042 bp, Photorhabdus luminescens
atgaaaattatcggcctttttttacgtcgtccaatcatagtaacaacatttagtggtttgttatttattgctggcttgttttctatagggtatctaccagtaggcctttatccaagtgtagatgcagatgcaattagtgtcagtgctttttatcctggtgcctcggcagatctaatggatgggcgtgttacgtcagaagtattatcggcagtatctggaattgatgatattaactacgttaccagcacttcagaaactgggcgtagcaaggtagtattgcatttggcaatgggtagtgatactcagaaggtattaactaatatcatggaacgagtcaataccatatctcattttcccgatgatatggaatcaccgcaaatctcccgccaagaagcggatcgagttcctgatttcgcattatcatttactagtgaaacaatgcaagctgcgcaggtatcggattttttgcaccgagttgttaaaccacgcttggaatccttaaaaggagtggggaatgtagaaatattgggtagtgaatatgcaatgagaatttggttagatccagagcgtatggaacgccacggtgtaaccgcaatagatatcagcaaaagtttaaaattggagaatgctcaagcgaatggcggtgctttacatgatagtaaattacgttttcaacttgtgccagaaacagggctttcaacaataagtgattttgctaatttatctattatgaccgcaacaaatatatctccggttcgtctaaaggatgtagctgacatagaattaggaggtagtcagccggaaattaaatctatttttaacggtaaacccgccacaatagtattgatcaactggcaacaaggtagtaatcccttgttggctgctgatgatatatataaaactataggggaattgaaatccagttttccttatgatctacagtctaacgtgcttatcgacagtagtgaatatattggtggtgcggtacatgaagtttttatcactattttacttacttgctgtgctgttaccctagtaatatttttgggagcaggaacattacgagctgttgtgatcccagttattgctattccactctctttgattggtgtgtgcttagttattcatttgtgtggtttttcaattaatacactgaccttgctagcaatggttctagccacagggctggtagtcgatgatgccataattgtgttagacattgctctacatcgaatgcgaatgggagatactccttatcaggctgcgttaaaaggagggaatgaaattgctacatctctagtcaccatgactttaactctagcaatcgtatatttaccattagcatttattggtggaattgtaggaaagctgttttctgaatttgcagtgactcttgccggagctgtcattatctctgggatattagcacttagcttaactcccgtcatgtgcgcacgtatgctatcaacaaatcatcaacattcactgatggtgatacgagtggaaaaaatgtttgctcgcctccgtcgcagctatgagcgtgttttaatccggctagtgaaaactggaaatttcccactatggttatgggcaactacgttagctggtgtaatcattttgttcattatattacctcatgcgttggctcccaaagaagatcagggaagcttaatggtaattgcagaaggccccagtgtcataggaacagactatattgagcaacatacacctatattagagaatatttatagtaccttaccggaaatagctaattttaactatgtcataggcgtaccaaaagacaaccaactactttcttttgttcgattaattaattggtctgaacgtcaacgttcaacaatacaattacaaccagaattgcagaatattatagctaaaatcccggcgttacagtcggtagtaatcctgccttcttccttgccaggtgtcggaggattacctttccaatttgtgctcaaacatgaagataaagattacgctaatctagatgcgcttagtgatctaatgctacgtgaaatgcgtgctagtggtctgtttctatttttgaaaaaagatttgaaatatgatactccgcagattcacatacgactagatcgtgaacaactggcgaaagtagggatttccgcttcagatgttggttatagtatgaatttggcatacgccaatactaaactacaacctttcatttatgaaggacggacctataacgtcatcatggccttgaaaaaaactgaacgggctgcgatacaatcactattagatctacaagtgcgaagtttagatggcaatcttatcagactaggaagtctggtgactcagaatcctgaagtaggtcctgaatctctaaatacattccaaaaacaagctgctgtgacactacaaggtgtgttagccccgggagtagggcaatcagaagcaacagagtttgctcttcagctactccacaacctcaaatcacaaggagtgtcatatgacctatcaggagaaacacgacaaagcaaagaagaaggacagcgtttactagtaacttttgctatagcattagtaggtatttattgtctattagcattacaacttactaattatctggggccactcattgttttactgggtagcattcctttttcagtactaggtgcattactagcgttatcttggtttgatgtgccacttgatatgtttacacaagttggcatgctgactctggttgggttgatcagtaagcaaggaattttaatggtgcaagctactgatagcttgcacaagaaaggtggtattagtatttactacgcaacagtgcgggcttctgcgtctcgcttacgtgcaattgttctaactacgctgactatgatattgggagccttacctcttttatttgccagcggtccagcagcagaatcccgttttgaactgggcctagtgattatcatgggaatgttagtaggttcatgcctcacccttttcctgctaccttcgctttatatctttgtacataaaaaaacgagtggagccacatcgtga

SEQ ID NO: 8115 - DNA, 948 bp, Photorhabdus luminescens
gtgagtctaataatcaatgacattggtgtttatttgccagaacagaaaattggattagaacgagttcctattgagcctcaattatctgaagatgcaatcaagatatatcagcgtttttatggattaaatcacatagctatcagtaagatatctctggaagagatgatgtatcgggcagctcaagatacgctgacacgtaatggtatagcaatagaatctattactttacttattcatgcccatactgctccagaaacttggacttatccaaataatttgctgtctaggttgaaccggcgattggggctgcgtaatgcaacttgcttctccattcattcgaataactgtgcttctaatcttaatggattgcaggtaattcaaaatcatctaattggaaacagtggtcaaggttatgcattattgctgacagctgacctaacttttagcggtattctacaacaaattcccaatactacgttgtgtggcgatgccgctacagcttgcataattagtctggggggtgatggagccaaaatgaaagccttagagattgattactatggacaacattctaaaggctcctggcaaaccgcagaagagcaagtgcgatttgaaacccactatgctggacgcctagccaatgtaatggagcgctgtttaaaacaatctaatttgtcttgggaacatatccgttgggttttcccccataatgtgaacttgatttcatggcgtgatgcaacccaaaaaatcgcgttacctctgagcaaagtttacttggataaattacctgaattaggtcactgttttggggcagatatctttatcaactggcattttgctagagatacactgcgattaggagattatgtaatggttgccactgtaggattaggggcagtattcggtgctgctatttttcaattagttaaagaggacattaaatcatga

SEQ ID NO: 8116 - DNA, 1566 bp, Photorhabdus luminescens
atgagagtttttgaacacttaggtgaatggctgcatgatagcgcactgaaatatgcagattaccaagcgttatctattaataatgatgtatatagttaccgtgagctacatgagttagcatcccttctggcccgaggtttctctctttcgcagggaaaatattgtgctttgcttggaaaaagaaacgtaggaattttcgcaggtattgtagcttcattgtgttacggtaagacttatttgccattaaacgaagaccagacacctgaaagcctgagtttattatctaaaattactgattttgatttattggtgacttgtgctgaggagcaaaagttattgcacgatttgttgaaacatatagacaaaccgttagtcataattttgtcagatagtaaacaacgccccaattggtgtaacgattacccaagacactattttctcgcgcatgctgatttagccaagattcctactgcacaaatgaagacagataatcctggtgcatatttgatgtttacatcaggtagtacaggtaatcctaaaggggttgaagttgcacatacgaatgttacacgctacgtgtccaatactatagctctgtatcaaccaacctgcgctgatcgtttttctcaaatttgtcctctgggttttgatgtttccgtccatgatttatttgttccttgggctattggagcatcgactcatgtttttgatgccaaaaacagtttaatgcttggaacgtttgttcgagataaacatctgacattttgggcatcagtgccttctattattttgtactttcagcgctcacgacaattggaacctggttcttttcctaatttacgccaatcgttgttttgtggagaacctttgttacagagcatggctaaaagctggcatatggctgcacctgcatcacatattgataatatttatggaccaacagaagcaacagttgcaatttgtggttatcgctggagtcctgagccgacagaaactaatgaattgattgttccaatcggaactccttatcctggtacaaagttaaagattggacgccagcgtcaaaacgcaggggatgtaggagaaggtgaattatggattggcggtgagcaagtggttagtggttacttatcaagtaacactatgcaggctgataatttcgaatatgatggtagttgttattggtatcgtactggagactgggttaaacgtgacaatgatgggatatttcattttttagggcgttgtgatgatcaactgaaagtcaatggtcagcgtttggagcgtttggaaattgagtcaatgctgagtaaagcagtaggggttgacgatattgcggttattggctggcctgttatagcagggaactgtgttgaaggattagtgttttttatttcttggcatgaaaaatctaatctagagctacgtaaaatatgtcaacagcttatgcccagaagtatgtggccaacaagattagtgataggggctattcctaaaaatcgtaatggaaaaacagactataagcaattaaagacaaagcttgctgaaggtagagtgtcttcttaa

SEQ ID NO: 8117 - DNA, 960 bp, Photorhabdus luminescens
atggcaataaaatggagacttattcaaatgctaaatagagtcaatgatatattgcacatcattggtagtggagtaatgcattacaattggctatcttcattaggaactatttctgctactctctggtatcctgcatatgcagggagtggtaccgtaaaacgataccgaaatatattacatgcaaaatcagaagaaagtgcgatccccatgggaacaaattggccattaatagtaatttctcatggttctggtggttcttgttttgatcaatcataccttgctgagtttttatcaacacaaggttttgctgtgttagccgtggatcatcaagatattcaggatgctcgctatcgttggatgaatttgacaaccagacctcaacgtttagtgtatgcatgtgatgcgttacttttagaggccctaggcgagagaatagacttttcgcgtccattggtgataggccattctgctggagcgtatgatgtattagtgatgtgcggttgtcagccctgttttgaactggaacccgaactttcatcagtactcaatgaactatcgtgttttgcagttgagcaatgtttagttaagggtatttgtgctgtgatcttactagccccagctttgtcaaatttgtttctcgctaatactctaaatgagatgcttttaccgactttaattttatcaggtgaaagagatactatgaagttgctaggatcaccgactgactacgcaacgcacttgccccacgttgaacatcatatcctctttggagctggtcattacgcttttgtttatgaattttctcctttattgaaagcattaaattcagtcgttagtggtggtgattatgtaccaagaaaagagttgcattataaaataatgaactatatttcagcttttataacaccatttaacacagaggaaattatatctttgccaagggaaccgattcatgcttga

SEQ ID NO: 8118 - DNA, 915 bp, Photorhabdus luminescens
atgcttgatcctattaatcactaccggcagcatactgaggtaacattagcagcatcatattcatctcagcttgatgatttacctaatgatgtggaagggttaatttctattgttcagaatttattgattcactatcagacagaaaaagataaacttaatccagatatcatttctatgcgcaatacagaaatagatagccgctgtgtttcactgatgctaaaaaaacttttgttacttgatgattcaagtttttcaaatcctcggcccccagaaaaacgtctattatctacttgtcgggatttttcggttttattatgttcctttatgcgacataaaaatattccggcaagagtccgctatggatttgcacattatcagtataacgatgaatgtccgatgcatgatcatactttagtagaatattggaatggtactagatggttatatgccgaaagtcgattaaattttttgtctaagccattattgggggctaatccatcagattttcctcgacatttattctttagtggagcagaaatatggaggcatatccgacagggaacaatgaatgagcgtattttcagtggatatcgatttgatgatggatatgggcaatggatagtacgtaatttattctttttagacttagcttcactggctggatatgaaccattgatatgggatagctggggaatattactggaggaaaatcctggagccagggtgacggatgtgcaacaactaaacttcttggatcgtatggcattgttagatccttgtttacccgatgaatgtaatgaactaattacgtcttttaataattacaatgaattgagttatcaaggaaaagttcatagttttagcccagtatccggtgcttattgtgtcgatttacatgccagatggagtaaataa

SEQ ID NO: 8119 - DNA, 939 bp, Photorhabdus luminescens
atgatgacattagagacaattactagctatgtacctcaaaagaggcttaaggttgaacgggaataccaacgcttaggtttaacccaaaatgaagcgcgggtgtttagccgtatgtatgaattaactcattgtccggtagaggaaggcagtgaagaagaaatgctgctaaaaccctgcaaggaattatttcaacaagttccccacattaagcaagaagtcgtactgctggtttatgctcatacggggactataagtagtgtatggggtcaaaatatggcttcattacttgttcggtgcctacaactacctaatgctgttgctataggaactagcagcaacaattgtgtatccatattttccgcattatctttagcaaaacattatttacaaaatgcgcttcctaacagtaaagctctgatagttgtcggggaaattgctgacagttttgaactcagaatagtacctaatgtagcggtaatcggtgatgcctccgccgccgctttgctctctctgaacggtcaaggttcaagcattcttgcacattctatacatacttacccaaaatattctcaaggtatttggttaccaactaattctgctgcttatcgagatttcacagcgaattatcaactcagattacaatctgtaattcaagatgtattacagcaggcggatattacgatggatgatatatcgtatattattccacataatgtgaatattttgatatggcgtcaagcagcaaagtttatgaatattcctatagagaagatatttcttaaaaatattagtgaaacagcacattgctttggtgccgatatgcttattaatttacatgcgttaaaaaatagtggagcattacattcaggagataacattttgctgatttctgccggagtaggtggtctatttggtgcctctttattgctttattcgtga

SEQ ID NO: 8120 - DNA, 1260 bp, Photorhabdus luminescens
atgaatatagaaaatagaataacacagaaaagtttatcgatgaaaatcgcagaaacatttgtcattaaagacgattgtttggaaataggaggaataccattaacccgactggaaactcaaataggacagactcctttttttgcctattctagaaaacatattgaccaacaagtgtgtctattacgtaaatatttacctgaaaaaattagtattcattatgcaattaaagcaaatcctttcgtaccgcttatccaccatttgtcccaaaaaattgaagggtttgatgtcgcatctgcaaatgagatggcattagctctaaatacaggcgtttctcctgaagatattagttttgcagggccgggtaaaacagatacagaattaaaaagagcaattgctgcacaggtattgttaaatgtcgaatcgttaaatgaattacggcgaattcaaatattgtctgaaaaacttggcttatgtgcacgtgtttctttacgcataaaccctgattataatcttaactcttccggcatgaagatgggaggaggaccacgccagtttggtatggatgtagtttatgtacccgaagcactaatgttcatacgtgattatccagattccctagtttttgaaggattccagatttaccctggctcacaaaatttatgcgcagaacatttgattgaagcacaaaataaggctcttaatttagtaattgagttatcacattctgctccatctccagtacgtcgctttaatctaggaggtggttttggagttccttattttcagggaaatacagaactgaatattaccgaagtgggcaatgcaatgcacaaactagtagagcgtgcagagaaatttttaccggaagtggaaattattttggaattaggccgttatttagttgcttcatctggaatttatgttactaaaattgttgaacgcaaaatttcccacgatatgacttttttagttacagatggtggaatgaatcaccatctatctgcatcaggaaatttggggcaattaataagaagaaactatcctgcaatcattggtaataaaattaaaggagagaaacgtgaaacagtgaatatagttggtccactctgtactccactagatattcttgttcatcaaggagatatgtcagtagcaactccaggggatttagtggtaatttttcaatctggtgcttatggtttaagcgcaagtccaaataatttcctaagtcaaacaaatgcagtagaagtattagtttag

SEQ ID NO: 8121 - DNA, 207 bp, Photorhabdus luminescens
atggggataaaccgtacgaaaatgacactgatcattggcttccttggtgttccctacctctacggggataaaccggacagtaacagtgatgtagtcggtagtaattggtgtgttccttgtgcccacggggtgaaccgaactgatactgttgtgttttgggtttggaagcgtgttccctgtattaacggggataaaccgaacagttag

SEQ ID NO: 8122 - DNA, 681 bp, Photorhabdus luminescens
gtgttgatgtatttgtctaaaattgtgcttcggcaatcgagtcaaacagcaaatatattagcaaaattgagtgcaaatggcgtttatacttctcatcaattgttatggaaattgttttcaacagacgaaaaacggcaatttctatttcgggaagagatcggaataatgggattacctgtattctatgttttatctaaaacctcgcctcaaactgagtcaccattgtttgaggtggaaacgaaagcattttatcctcaattgaaggaggggcagcgtttagctttcaaattgcgcgttaatccaacgatctgtattactgatccttctggaaaacgtcagcgtcatgatgtcttgatgcatgctaagtttcaggcaaaacagcaaggtgaaacggaacaggggaaaataaaagctatgatggagaatgctgcccgtaattggctgttaaaccatcgtcgtatgcagcagtggggtattcagtttgacaatttactggatattgaaggttatactcagcatcgaagtgtaaaaaagcaggggcaaaaaatacaattttccagtgtagattttcaagggcttctgacgattaccaatggtgagctatatttggaacagtatgcaaaaggctttggtcgtgctaaagcgatgggatgcggattgatgttaatcagaacagtataa

SEQ ID NO: 8123 - DNA, 747 bp, Photorhabdus luminescens
atgaaagcatatttagtcttccgattatatggcccgatggcaagttggggacaacctgcggttgggggagaaaggccaacggaattgtatcctggtcgctcggcgattttggggttattaggcgcagcgctaggtattcaacgagataatgagtctgaattagcaaaattacaaaaaagtgtgttaattgccattaagcagaccgttcccggctctttaatgcgtgattatcatacgacgcaggtgccgacgcacaataataatgtggttcatcagaaccgtaaaagtgaattaaggtcagataaacttaataccatactgtctaatcgtgattatcgttgtgatggtatttggatcgttgctattacattaactgaacacgcttgttttacgcttgaacgattccgggatgctttacttaagcccgtatttatcttgcatcttggacgtaaatcttgcccgcttgctttgcctctcagccctaaactcattacgtcatcggcattaaaaatggcattggatatctcttttccaccgctgattcattctgatagcgaagataagttatggctaggtgcaaacggtattgtgacttatttttgggagggaaataaagatgaaattatctcttcaaatattttaatcagtcatccttgggatgagccgattaaccgggggcgttggcaattccggcaacgtactatgtatcaactttctatcgaggagggtgttgatgtatttgtctaa

SEQ ID NO: 8124 - DNA, 1035 bp, Photorhabdus luminescens
atgagtcagtttattcaattacacctattaacttcctatgcgccatctaatctgaatcgtgatgatttaggccggcctaagacagcgaaaatgggcggttttgaacgtttacgtgtgagttctcaaagtttaaaacgtcactggcgtacttctgaattgtttgaacaggtgctatcagagaatattggtattcgcaccaagcgactgggtatcaaggtatttgaagcgttgatcaaggctggagtgaaagaaaaatcggctagagcattggctatgactattgctggtgtttttggcaaaacgaaaaaagatgctttagaaattgaacaattggcgcatatcagcccggaagagcaacaatctgttatgtcgttgattgcggtgctggcggaagaaaaccgggcaccaacgcctgaagagcttaatttattaaaaactaagcaaaccgcggtggatattgctttatttggtcggatgttagcttcaagtccggcatttaacgtcgaggctgcctgtcaggtcgctcatgctattagtgtacatagtgtggttattgaagatgattattttacagcggtggatgatttaaatgatggtaaggaagatacgggatcggcccatataggggaattgggttttgccgccgcgctgttttacagttatatctgcattaataaaacgcaattaataaaaaatttggatggtgatgaagccctggctaataaagcgattaaagcattaacagaagccgctgtgaaagtatcgcctgcgggtaaacaaaatagttttgcttctcgtgcttatgccagttttgctctcattgagaaaggcgagcaacaacctcgttctttatctgttgcatttttaaagcctattaatgacagcgaccagggctcatcggcaattaatgcattagaaagccaaatgcgcaatattgatctggtttacggtacttgtgccgatgaccgctataaattcaacacattcactggggaaggaactttggccgaactgcttgaatttgctgcacagtaa

SEQ ID NO: 8125 - DNA, 582 bp, Photorhabdus luminescens
atggacagtaagagtgaaatcatattattgcattggtggcaaagtatgtttatgtcaccaaaacagctaaaagagaaaggtattattccagccccttctacttatagagctcagttaaagcgctgtgacagtgttgagatggctatgttaactgaaggctttcgggctttatggctcagcttacctgatgaaattagtttgtcggataatccgataaaattggaatattgggccacgatggcggtggcattagttcatgttaaaaacaacagtgatatcaaattggcggtagcggcgggtaagaaaggaggaggaaataaaccggtggtcagtgaattaagattttcacaattacaaaatgctaaaacaccgaatgaattattacgtcgattatgtcgggttttacagcaaatcaaaggcaatatttctgttttggctttagcgcgggatattgaggagtggtttgctgaatatgagcaattacgaccatgcaaggcggataggcgtatcaaagtgaggtggggtatggattattaccgtgctgctagtggtaaatcggttgatttatcggattttcattaa

SEQ ID NO: 8126 - DNA, 1605 bp, Photorhabdus luminescens
atgaacttagttcaggacccgtggttgccctttcggttgcgtgatggcagtgaaaaagtactgcccattaatgcgatatgtgatcatgatgttatggactttgctttaccgcgagctgattttcaaggagcagcttgccaatttgccattggtttattacaaaccgtttttgcgccggaagataaatatcaatggcatgctctctatgaaacatcacctgataagaaggtattacaacaaaattttaataaagtgatacatgcttttaatgttaccggtatagggcctctttttatgcaggattttgatccgctgcaaacagtaaaatcaaccactgtagctggattgttaattgaagcaccgggagcgaatggtttaagactgaatacggatcatttcattaaacgtggcatcggagatgtgatgtctcttgaaatggcgactttggcactgtttaccttacaaattaatgcaccgtcaggaggggtgggacatcgagtcggattacgaggtgggggaccattaaccacgttagtggtgccgcaacaaaccgatgccacattatggcaaaaactgtggttaaacgttattagtcgaagtgaatggcattattcagaacctgatttaaccagtgctcaggtttttccctggttagcgccaacaaaagtgagtgttaatgaagggacagaaattcatgctacggatgtgcatcccttacatatgtattgggcaatgccgagacgtatacgtcttatagtggaaaagggtgagaatatttgcaaaatttcaggtaaatattctgagttcactgtctctgaatatcgggcacaaaactatggcggcaattataccggtaattggagccatccgttaacgccctataaatgggatcctaaaaaactaacaccacccttatcgattaaaggccaaccgggaggggtgacatataaaatttgggatgctttagtctttaccagccatgagagtggacagcgttgtgcgccggttgtaagccatttttactctttatgttgtcattttgctgaactccgaagggtaatgcctcgtctgtgggtgtttggctacgatatggataatatgaaagcacgttgttggtattctgtcactgtgccgttgttttttgtcttatttgaacaacaggaaaagattctatatcaagtcaaagagctacaaaagctggcaatcaatatgatttggctatgccggaatcaaataaaagcggcttggtttgaaaagcccgttgatgtgaaaggagacacttcctttattgacctgactttttggcaacaaagtgaatcgctatttttttctgtggtgcatcaacttatcgataatgcaaattccgatgcgccgtttctgacaccagaacaggccaaacattggctcaataccttgcgttatctctgtagagatttatttgatgaatatgttgctttatctgaattaggaaatgagcgttcaatagcgaaacgtatgaaagcgcgtcagcagttaattatcgggttatatggacaaaaagcgttaaaagagatcaaaacatttatcactaatcatcatattcactccgggaaagaggaggtgtaa

SEQ ID NO: 8127 - DNA, 2718 bp, Photorhabdus luminescens
atggaaatgccaatttattttcaatactggggtaaggcgaagcgagtcttagagattgatagtgccgattatcatctacttccttaccattgtttagatgttgctgcggtaggaatgcagttactctctttagaaagatcgttaactagagatcttgctagctttttagcgttatctacgcagcagttacgaagcatggtctcttttatattggctttgcacgatattggtaaatttgcctctgcttttcaaaaattacttcccggtttggcagtcggtctgcatcgaccagattgccccaaagagtatgatggccgttatttttgtcatgatcgtatagggttgtatttctgggaaaatatcaaagcagagttacttaatagactcgttaatattgaaggtgctgagcacagagaacagcgagagatgtttgataccttaatggtattcattgattgtgtattaggacatcacggccggccaattgataaaacaggctatagagcgattaaacattttactgaacctcataattttaatgctgccgccctctttgcacatcatttggttgaattatttcaacctgagtttcccattgaaaaattacaatccaaagagtggcgaaggcgactggaacaagtgagctggcagtttgctggtattgcaatattggcggattggattggttctgatagccattattttacgtatcaatctaaacctatgccgttaacagattattggaaacatgctcaagcaatggcaaaaaaagcggttatggcgataaatttagggagaccgccggtagtcaagccgtttatttctattcaggaatattacggttttgctgcaacaccattgcaacagtgggccgaatcaatacctgtagatgattctcctcagctatttattttagaagatgttactggagcgggtaaaacagaagcggcgcttgctcttacacatcgtttgatgcaggcaaaagccgctgatggtttttatttcggtttgcctacaatagcgtcttctaatgcaatatttagccggattgctcaacattaccagcaaatgctcttgacagaggatgacagtaaaccaaatatcgttttagctcatggtacgtgggggatgaataatcaatttcatgaacccgttttagcgttaggtcatccagatagaaacgatggtaaaacagatatcgctgcttcagcgcagtgtaatcaatggttagctgacccacgtaagcaggcactgttagcgcctgccggaatcggagcgattgatcaggctttattggctgtattaccaaggcgctatcaatcattaagattatttgggcttaatcgtaaagtattaatcgttgatgaggttcatgcggctgatgaatttatgtttaatttactggaaaatttattagcgctgcatctttatcagggcggttcagctgttttattgacagcaacattgacctttaaacagcgtcaacgtttaacggatatttggctaaatgttggcgggttgagttctcaattattgcaaaaaaatgattttcctttagcaaccaaaataagtttaaatgccatattgcccgttattgaacaaccgttatcaagccgaaaagatgttagccgggaaatcaaagttgatttcttaaatagcgttggcagttgtgttgaaaaggtattagccgccattgtacaagggcaatgtgtcgtttggatacgaaatacagtagatgatgctattgaggcttatcagacactgcgaagtttacttactgaacctgagcgttgtctgttatttcatagccagtttatattgcaacaccgaaaagagattgaagatcatgtattgactatttttgataaaaatagtcatggtgaattgcggcggggcaaagcattaattaccacacagatattccaggcgagtttagatactgatgccgatgtcatgatttcagatctttgccctattgatgatctcattcagcgagccgggcgcttgcatcgccatactcgcgatagtgatggtatttatcgatggggtattaaagattcacgtcctacacccatattgtttatccatgcgcctgaatggcgggagcaacctggatcagattggctaagccataattttcgtaacacacaatatgtttatcgctcgcctgtacgtttgtggttaaccatgcgcatattgagaaaactgggtgctatacgtatgcctgcggaaacacgccaattaattgatgcggtttatggtcatgcttatgagcaagcaccggaagtgttaaagtatcaagagaatgaattaattgatgaggagcgaagtcaggcagctaaagctaagtcttattggttacagtggcaattatatggttattgtgatcgaagtgctgatcattggtatgaggatgattcagatattaatgctcgctacagtgatattgaaactgttgaggtattattattgaaaaaaggggattcaggacaacttgtaccttgggtaaattcagccgaattttcagtgtcactgagtacgattaaattatccagaaataagtatgcggataaattagccccaattccaacaaaattaatacctgctctcaatgcattgcaacagagatattaccaagttagatatttgcaaccttggttgccagatcaagatccgaattttacttattcttcaacaataggcttttgtgaaagataa

SEQ ID NO: 8128 - DNA, 1455 bp, Photorhabdus luminescens
ttgcgccataatcgcgccatattagtggcacaaaagtggcgcgattatctgaattgcgccataatcgcgccatgttcttactgggatctgttgttcgccatgagtttaatgactgatatttatgaaactttgtgtattgcatcacaacctatgtctgtttcggatttattggtggagcatccctccgttcctagaaggactgttcaacgttggctggggcgacttgttgaaaataagaaagtacagatattgggtgaaggtcgaaatcgccgctatgttatcgctacggaggaaacatcagattcagtagcggatagatcggataatttcccgagctatattccactgtctgaagatagccaggatattcttcgttatattgatcaacccatcaaagcgaggacgcctgtcggttatcagcgagagtttctggaatcatatgagccgaatgtcacttattatctgtcggttccaattcgtaatcagctttggcgaattggagatacgaaacaaatctcacagccagcgggaacctatggtagagctatcttggatcgtttgctcattgatttatcgtgggcttcaagttatttggaaggaaacacttacagtcgattggatacggtgaagttgattgaatatggaaaaattgcggtaggaaaaaacgcgattgaaactcaaatgatcctaaaccataaagccgctattgaattacttgtcgatggtattgaggaacttgattttaatcgatataccgttctcaatttacacagtacattatctgaaaatttattatctaatcctgtctatgaaggacgtatccgtcaacatcaagttgaaataggaaaaagtgttttcagacctttatcgggtgaggcccatatcagtgaaattttggattcgttgctcgggaaagcacgagctatatcagatccatttgagcaatccttttttatgatgatccatttgccgtatttacagccttttgctgatgtcaataaacgaacttcccgcctggcagctaatttaccgttgattcgttcaaatctatgtccgttaacttttgtcgatgtaccggaagaggcatatagccgtgcaatgcttggtatttatgaaatgacccgagttgaattactacgagatctttatctatgggcttatgagcgttctgcccgagaatatttggctgtcacgcagggaataaccacaccagatccgttaagattacaatatcgaaatgtgattaagcagatcgtttatcgggtagttgccacgccagagatggattcaattgacgtgatagataaattaatttctgatgaattaagtcaatctgaacgtgacacgttaaaggcattagttattgaggaattacggcgattacatgaaggtgtgttggcaaggtatggtctccgacctttgcaatttgaaaaatggaagcgaaaacaccgatag

SEQ ID NO: 8129 - DNA, 552 bp, Photorhabdus luminescens
atgccgaaattaatttattacgtcgctacgacaatagatggttatattgctaataaaaacaatgggctggattggttatatgaatttgtgcttggggatgatgcaacaccttatgatgatttttatcgaggtattggtgctgtgattatgggagcacaaacatacgaatggataatgacaaattcaccggatgattggccatacaaaaatgttccggccttcgttctttctcatagggcgctgtcaacgcctgaagggttgaatatcatcataaccaatgaaacagtaagagttattgctgccaaggcgaagaaaatggctaatggtaaagatgtctggttagttgggggaggtaaaaccgctgcgtattttgctgaggctggtgaattacaacaaatattcttaaccacgattccggtatttttaggtgcgggcattgaggtttttcctgtgagtgaaaaagtccatgtcatacctaagacgcaacgttttttacgtagcggcgctattgaaagtttgctggatgttgatgctcctacccctaccccgtaa

SEQ ID NO: 8130 - DNA, 1032 bp, Photorhabdus luminescens
atggaaggtactttaattatttgtgttgattcgattctgagatttcgttcagattacgatacgacaatcgctgtgccgatgttatcagttcaggaacagttaggtaaaaatgatccgttctttttcttgaaatatttcagaaataaggtcctaatagaaaaaggagtaacaatatcaaatatatttctcgcgatagaaccgtggcaggctatgctaagcacttggttggaaattgatatttctgcttacattgcagagattagaaagccttctcaagaagaaccgatatttgattggatcagcattcagagaatcacgtcggttcatcgggtatatcagcgaaaagatatgaaagataatgaaaaactgtctgaatattttaatcgtgaacatacgccgacaaaatattttaatattgaatcagtttgtatggcatcgggttataggaaaggcgataaagagcattacagtatcagtgaatatatccatgaaattaaaaatattccagtcattgccagtgacaggcaaatattaattggctatgatgataataatacggatattttgaatgataaatgttttggtatatatgataatagaaatatcaaatatatacagggaacaacctcgtttgcgttttatgaattgatggaagctatttttaatgatggcttattctacaattcaccgcaaacagcttgtcatagcttagaaatgataaaagagatgttggaaattatagatcgcggaaatatgaatcacgaaaaggataataaagaatgtattcttcaacaagaaaataatagtgggaatattaatggaggtaataatgacagagaattaaatgttgagttttatgatggtgcttttgatccgctaatagaacatatagaaacagagagggagtattggaattatataaaattattatgtcattcgtatggtcatttgccagtaagaattggtacgattaatgaggctaaagttcctgaatatcgcttctataacaatattatagatgatgaaagttag

SEQ ID NO: 8131 - DNA, 510 bp, Photorhabdus luminescens
atgaaaatgaccgttaatgttttagacactcaacagatccagtggatgtacgtccacaatcatgattggttatttcgttggcttaagcatcgccttaactgcgatgaaactgccgcagacctgactcaagatacttttgttaaattacttcgttcacctttaccacagcaacttaatgaaccccgtgcctacattgtcaccattgctaaggggttgatggttaactggtatcgtcgccgctcacttgaacagtcttatctggatttactcgtcagtctgcctgaaccgcttattcccgcaccagagcaaaaacttatcatcctcgaaacacttcaggaaattgatattatgctcagccaactccccacgccagtgcaaacggtctttttactttcccagatagaaggcatgaaatacgaagatattgcaaatcagatgaatatttcgctgtccacagtaaaacgttatatgaaacaaggcttttatcaatgcctgatagcgatggcataa

SEQ ID NO: 8132 - DNA, 1014 bp, Photorhabdus luminescens
atgcctgatagcgatggcataagagggcttggtatggcttcctctgatacatcgtctttatcaagtacaccttctgaaaagatacttgccgaagccgcagaatggttgaccattttacatgatagccatgccagcgaagctgatcggaatgcctgcgctgcctggtgtgcacaaagtccagaacatgctcaagcctgggaacacgcacagtgtctgttagcacggttacaccatttaccaccgcatatcgcctcacctctgttaaataacaaacagcccctttcccgtcgagaagccatcagaaagcttacacttatgttgttaataccggctggcgcatcatcactcttttggcgatctgatcaatttcagcttctcactggcgattatcacacccaaacggggcaaatccagcactggtcattaccggataacagccaactcactttaaatacacaaagctcaacagatgttcattatgatgatacccaacggcttattagtctaaagctaggggaaatctatattgaaacccataaagataaccgccatccagctcgcccatttaaagtacaaaccaaacaaggcgttattgtggcattgggcacaaaattcagcgtccgccaacaagcctcacacgctcaggtggaaatagtagaaggagcggttcgcattacgccagataacggtttaccacacatactgcatgctggagaagcaacccatttcactcaatttaccgttgccccacaacatacccgttcaataacatctctaagctggttacaaggcatgatggtagccgataacttgccgctggcaacggtggttactgaactgaatcgctatcgttccggcatcatccgttgcgatgatgcagtagctcatctgcgggtttctggtgcttttcccctacgggatacggatctggcactgcatatgctattacaaacctatccgctctcaatacgccgcctgacccgctattggattacactcacctcacccagttaa

SEQ ID NO: 8133 - DNA, 2604 bp, Photorhabdus luminescens
atgctatatcaaaaacttactatgccatatcctgttgactgccaagattcacaaccacgttggcagaaaaagtctttagtcgcactgttattaccattaatactgctaccgactcgttccctttacgccaccacaccagcagatacactctattccgttcatattccaccaggttcattaggcaattcgttgtcccactttgcggctcaaaccgggacagcgctctccttcgatccgaatttaaccaacggactcacagcaccttcattaaacggtagtttcagcgctcatcaaggtttagtacaactgctcacaggcagtcatttacaactgtcccaacgtaccgatggcagctacacgctagtaaaaatgacaaagaagatgaccaacaaaggtgtaatcgtactaaatcctcttacggtagctggcaatcgcgggtattcaggtaatgaaccattgcggttcggcagtaccaccatcaaaggcaaagatatcgaaaaattcggcgtgatccaccccgttgatattttcaaaatcacaccgggggtattatccggcgaagcgcgtagttcaggcagcctggatgtgaatatccgaggcttgcaaggacaaggccgagtcctaaccactgttgatggcgcatctaaccagaccgcgctttaccgcggctatcagggtgtctccaaccgttcctttatcgatcccgatttcattggccgggtagatatcagtaaaggcccgacaggaaaaggcggtatgggagctattgggggaacggtggagataaaaaccattgaagccagtgatatcctcctcgatggacaaaaggcaggagtgcgcctgaaaggaagtctgttgaacaaccattctaatcctgacgattatcaacgcaatgactggccttccccatcaaaaacctctcttttcgatgctaaaaatcgcaccgggagtattgttttcgcgattgccgaaccttcctatgaattgctgtttggtgtttctcagcgcaagcggggtaattaccactctggcaaacacggaccgggcgctaaggagcgtggcatgccaggctatttgtgtgagagtgatccacaagattgccgcattccacaattcagtgaacagatggccggttattcgctgtacgcaatgggagatgccgtacctaacacttccgaagatagccagtcattactgggtaaaggaaaagttcgttttggcgatggtcatgaaatctcggctatcattagccattaccaaaatctctacggggaatcctatgtcgcggatatggcaaacctgagccaaacatttatgatcttggaacaggggccactgacacggctcaacatgaacaggcacagcctcaactataaatgggaacctgcgtcaaatccctggattaatttggatatcggagtatggcaaacacgggttaacgatcgccctcgaaccgcaaataataccctcggtgataaaaaattcatgcgcacagtcggggtgaatttgagcaacacctcattatttgatctttcaatgcaagatattgagttgaactacggtgccagctttattcgtgaacgcactggcccaagcgcaggtaaatggaaatatgccgttaatcgggaaggagaacgtaaagaaggccattttttcctgagcgggaactatatgcttgccgaccgcctgaccctaatgggcggatgggattacaaatcctatcagatcgaagatgacagtccagctcgtccgggtagctcttggttaccacaactcacttctgggaaagtcaacaataagcgagaccatgctcatggctattgggtaggcactaagcttgaacttaatcatgaaacagcactgcatgccaaatatgcctacgccccacgttttccatcaatggttgaaggtattcgtggctacatgatgaatgtagacgatcatataaaacctgaaatttcaaaaaatatcgaagtcgggctgacatcacgcttcccggatatcattgctcaaaatgatagcttcgatatcgcaatatcctactttgataaccgggtgaaggactatatcagccggtcatggatggatgattactggagtatgtacatcagtaatattaaagaggctaaatttgccggattggaattggcaagtgtttaccatagcgatcactttgatgcgcgtttatcgatgaattactacacaaaagtcaaattctgtacggaaaatgacgggtgcatcgcacgtagtctcccttcggattatgcaactaatcatattccgcctaaatatgcggtatcactcgatctgacacagcgatttttaaatgacaatgtatctgtcaacgccagagtttcccattatggacaaagatctgtaccagcaggaaaaccaagacgcggttctgctcctctgttggcacccattatttggcggcctgcaactgtagccgatatctctctgactgcccgtataaataagcatgtcgaatttgagctcggtgtggataatgtgttcgacaaatattatatccaacctcttagcctcggctatatcccttcaccgggcagaacgtttcgtgccggtatcacaacttatttttaa

SEQ ID NO: 8134 - DNA, 1014 bp, Photorhabdus luminescens; identical to SEQ ID NO: 7370

SEQ ID NO: 8135 - DNA, 1116 bp, Photorhabdus luminescens
atgaaaaaagaaccgattaaaacatcaaatccagataataccgaatcatctgatgcaaatgaggttgaaatcgaaaaccctaccatcgcggcgtctggcattgtctcagtggcgaacacctctgatggtcggatcgaggttttcggtgtaggtggcgataatgcagtgtggcgcaatgggcaaacgacacatacaggcgcttcctggaccggctggagctcactcggtggaagtgtgaccagcaaacccgccgcttatctcaattcagacggtcgattagaagtattcgtacgtggctcagataacgcgttatggcataactggcaaaccacacccaacgctagttggtcaggctggcaatctttaggcggagcgctcaccagtaaccctgcggtatatatcaacgccgatggtcggcttgaggtcttcgcccgcggcctcgataatacactctggcacatttggcaaaccgctccccactctaatccgtggtcaagctggtattctctgggccacgtgatcaccagtaacccagccgtccatatcaatgccgatggtcggcttgaagtctttgcccgcggggccgataacgcactttggcacatctggcaaaccgctccccattccggttattggtcaggctggcactctttgggtggcgttctctccagtgacccagtggtagcccgcactgtcgatggccgactagaggtttttgtgcgtgctgtcgataatgcactctggcatatctggcaaacggcccccaattctagtcagtggtctaattgggcctcattgggtggtactatcaccagcgcaccagcggtaataaaatacttcgacaatcggcttgtcgtctttgcacgtgccatcgataacgcactctggcacatctggcaaaatgatacccattccggttcatggtccaactggggctcattgggtggtggactttccagcggcccagatgtcgtggaaaacgctaatggctatattgaagtctttgtacgcgccaccgataacgcactctggaacatcaagaggacgagtccatcatcatggtcctcttgggcctccctagggggaacattaatcgacgcctcagcaatcaaataa

SEQ ID NO: 8136 - DNA, 1110 bp, Photorhabdus luminescens
atgcaacaagaatctattaatacatcaaatccagataataccgaatcatatgttaaaaaagatgaggtagaaatcgagagcactgcaaccgggttgtctgaaattgtctcagtggcaaacacctccgacggtcgactcgaagttttcggtgtaggttctgaccatgctgtgtggcacaattggcaattaacaccatactcaaactctccctggtccggctggctctcacttaatggcaacgtgaccagcaaacccgccgtttatgtcaatacagacgatcgattggaagtattcgtccgtggctccgataatgcgttatggcataactggcagattgctcccaatctcggttggtcaggctggcaatctttagggggttcaattgctagtaacccagcggtctatgtcaacaccgatggtcgactcgaagtctttgtacgtggctccgataatgcactttggcacctctctcaaactgccgctcattccaatccgtggtcaagctggcaatctttgaatggcaacatcatcggcaacccagccgtccatatcaactccgacggtcggcttgaagtctttgtacgtggctccgataacgcactttggcacatctctcaaaccgcccctgattccaacctgtggtcaaattgggagtcactcaacggctcaattagtagcgaccctgcggttattggcaccgttgatggtcgactggaagtctttgtgcgtggttccgataacgcactttggcacaattggcaaactgttccccattccggtccgtggtcaggctgggtctcgttgaacggcaatatcatcagcgcaccaactgtagcgaggaattgggacaaccggctagaagtctttgtatgcggtgccgataacgcactctggcacatctggcaaactgtttctcattccggcccgtggtcgagctgggcctcattgaacggcaatatcatcagcgcaccaactgtggcgcaagacgccgatggcctgctggaagtttttgtacttggctccgatcatgcactctggaatatcaggcaaaccacatcaccatcgtggtccccttggttatcccttaatggctccttaatcagcacttga

SEQ ID NO: 8137 - DNA, 1116 bp, Photorhabdus luminescens
atgaaaaaagaatctattaatacatcagggccagataataccaaatcatctatttcagacgaaatagaaatatccaatgaaatctcttggaccgcgttatccggcgttatctcggcggcaaataacgccgatggtcggcttgaggttttcggtgtaggcaccaacaatgctgtgtggcacaactggcaaacggtacctaataccggatcttcctggtctggctggcactcactgaatgaaggagcgaccagcaaacccgccgttcacattaactcagacggcagattggaagtattcgtacgtggcacagataatgcgttatggcataactggcagaccgtccccggtgctggttggtcaggctggcaatctttaggtggtcagatcaccagcaatccagtggtatatatcaactccgatggccgacttgaggtctttgcacgcggtgccgataatgctctctggcacatctggcaaaccgctccccatgccggtccgtggtctaattggcagtcactaaatggcgtgctcaccagtgatccaacagtatatgttaacgccagtggtcggcctgaggtctttgcacgcagcaacgattactctctctggtacatcaagcaaacggcttctcatacctatccttggacaaactggcagtcactgagtggtgtgataacgagcaatccagtggtgatcagcaactctgatggtcgacttgaggtctttgcacgcggctccgataatgctctctggcacatctggcaggtcgctcctaatgcaggttggacaaactggcggtcactgtctggtatcatcaccagcgacccggctgtgcatatcaacgccgacggtcggcttgaggtctttgcgcgcggccccgataacgctctctggcatatctggcagacggcaacatcggatgcatggtctgaatggacctctttgtctggtgtgattaccagcgctcccacagtggcgaagaattctgacggctggcttgaagtttttgcacgcggtgcgaataacgcactctgtcatattcagcaaactacatcatcgtggtccacttggacctcccttggcggtaacttaatcgacgcctcagcgataaaataa

SEQ ID NO: 8138 - DNA, 1116 bp, Photorhabdus luminescens
atgcaagaagaacctactaatataccaaggccagataatgccgagctacttgttgcaagtgaagtagcaatcgaaaacgcggcaatcgccttgtctgaaattgtttcagtggtaaacacctccgatggtcggatcgaagttttcggtgtgggcactgacaatgccgtgtggcacaacagacaaacagcaccacactcaggctcttcctggaccggctggatctcacttaatggaaaggtaaccagcaaacctgtcgtttatatcaatacagacggtcggctagaggtattcgcacgtggcaccgataatgcgctctggcatatctggcaaaccgccaccaatgctggttggtcaaactggcaatctttagggggtacaattactagtaaccccgcggtatatgtcaacaccgatggtcggatcgacgtctttgcacgtggcaccgataatgcactttggcacatctcacaaactgctgctcattccggtccgtggtctagctggcaatctttgaacggcgtgatcaccagcaacccggcggttcatatcaactccgacggccggcttgaggtctttgcgcgtggtacggataatgcactttggcacatctggcaaaccgctcctgattccaatcagtggtcaggttgggactcactcggtggtgtcatcactagcgatcctgtcgtcatcggcaccgctgacggtcggcttgaagtctttgcgcgcggttccaataacgcactctaccacatctggcaaaccgttccccatggcggcccgtggtccaactgggcttcgttgaatggcgtgattaccagtgctcctgcggtggtgaagaattccgatggtcggcttgaagttttcgcacgcggcaccaataatgcgctctaccacatctggcaaacagtttcccattccggtccgtggtctaactgggccacgttaaatggaacgatcaccagcgcgccaacggcagtggaagacgccgatggtcggcttgaagtttttgcgcgtggcaccgataacgcactctggaacatctggcaagccacaccatcgtggtccgcttgggtgtctctcaaaggcagcttaatcgacgcttcagcaatcaaataa

SEQ ID NO: 8139 - DNA, 219 bp, Photorhabdus luminescens
ttgagaaacgcagaacctgatttaatcatgtacctaaaagaggttattctgtttgcagttgttttccaggaatattcgactaatcgtctgtttcaaatagacaaaaatatgtccttgttatcaactaatatgctaattcgaattgatgccaggtttgtgtatcgaatatcagatttttaccggcaaattaagtgccactggcccgataaagcgcagtga

SEQ ID NO: 8140 - DNA, 1131 bp, Photorhabdus luminescens
atgaaaaaagaacctattaaaatgccaaatccagataataccgaagcatatgttgcaggtgaggtagcaatcgagaactctgcgatagcgttatctggaattgtctcagtagcaaacaatgccgataatcgacttgaggttttcggtgtaagcactgacagcgcagtgtggcacaattggcaaacagcaccgctcccaaactcctcttgggccggctggaacaagtttaacggagtagtaaccagcaaacccgccgttcatcgtaattcagacggtcgattggaagtattcgtgcgtagtacggataatgcactctggcacaactggcagaccgccgctgataccaatacctggtcaagctggcagccactgtatggaggtataaccagcaaccctgaggtatgtctcaactctgacggccgacttgaggtctttgctcgcggcacggataacgcgctatggcacatctggcaaaccgcagcccataccaattcgtggtcaaactggaaatctctgggtggcacgctcaccagtaacccggctgcacatatcaacgccgatggtcggattgaagtctttgctcgcggtgccgataatgccctttggcacatttggcaaacggctgctcacactgatcaatggtcaaattggcagtcactgaaaagtgtaatcactagcgacccagtggtcatcggcaactgcgatggtcggctcgaagtctttgctcgcggtgctgataacacactccgacacatttcacagatcggctctgattccgtttcatggtcaaactggcaatgcttggatggtgtgatcactagcgccccagcggcggtgaagaatatctctggccggcttgaggtctttgctcgcggcgctgataacacgctctggcgcacctggcaaacttcccaaaacggcccgtggtctaactggagctcatttaccggcattattgccagtgccccaacggtagcgaagaattcagacggccggattgaggtctttgtgcttggccttgataaggcactctggcatctctggcaaactacttcatcaaccacatcatcgtggaccacctgggctcttatcggtggtatcaccttgatcgacgcttctgtgatcaaataa

SEQ ID NO: 8141 - DNA, 180 bp, Photorhabdus luminescens
atgtataactcaggtctggaaacttctttatatgaggtgatctttgaaaaagccgctaaaggatattcagaatcattgttgaactttatttcattggcctgtgatataaatgaagacgtttatagtgcttttgccacacatgatgagaaaaagaacattgatgttgtgaataacccataa

SEQ ID NO: 8142 - DNA, 255 bp, Photorhabdus luminescens
atgataacaactcaaaacgactggcacccagcagatattattgctgaattgcgtaaacgtggcacaacacttgccgcattatcacgggaatcgggactgaattcatcgacgttatcaaatgcattaattcgcccatggcctaaaggagaaaagattattgcggacaagctcggaatagatcctttagttatttggcccagtcgatattttgataaaaatggaaatcccattaagcgaaattttcataaacgatga

SEQ ID NO: 8143 - DNA, 1287 bp, Photorhabdus luminescens
atgaaacagaatacgagtggttttttagaacgaatgggtatacccagcacattatcatggggatatttgggtattttggcatttatgattggtaatggaatagaaataggctggctaagcccttatctggtagataatggattaagtatccaggacatttccacactatttagtatttatggtataagtgtagctatatcttcttggtttgctggcgtattttttgaggcatttggggctaaacgaaccatgctattaggcacaattttttgtgttgttggcaccacaggtttcgtcagcctaggcttaaaagaaatatcatatccacttttgttgatagcgcaagccattaaaggtttcggatatccgctatttgcctactcattttcagtgtggattgcctatagaagttctgttgttaaactcagtacagcatatggatggttttactttgttttttcaggtggaatgcaagtattagctactttttatgcgagttgggcagtagaagaattaggtcatattaatacgttatggacaacactgatatttattattgttggagctttttttgctctagttctcaatcgcgataacattaaacctcaaagtaacaataatactcttggaaatataaaggaggttttgaagggaataactattcttaaggaacatccaaaactatttatttcttgtatccttcgaatcataaattcactttctcaatacgcgtttcctgtttatttaccggtatatatgatttctcaggggtttactacaactcagtggctaagcatttggggaactgcttttacgagtaatattctatttaatttggtctggggtatagcaggagacaaaataggttataaaaggacgattatttggtgtggcggggtcctgactggcgttgcttcattgcttctgttttttgcaccacaatttgttggagcaaattatgccatagtactcatatgtgggatttgctggggagcgggtgtcgcaggttatatcccattggatgcgatgtccgctaatatggtagaaaaagacaaaggggctgtcatgtcagtactgaatttagggacgggtttatctgtggtgattggccctgccattgttggtttatttataaatagcctgggatcaagtggcgtcacttgcatcgttgctacgctttattttttcggtgctttgattactaattttttggatgaacctgagagagtttctaaaaccattattcaacccgacgctattacaatgaataagtttccaaactcataa

SEQ ID NO: 8144 - DNA, 384 bp, Photorhabdus luminescens
atgggaacaacaggaaaaatgctgttggaagggattaatcggtatgaaagcccttatttgaacagcatcaaagaatgtacggatattattgatacgttagatagggaaaacacaggggttttagctgatttcttccacatgtcaatagaagaatcaaacatttcagaaagcattaaatatgctggagacgctattaaacatgtccatttaggtgacaataaccgtctgcttcctggccatggaaccattgactggcaggcaggttttaatgcgttaaaagaggttggatataatggttttctcaatttggaatgtagtacctgtggagatccacctaaaacattgcccgagactgcaatatttttaaagaaaatgttgaattag

SEQ ID NO: 8145 - DNA, 306 bp, Photorhabdus luminescens
ttgtacaaatggggttacggtggcattgcgctatttatgaattattgccaatggaacgaagagttacatgaagaaattctgaatttaagggaaaacacgggcattattccgtgtgaatttgcctttaccgatgagatttacggacatttaatgagtgacaatatcgatctcagaaaaaagagccgagacgagaaatgtataagcgagtggccgaaatcagtggtgaaattggcgcggtcactgagctggaatttacatacggcacacagaatcctctgctgttgtttcatccctataagaaaatga

SEQ ID NO: 8146 - DNA, 153 bp, Photorhabdus luminescens
gtgttgttaatgagtgtactgcctgtagtggcgacagagagctgttgtgcattgaaaggtgggacggcgattaatttgtttgtacgtgattttccccgtttgccggtaaaaatctcatattcgatatacaaacctggcatcgattcgaattag

SEQ ID NO: 8147 - DNA, 243 bp, Photorhabdus luminescens
ttggttaaccttagcccgcgcaaagtagaaatactccttcattccagtcatgcgatccaaactaatcgtttatatctttttttgaccgactattattcccacgaatgggctaagcgcattgataaaactaaaattgctttaggagcagggaagcgtcaagtcgtgttagggggaaagttggataaacagtatcagattacggttccggaaaagtatttgaataatggattatttcatggataa

SEQ ID NO: 8148 - DNA, 2556 bp, Photorhabdus luminescens
atgattaatacagaaaccttcgacacccacacgcccatgatgcagcaatatctccgtcttaaagcacagcatcctgatatcctgctgttttacagaatgggggatttctatgagctattttatgacgatgccaaaaaggctgcaaaattgctggatatttccctgaccaaacgaggtcaatccgctggcaatcctatccctatggcaggcgtgccacatcatgcagtagaaaactatttagctaagctggttcaattaggtgaatcagtcgctatctgtgagcaaattggcgatcctgccaccagcaaaggcccggttgaacgtaaagtcgttcgcatcgttactcccggtaccgtgacagatgaagcgctattacaggaacggcaagataatctgctggcggctatttggcacgataatcaaggctttggttatgccacactggatgtgacatctggccgcttccaaatatctgaaatgatagagctggaaacgatagccgctgaattgcaacgtagccgtcctgttgaattactctatcctgaaagttttgagcatatggcgctaattgaaaattttcatggcctgcgccgtcgccctttatgggaatttgagctagataccgcaaaacagcaattgaacctgcaatttggtacccgtgatctcgtcggttttggtgtggataaagcaactctcgctctgcgtgccgcgggttgcctgttgcaatacgtcaaagatactcaacgcacggcgctgccacatatccgtggtattacgatggagcgtcagcaagatacagttattatggatgccgcaacccgtcgtaatctggaactgacacaaaacctgtctggcagtacagataatactctcgcttctgttcttgatctgtgtgttaccccaatgggtagccgaatgttgaaacgttggttgcatgcgcctgtcagggaccgccagatattagaaaatcgtcaacaagctattgctaccttgcaggaaattgggctggagttgcagccatttttgctacagataggtgatcttgaacgtgtgctagcacgcttggctctacgttctgctcgtccaagggatctggcaagaatgcgccatgcattccagcaattaccggatatccatcaagttatggactcctcagattccccttatatcaagcaattgcagaaaaatatcggcaggtttgatgaattacaggaattgcttgaaaaagcgattgtagaaacacctccggtattaattcgggatggtggcgtaatcgcaccgggttataacagtgagctggatgagtggcgcacactggctgatggtgccagtaactatctggaacaactggaaatccgcgaacgagaaaagctgggccttgatactctaaaagtcggctttaatggtgttcatggctactatattcaagtcagccgagggcagagccatctggtgccaattcactatgtccgccgccagacactgaaaaatgctgagcgttatatcatccccgagttaaaagaatatgaagataaggttctgacctctaaagggaaatctctggcaatagagaaagcgctttacgaagaattattcgatctactgctgcctcatttggccgaattacaaaccagtgccgaagcactggctgaacttgatgtattggcaaatctggcagaacgcgctgaaaccctgaattatatttgcccaacattgagtgataaaccgggaattcaaatcactggtggtcgtcatccggttgttgagcaagttctgcgtgaaccatttatctcaaacccactctctttatcttcacagcggcgtctgctaattattaccggtccaaacatgggcggtaaaagtacctatatgcgtcaggcggcacttattacacttctggcctatatcggtagctttgtaccggctgaaaaagcagtcatcggcccagttgatcgtatatttacccgtgtaggtgcctccgatgatctggcatccggccgttcaaccttcatggtggaaatgaccgaaaccgccaatatcttgcacaatgcgacagaacaaagtttggtattgatggatgagattggccgaggcacatcaacctacgatggcctttctctggcatgggcatgtgcagaaaatctggcaaaccgcattaaagcaatgaccttgtttgccactcactattttgaactgaccacgttgccggaaaaacttgaaggcgtggtcaatattcatctggatgcggtagagcatggagataccatcgcatttatgcacagcgtacaagagggtgcagccagtaagagttacgggttggcagttgcttccctcgccggcgttccacgtgaagtgattaaacgggcgcgccagaaacttaaagagctggaatcgctatccaaccatgcaacggcaagtcatgtcgatacaccgcagcttgcgctattaacagaggaaacatcaccggcggttgaagcattagaaaatcttaatccagattcactgactccgcgtcaagcattagaatggatttatcgactaaaagatatggtgtaa

SEQ ID NO: 8149 - DNA, 762 bp, Photorhabdus luminescens
gtgtttgacaaaaaccttttacaaccgatataccattttttgcaatgtgaaaccccgaatttgtgggtagataaagcaaagcagcctgaaaatttacctgtgcttctacgggatcatctattatgcgaactgaaagcagcacagagcgctatgtttttgatccgaaagtatgcagtagatcagcgaagtgaggatacacttctggcatggtttaaaccttatgaagattttgcttacaagaaaattggcgatctcaattcactaagaggtcaaaaccaagcgaccaaacagatcaccgccaaagctaattcactctatagccaggatctgattgataaaatggtattgctgattaaagaagagttacatcacttctatcaagtgctagaaatcatggacgcacgcgatatcaactatgaaagcattactgccagccgttatgctaaaggcatgcttaaccatatcatcaaccatgaaccttatacattggtcgataaactgattatcggcgcttatattgaggcgcgttcttgtgaacgcttcgccaaattggcccctcatttggatgaagatctgagtaaattttatatctcgctgctgcgctctgaagcacgtcactaccaagactatctttcactagcgcaatctattgctaatgaagatattaccgaacgggtaaactattttggccgtgttgaagctgaattgattcaaaatccagatagcgattttaaatttcacagtggcattcctgtaatttga

SEQ ID NO: 8150 - DNA, 1026 bp, Photorhabdus luminescens; identical to SEQ ID NO: 6127

SEQ ID NO: 8151 - DNA, 999 bp, Photorhabdus luminescens
atgagccaaaatacgctgaaagttaacgagttgtatgatgatgcggatttagatgaaagtggtattgaagctgacgacttcgatgagaaattattgaagaacgatggggatgatctaactgattttgagaatgatttagatgtattgcagggcatgagccagcgggttcttgatgcaacacagctttatctcggcgaaattggtttttctcctttgctgacggcggaagaagaggtttttttcgcaaggcgggcattacgtggtgatgttctggcccgccagagaatgatcgaaagcaacttgcgattggttgtcaaaatttctcgtcgttatagtaatagaggcttagctcttcttgatttgattgaagaaggtaatcttggccttattcgtgctgttgaaaaatttgacccggagcgcgggttcaggttttctacctatgcaacatggtggattcggcaaaccattgaacgggcgattatgaatcaaacccgtactattcggttgccaatccatattgttaaagagctcaacgtctacttgcgtacagcaagagaacttgcccataaattggatcatgaacctagcccggaagagatagcagagcaactggataaaccagttgatgacgtaagccgtatgttgcgattgaatgaacgtatcatttcggttgatacccccattagcggtgattctgataaagccctattggatgttttatcggatgagaatgaaaccgggccggagggaacaacacaagaagacgatatgaaaaagagtatcgtcaaatggctgtttgagttgaattcgaagcaacgtgaagtattagcgcgtcgttttggtcttttgggatatgaggctgaaacgctggaagatgtgggcaaagagattggtttgacaagggaaagagtgcgtcagatccaggtcgaaggtttgcgacgtctgaaagatattatgcaaactcaaggtttgaatattgaagcgttattccgtacttaa

SEQ ID NO: 8152 - DNA, 996 bp, Photorhabdus luminescens
atgaattcgggaagcccaatgaaaaaaatacagcggattgtaacgtgtttattgatgggagtctggttagtcggctgtacaaatacaccaactcgccctgcacctatcactagtattgatcaaaaacaaaacagcgggagtcgttatccggtaatatcttccggcaattctgctgtatctacgccaatgccatcttcaccttcgtcaatgggtgcggctgatagcaatttgcaggggagaatcgtttataaccgtgattatgacagtattcctaaaggtagctataacggcaatacttatacagtcaaacatggtgatactctgttctatattgcttggatcacagggagtgattttcgtgatcttgcgagcaaaaataatatttcagaaccttacagtttgacggtggggcagactttgaggaccggtagtagcgggatgttaaccacttataaccataatcaaattcaaacaaccctggttgattctcaatcaactaatgcgtatcctgcaaattccgggaagcaaaagagtgtaaaaatgttgccaagggcaactacgtcaacagtaagcaatacgtatttagaatcaccgacgacaaccgcaagcagcggaaacagcgctgtcagcagttggatgtggccggctgaaggtaaaatgattgagagtttctctgatacccaagggggtaacaaagggattgatatcgcaggtagcaggggccagtcagtatttgcaacagcaggtggtcgagttgtctacgccggaaacgccttacgtggatatggaaatctaataattataaaacataacgatgactacctgagtgcctatgctcataacgatacaatgctggttcgtgagcaacaggacatcaaggcggggcaaaaaattgccactatgggtagcacgggtaccagttctgtaagattacactttgaaattcgttacaagggaaaatccgtaaacccgctgcgttatcttccgcagcgataa

SEQ ID NO: 8153 - DNA, 627 bp, Photorhabdus luminescens
atgctgagtcgggcaatgaaaaatttgctgacacaattacgccagcagggaatagaagatgaacgtttactggccgccatttctgctgtgcctagagaacgttttgtcgatgaagcactggcacataaagcgtatgaaaatacggctttgcctattggttatgggcaaacgatttctcagccttatattgttgcccgtatgactgaactgcttcaattaacaccagatgctaagattttggaaattggtaccggctctggttatcagacagcaatattagcgcatttggtcaaacatgttttctcggtagaacggatcaagggcttacagtggcaggctaaacggcggttgaaacagctcgatttgcataatgtttcaacccgacatggagatggttggcaaggatggccgtcgcgtgggttatttgatgctattattgtgaccgcagcgcctccgtatatcccacaagaattgatgcttcagcttactgatggtggagtgatggttttgcccgttggcgagcatacacaaattcttaaatccgtgaaacgtcatggcaatggttttcatagtgaagtgatcgaagctgtgcgctttgtgcctcttgtgcaaggggaactggcttaa

SEQ ID NO: 8154 - DNA, 765 bp, Photorhabdus luminescens
atgttacgaatattgttgagtaatgatgatggtgtaactgcaccagggattcaggttttagcagcagcattgcgagaaaattatcatgtgcaggttgttgcacctgatcgtaatcggagtggtgcatctaacgcattgacccttgatcgttcattaagtgttaatacgctggagaatggtgacatttcggtattgggtggtacaccaacagattgtgtctatctcggtgttaatcggctggttcttccgcgtcctgagatcgttgtttctggtattaatcgcggccccaaccttggcgatgatgtaatttattccggaacggttgcggcggcaatggaaggccgccatctggggttgccggcattggctatttcactgaatggtgaattgcattaccaaacagcggcagaaatcacctgtcgtttgctacaaatgctacaaacaacgccgttgagggcgggtaatattttaaatgtgaatgttcctgatctgccacttgagcacattaaaggttttcgggtaacacgttgtggtagccgccatgccgcggaagaagtttattctatgcaagatccgaaaggcaacatgctttactggttggggccaccgggagataaacatgatgctggccctgaaacagattttgcggcggtggaacagggatatgtctctattacgccattacaggtagatctgactgcgtataaagcgcaggcgttagtaagagattggttagctaaagctgaggttgatggagaatgctga

SEQ ID NO: 8155 - DNA, 1053 bp, Photorhabdus luminescens
ttgatggtattggctgaattaaattggctgtatgggcaaccagaagcgacggggatattaaaggcttcgccggaagattttattgtctgtgaagatttgggattttctccagatggagaaggtgagcacttaatggtgcatattcgtaaaacgggttgtaatacccaatttgttgcagatagccttgctcgtttcgctggtataccgtctagatcggtcagttatgctggcttaaaagaccgtcatgccgtgacagaacagtggttttgtttgcacttaccgggcaaacaggaacctgattttgcctcgtttcagcttgagggatgtgaaattctgacgacagcccgtcagaaacgtaaactacgcattggcgcattgaaaggaaactcatttacgctgattttgcgggaaatcagtcatcaccaattggttgaaaacagattacggctgattcagcaaggtggcgtgcctaactattttggtgaacagcgttttggtcgggatgggcagaatctgattcaagcgcagcgttgggcgaataatgaaatccgagtaaaagagagaagtaaacgcagtttttatctgtcagcgagtcgtagtgctatgtttaatgcggtagccagtgcgcggattgctctgaaacagcaacaacaggtaataaagggtgacgccctacaattaacagggcgtggtagttggtttgttgctgacgaaactgaattgcctttattgcaacagcgggtgatcgatggagaattacaaataactgcaccgctgcctggtgacggtgaattgggaacacagcaccaagctgcggattttgaacgacaatatttgcagccttatgaatcgttgtgggaacttatcaagcgtgaaagggtggagggttgccgtagggcgattctggtgcagcctcagaatctgagttggcaatggcaagataatgacacggtgaaaatcagtttctggttacccgctggcagttttgctaccagtgtggtcagggaaattatcaatcaggatcaaaataatgttacgaatattgttgagtaa

SEQ ID NO: 8156 - DNA, 474 bp, Photorhabdus luminescens
atgaggatcggacacggtttcgatgtacataaatttggtggtgaagggccgattattatcggcggtgttcgtattccttatgaacaagggttgttggcgcattccgatggtgatgttgctctccatgcggcaacggacgctttgttaggtgctgcggcattgggcgatatcgggaaattattcccagacactgatccggcgtttaaaggggtggatagccgtaaattattgcgcgaagcctactcacgtatcagagaaaagggctatcggattggcaatctggatattacgattatcgctcaagcacctaaaatgttgccgcatatcccacaaatgagagtcaatctggcagaagatctgcaatgtcacattgatgatatcaatgttaaagccacaactaccgagaaattgggatttgttgggcgtaaagaaggtattgcttgcgaagcggttgctttgctggttaaggaataa

SEQ ID NO: 8157 - DNA, 732 bp, Photorhabdus luminescens
atgaacaatctattacttcgttccagtgctgatattattgctttggtaccagcagcgggtattggtagccgaatgaattcggattgcccaaagcaatacttgtctattgctggaaagactattattgagcacaccttgtctgcattacttgatcatcctcgtattcggcatgttgtgattgttttaaatcccacggacacacagtttcaatctcttgaggttgtatcagattcgcgtattactacggtaaccggtggtgaacagcgagcagattctgtgctggctggtttaaatcatctggctcatgtgactggcaatgataattgttgggttttagtgcatgatgctgcccgcccttgtttacaccatgacgatcttgaccgtttgttacaattagcagaagccgatgaacagggaaatatggcatgcggtggtattctggcatcgccggtccgcgatacgatgaaacgcggacgggttggtcagattattgaccatacagtagaacggcaagatctctggcacgcactgacaccgcagtttttcccattgatgttactaagggattgtttatcaaaagcactttctcaacacgctaatattacagatgaagcttccgcactggaatattgtggttatcaaccggtgttggttaacgggcgttcggataatataaaagtcacgtgccctgaggatttggcattggcagaattttatctgtctagaaaataa

SEQ ID NO: 8158 - DNA, 321 bp, Photorhabdus luminescens
atgggtaaactgacgctactattactggttttacttggatggctacagtactcactgtggctgggtaaaaacggcattcatgattatgtgcgagttaagaatgatgttgcgatgcaagagcgtaataacagcaaacttaaagcgcgtaacgatcagttatcggcggaaattgatgatcttacgggtggacaggaagccatcgaagagcgatcccgtagtgaattgggtatgatcaaaccgggtgaaactttctatcgtttaatcattgataaatctaaagaaaacacttcgcgtccctcgactccaaataatactcaataa

SEQ ID NO: 8159 - DNA, 633 bp, Photorhabdus luminescens
ttggctgacattgaaaatctgccattagaaaatgttgtctggcatccacatcaactgaccagagcgcagcgggaggttgaaaatggacatcctgcattggttatttggttcactggtttatcgggttcagggaaatccactgtggctggggccttagagcaggccctgtttcaacggggaataaaaacttatttgcttgatggcgataacttgcgtcacggcctttgtcgtgatttgggtttttccgaacaggataggcaggaaaatatccgccgtgtgggtgaagttgccagtttgatggtcgatgcgggtttagtcgtgctgacggcttttatctccccttataaagcagagcggaaaaaggttcgtgaactgttggaaccggggcaatttattgaagtttttgtcgatacaccactggaaatttgtgaatcccgtgatccgaaaggattgtacaaaaaagcccgtgctggtgaaattcgtcatttcacggggattgattcagtctatgaggttcccgatagcccggagatttatcttccaggccagcaatccgttgaaacctccgtgactcagttgctggtggaattgaaaaagagcggcattatacgctcaaggattcatcacggataa

SEQ ID NO: 8160 - DNA, 1386 bp, Photorhabdus luminescens
gtggaagcttatctgcacgctcaacaagagaaaggattactgcgtttcctgacgtgtggcagcgtggatgatggcaaaagtactctgattggacgcttgttacatgatacccgtcagatctacgaagatcagctttcaacattgcagaatgacagtaaacgtatcggtacccagggtgaaaaattagatctggctttattggtggatggtcttgctgcggagcgcgagcagggtatcaccattgatgtggcttatcgctatttttccacagaaaaacgtaaatttatcattgctgatacgccgggacatgagcagtacacccgtaatatggcaacgggggcatcgacctgtgatctctctattctgttgattgatgcgcgtaaaggtgttcaggagcagacccgtcgtcacagttttatcagtacattgttaggtattcgccatttggtggtcgcggtgaataaaatggatctgatggaatatcgtcaggaggtttttaatcagatcaaacaggattatatgaatttcgctggccaattgccgacaaatttggacgttcattttgtcccaatctcggcacttgatggcgataatatcgtcactataagtcgtaatatggattggtatgaagggccaacgttgttggatatccttgaaacagttgatgtaaagaaggaagcctcgaagcagttactgcgtttcccggtacagtatgttagccggcctgatctcgattttcgtggttacagtggcacactttcatctgggattttacgtaaagggcagaaagttaaagtcatgccatcgggtatctgctcacaggtggagcggattgtgacttttgatggtgatttggattttgctgttccgggtgaagccattacggtggtgctgaaagacgaaattgatatcagtcgaggtgatctgctgatttctgccgatgatgagatgatggttacccggcatgcactggtggatgtggtatggatgtctgaacagcctttggtgcaggggcagaaccttgatattaaagtggcgggtaaaaagagccgtgggaaagttgagaacattcaatatcaagtggatattactcacctgacacaacgggtggctgttgatttaccattaaatgccatcggatcggtggaattttcttttgaagagccattaatgctcgatagctatcagcaaaatagcgacactggcggcattatcttggtcgatcgactgactaatgtcactgttggtgcagggttggtacgtgaaattcagacagacgtttatgaagggccaaaagaattcagcgaatttgaactggaattgaatcggttgattcgtcgtcatttccctcattggggagccagagatttactgggaggtaaataa

SEQ ID NO: 8161 - DNA, 909 bp, Photorhabdus luminescens
atggatgagaaaagattgacacacttgcagcaacttgaagctgaaagtattcatattatacgggaagtggccgccgagtttgaaaacccggtgatgctttactctatcggtaaagattcttcggtcatgcttcatcttgcacgcaaggcgttctatccgggaacattgccatttcctttgctgcatgtggacacgggatggaaatttcgtgaaatgtacgaatttcgtgatcgtactgcgaagaattacggctttgaactgttggtgcatcgtaacctgcaaggggaagcaatgggaattaatccatttgtgcatggtagtgccaaacatactgacatcatgaaaacggaagggttaaagcaggcactggataaatatggttttgatgctgctttcggcggcgctcgtcgtgatgaggagaaatcgcgggctaaggagcggatctattctttccgagatcgctcacatcgttgggaccctaaaaaccagcgtcctgaattgtggcgcaattacaacggccagattaacaaaggtgaaagtattcgcgtattcccattgtctaattggactgaattggatgtctggcaatatatctatttggagcaaattgatattgttcctctttattttgccaaattacgtccggtattggagcgtgaggggacgctgattatggttgatgacaatcggatcgatctgaaaccgggcgaggttatcagccagcgcaaagttcgtttccgtactctcggttgttggccgctgacgggtgcagtgaaatctgatgctgaaacattgccggaaattattgaagagatgctgatatcgacgacaagtgaacggcaagggcggctgattgatagtgatcaatctgcttctatggaactgaaaaaacgtcaaggttatttctaa

SEQ ID NO: 8162 - DNA, 1413 bp, Photorhabdus luminescens
gtggattacttaccgatatttgttgagctgaaagggcggcttgtattacttgtcggtggtggagaggtggccgcacgtaaggcgactctactactacgggcaggtgcattattacaggttgtcgcgcctgaattgtgctctgaattacaacagcgttatcaagctggtgagttggaatggtatcagggagagttccaacctgaatatcttgatggcatctttttagttattgctgcgactgatgatcgtattctaaatcatcaggttttttctgaagctgataagcgcagtattttggtcaatgtcgttgatgatcaagttcattgctcatttatttttccatcaattattgaccgttctccggttttggtggcgatctcatcagcgggaaaagcgccggtattagcgcgtttaatccgggagaaactggaggcattactaccttccagtcttggtacgatggcaaaaatcgccgggaagtggcgtgagcgagtaaaacagcgattaacttccatgcgccagcgtcgttctttttgggaacaggctttcaatggtcgtttcgctatgttggttgcaaacggtcaaatccagcaggcggaaaaacagcttgagcaacaactagaacagtctgatttgcagggagaactggctctggttggggctggtcctggtgatccgggattactgacgctaaagggattgcaggttattcagcaggctgatgtggtgctttatgatcatctggtcagcagtgatgtactggatttgattcgccgtgatgcagataaaatttgcgttggcaaaagagcgggtaatcactctgtttctcaggaggagactaaccgattgatagtgaaatttgccagacaggggaaaaaagtcgttcgtcttaaaggcggtgatccctttatttttggccgtggtggtgaggaattacaggttgcagcatcagcaggcattccttttcaggttgtaccgggaattactgccgccatcggagcgacggcttacgcgggtattcctttgactcacagggaacactcacagagtatcacttttattacaggtcattgccgagaaaaggggaatgagctggattggccggctttagccagaggtcatcagactctggtgatttatatggggacggtcaaagccgccttgataagtcatcaattaattttacatgggcgagcggaagatacaccggtagccgtcattggttgtggtactcgtttagagcagcaagtgttaaccggcactttgcttgaactggaacagttagcacagcaggccccgtcgccggccttactagtggtgggagaggtggctcaacttcaccatcagatagcttggtttgggcagcaatctattgccaagataagccgtccggcagtagtcgattttgcataa

SEQ ID NO: 8163 - DNA, 276 bp, Photorhabdus luminescens
atgaaagaacaggtttcaatgctcaggaagaggcaaaaaaatacgttggagcagatatttaaaatgcctgttcctgcgggaattaagtggtctgacgtggaatcactcataatcgctctgggaggtgaggttaaagaggggaaaggttcacgttgcaggctgttgctaaacgatagtattgccagatttcaccgtccacatccctcaccagatactgacaaaggggccgtcgtcagcctacgagaatggttagaaagcataggagttgagccatga

SEQ ID NO: 8164 - DNA, 357 bp, Photorhabdus luminescens
atgaagatgacagtacaaaatacaatggtaatagccggacagcaggctattattagctacgtgccagaaattggcatgttcaggggtaaatttttagggctgtctggttattgtgattttatctctgatagtattcaggggttgcaagatgagggtaaaatatctctacatgaatatcttgaagattgtaacgcatcaggtattgaaccttatgcaaggcaagaaaaaatcaaaacatttactctgcgctaccccgaatcatttggagagcgattgcattgcgcagcagccgagcatcagatttcggtgaatgcgttcatcattgaaactttaaatgaacgaatgaaacacgcgtaa

SEQ ID NO: 8165 - DNA, 735 bp, Photorhabdus luminescens
atgagccaattcagcttatctcaatgtgttagtatgactgctgaacaacaagagcaatcactggctgagattaatcttcggcttgaaatgatggatgctcaccagagagtaaactgggcattggaaaatttgccaggggagtttgttctttcctccagttttggtattcaggcggcggtatgtcttcatttagtgacacaagaatatcctgatattccggtcatacttactgataccggttatctattccctgaaacttatcaattcatagataaactcacaacgcaactgaaactgaatttgcaagtattcagtgctgagcattccccggcctggcaggaagctcgctatgggaaattgtgggagcaaggcgtagagggaatagagcgttacaatcagattaataaggttgaaccaatgaatcgggctttgaaaaatctgagagcacaaagttggtttgctggtttacgccgtcagcaatctgaaagtcgatcaaaattaccggttttagctgtacagcggggagtatttaagattttgccgattatcgactgggataaccggcgtgtgcatcaatatctgacaaaacatggcttggaatatcatccattatgggaacagggttatctctctgttggtgacatccatacaactcaaaaatgggaaccgggcatgagtgaagaacaaacccgtttttttggcttgaagcgagaatgtgggttacatgagaattaa

SEQ ID NO: 8166 - DNA, 1731 bp, Photorhabdus luminescens
atgaacgataaacaacatggtccttttattgtcgaaggtaaactggctgacagtgagcgtatgaagcaggagagtaattttctgcgaggtacgattagtgaagatttaactaatggcttgacgggaggttttgaaggggacaatttcctgttgattcgttttcatggcatgtatcagcaggatgatcgtgatatccgtgctgaacgcgctgagcaaaaactggagccacgtcatgcaataatgttgcgctgccgtctgccgggtggcgtgattacgccacagcaatggttgggcattgataagtttgctgaagagaataccctttatggcagtatccggttgactaaccgccagacatttcaatttcatggcattttaaaagggaaagtaaaacttgcgcatcaattgctgaatcaagttgggctggattcgctcgcgacggcgaatgacgttaatcgcaatgtgctttgtacctcgaatcctattcaatcagagctacatcagcaagcttacgaatgggcgaagaaaatctcagaacatttactgccacgtacccgtgcttatgctgaactctggttggataaagaaaaagtcgcaacgaccgatgaagagccgattcttggctcgacttatttgccgcgtaaattcaaaaccacggtagttattcctccacagaatgatgttgatctgcatgccaacgatctgaattttattgctattgcagaaggtagcaagttggttggttttaacgtgttggtgggtggtggtttggcgatgactcacggtgataaaaatacctatccaagtatggcgagtgagtttggttatatcccgcttgagcatacgttggcaattgcggaagctgtggtgacaactcagcgtgattggggtaaccggactgagcgtaaaaatgccaaaaccaaatatacgttggagcgggttggtgttgagacttttaaagcagaggtagagagacgcgctggcgtgaaatttgaggcaatccgaccttatgaatttactggtcgtggtgatcaaattggctggctgaaaggtatcgatgataaatggcatttgacactgtttattgagaatggtcgccttttggactaccccggcaagccgctgaaaagcggtgttgctgaaattgccaaaatacataaaggggattttcgcctgacggccaatcagaacttaatcattgctggtattcctgaaagtgagaaacaacgcattgaaactatcgcctgtcggcatggattgattgacgataaaaccacagttcagcgtaaaaactcaatggcctgtgtctctttcccaacttgcccattggcaatggctgaggctgaacgttttttaccggagtttgtcactcatgttgaacaattgatgaataaacacggtattggtgatgaacatattgttttgcgggtgacgggttgtccgaatggttgtgctagagcgatgttggcggaggtagggctagttggcaaagcgcttgatcgttataaccttcatcttggtggtaatcggattggtacccgtattccacgcatgtataaagaaaatatcagctcacaagcgattttatccatcatggatgaacttattgggcgttgggcgacaggtcggcagccaaatgaaggttttggtgatttcctgatccgcacggatattatcaagccggtactggattcagcccgcgatttttacgattggcaggaggcggtatga

SEQ ID NO: 8167 - DNA, 1803 bp, Photorhabdus luminescens
atgagcataaaaccaccttcaatttcacttcttccggtttcacctgaacagctagtgcgtttgcaatcggagattggggatttttcaccaactcaattagcctggttgtctggttatttttggggaatggtgaatcaacaaccacaggttcaggctgtggttccggcggttccggcacaggagacgattacattaatttcagcttcacaaaccggtaatgctcgtcgtttagctgagcagctccgtgaggatttgttggcacagaaactcaatgtcaatctattcaatgccggtgattataaattcaaacaaattgctcaagaaaagatactgataattattgcttctacccaaggtgaaggagaacctgctgaggaagcggttgcattgtataaatatctctattctaaaaaggtgccgaagctgaatgatacggtatttgcggtttttggtctgggtgatacctcttatgagcgattttgccaggctggaaaagatttcgataatcgtctgaatgaattaggcgctcaacggcttctggagcgtgtagatggtgatgtcgaatatcagcaggttgcggatcagtggcgtaaacaattaactggaatcctgaaacagcgtattccaactgagacaggaactgagattacttctgcacaggacagatcggtaaatgaagttttttcaacttcttatactaaacaggcaccattgactgcggctttagctacttgccagaaaataacgggtcgtggttctgataaagatgttcgccatattgaaattgatctgggtgattcaggtttgcgttatcagccaggtgatgctttgggtgtttggtttgaaaatgatccggagctggtggatgaagtgttgaatttgctctggttgcagggaacagaacaagttgaggttaatggtcagaaattgtcattgagagaagcgctgatcagccatgttgagctaacccaaaataccagtgtgattgtggaaaaatacgccgttctcgcgaaagatgaaaaattactttctttgattgctgataaacaagcattacaacaatacgctcacaacaagccgattgccgatatgataagggaagcggcttctcaaccagaggcgcagcaatttattgatttgctacggcctttgacaccaagactttattcaatttcttcttctcaggcagaaatggaaaatgaagttcatcttacagttggtgtggttcgttatgaaattgacggacgggcccgcactggcggtgcatccggctatctggcagatcgcttacaggaaaatagtgatattcgtatttttattgagcataacgataattttcgtctgcctgccgatccacgcacgcctgtcatcatgattgggccgggaaccggaattgcaccatttcgggcatttatgcagcaaagggaagctgatggcgctgaagggaaaaattggctgttctttggtaatccacattttactgaagattttctctatcaagtggagtggcagcgttatgtcaaagatggcctgttaacccgtattgatctggcatggtcccgtgatcagcagcataaaatttatgtccaagacaaactgcgtgagcagggtgaagcggtatggtgctggattaaggaaggtgcacatctgtatgtgtgtggtgatgcaaaccgcatggcaaaagatgtggaacatgcgttattggatattattgctgagcatggcggcatggataccgaacaggcagatgaattcttaagtgaactgcgctttgagcgccgttatcagagggatgtgtactaa

SEQ ID NO: 8168 - DNA, 363 bp, Photorhabdus luminescens
atgagcacaacgatttttaaagattttcagtttgaagctgcccaccgtctgccacatgtcccagaaggccataaatgcggtcgcctgcatggacactcatttatagtacgactggaaattaccggggaggtcgatcctcatagtggctggattatggactttgccgatttaaaagccctattcaagcctgtttgggaacagctagatcaccattacctgaacgatatccctggactggaaaatccaaccagcgaagtattggcaacctggatttggcataaagttaaaccaatagttccacaactcagtgccgttatggtgaaggaaacctgtactgcgggatgtattttccgcggcaaatga

SEQ ID NO: 8169 - DNA, 672 bp, Photorhabdus luminescens
atgttttacccgattaacgaaatattccagacattgcagggagaaggtttttttaccggcgtcccggcaatttttattcgtctacaagggtgtccggttggttgtagctggtgtgatactaaacacacttgggagaaagaagtggaaaagcaacggacattggaaacaattttgctgaagacgagtgaaagcaatgaatggagtaaagcttctcctaagcaaattacagcgctgtttgttcaacagaaatataccgcacgccacgttgttattactggtggtgagccttgtctctatgatcttattcctctgaccgaagagttagaaagtcttggctaccaatgccagatagaaaccagtggtacgtatcatgttaaatgttctgctgctacttgggtgacggtttcaccaaaagttaacatgcgtggtggttaccggatattgcagcaggctttgcagagagctaatgaaataaaatatccagttgcgagggaaagggatattgaagcattggatgagttattagcgacattaaatgacaactcatcacgtattattgcattgcaaccgattagccagaaagaagaagctacccgtttatgtattgaaacctgtattgcccgtaattggcgattttctatgcaaacacataaatatttgaatatcgcctga

SEQ ID NO: 8170 - DNA, 1386 bp, Photorhabdus luminescens
atgcagaataatgaaactcagctgaaacggggtctaaccgggcggcacatccgctttatggcattaggctccgcaataggcacagggctgttctatggctccgcagctgctattcagcaagctggacccgccgtattactcgcctatttaatcggcggtgctgccgtatttatggtgatgcgtgcattaggtgaaatggctgttcaccatccagtagccggttctttttcacactatgccagccattacctcggacctttagccggatttctaaccggatggaattatatattcgaaatgctgatcgtctgcctggctgacgttactgcatttggtttttatatgaagctctggttcccccatgtggagcaatggatctgggtactaagcattgtctgctttattggcgcaattaatctttgtcatgtgaagattttcggtgaaatggaattctggctttcgattgtgaaagtcaccgcaattatcgctatgattatcggtggcatgattatcatgatctatggattcggccaagaaacagatcatgcaaccggcattgccagtttgtgggaatatggcggttttatgcctaatggcatcagtggtgtgatagcgtcactcgctattgtgatgtttgcttttggtggtattgaagtcattggtattactgccagtgagaccaaaaaccccgagaaaacaattccaaaagcaatcaacgctgtccctttccgtattctgctgttctatgtactgactctgtttattttaatgtgtatttatccgtggaatcagatcggtcaagaaggtagcccattcgtacagattttttctagcttgggtatcaattctgctgccaacattctcaatattgtagtgattactgccgcaatttcagcaatcaatagcgatatttttggtgctggtcgtatgatgtacggcatggcccaagaaggacaagcgcctaaatcattcaccaagctgagccgtaatggcgtaccctggatgactgtaatcgttatgtcagcagttctcttaattggcgttatactcaactatatgattccggaagaaattttcgttatcattgcctctatcgcgacatttgctactgtatgggtatggttaatgatcctactttctcaggttgctatgcgccgcaaaatgagcaaagaagaagttaagaccttgaaattccccgtacctatgtggccaatagcgccagcattaaccattatctttatggtatttgttattgtattactgggctatttcgagaaaacccgcattgcattaattgtgggaatcacatgggtaatcttattatcaatcacctacttctttagcaaaaagaaaaatatttctcaaatccatcagataaataaataa

SEQ ID NO: 8171 - DNA, 783 bp, Photorhabdus luminescens
gtggtaaaaaaaacctatgcgataagatatgttgctggacaacctgttgaacgtgtctttcctatgtcgactcatcagcttgggaatacattacctgtaggtactcctttgatcactggtacaaatgagcttagggttgttgtatggaatatctataaacagcagcgtccttcatggcgaaaggttctgaaagagctgactaacgaaagccagttgattttattacaagaagcgcagacaactcctgatttagttgaatttgctacctcaaattacctaatatctgatcaagttcccgcatttctattaccacaacacccctctggtgtaatgacgttagcaacttctcatcctgtctattgttgcccattgagagagaaagagcctcttttacgtttatctaagtccgctctcatcactgtttatcttttacaagataatcgtcagttaatggttattaatgtgcatgcgataaatttcagttttggtgtggatgtgtatagccgccagttgaataatattggtgttcatgttcgtttacataatggcccagtcattatggctggtgattttaatgcatggagtaagcaacgattaaatgctttaaaacgttttaccagatatttacaccttgaagaagtatcttttactgatgactatcgaacaatcgcatttggtagacctttagattttattttttaccgagagttgaatatcgctaatgctattgtgatacctactgatgcctccgatcataatcctcttgttgtgaatttttattaa

SEQ ID NO: 8172 - DNA, 567 bp, Photorhabdus luminescens
gtgacacaaggtattcctgccgtatttttggatcgtgacggaacaataaatatcgatcatggttatgtacatgaaatagatgattttcaatttatcgatggtgtcattgaagccatgattgaattgaaaaagatggggtatgcactggtattagtcacaaaccagtcaggtattgcccgtggaattttcgatgaagagcagtttttgcaactgacggaatggatggattggtcgctagcagaccgtggtgtggatttggatggcatttattattgccctcatcacccagatgcaactgaagagcaatataagaagagttgtgactgccgtaaaccgcagccgggtatgttactggatgcgcagagggagctgagtatcgatatgacggcttcttttatgattggtgacaaactcgaagatatgcaagccgcgacgttggcaaaaattggcactaaagtattagttcgcacaggtaaacccgttaacactgaagctgaacaagcggctaatttgataataaatagtcttgcagacttacctaaagcaattaaaggcatcaaaaaatag

SEQ ID NO: 8173 - DNA, 1032 bp, Photorhabdus luminescens
atgataaaactgtttcatatcaataaaatattccagcagggtgcccgttctattaacgcgctttcagatatcagcctgcatgttccgcaagggcaaatttacggtgttattggctcatccggcgcaggtaaaagtacactaattcgctgtgtaaatatgcttgagcgcccaacttccgggcaagtattggttaatggtcaggatttaactatcttgtctgatagtgatttaactcgtgcacgtcgtcgtatcggcatgattttccaacacttcaatttgctctcttcaagaacagtgttcggcaacatagctttgcctttggaattggataacattccaaaagccgaaatcaaaaaacgggtagatgagctattggagcttgttggtcttacagataagcatgatgcctatccagcaaatctctctggcggacagaagcaacgtgttgctattgcccgtgctctagctaattcacctaaagtacttttatgtgatgaagcaaccagcgctctagatcctgcaacaactcgttctattctagaattattgaaagatattaatcgccgtttggggctaactattctgttaattacacatgaaatggatgtcgtcaaacgtatttgtgaccaagtagccgttatcagtggcgggcaactgattgaacaagacattgttagtgaagtattctctcatcccaagacacctatcgctcaggcatttattcagtcaactttgcatctggatatccctgaagattatgtacaaaaaatgcaaagccacccagcaccaaatcttagtccattattgaaattagagttcaccggtcagtctgtagatgctccactgatttcaatggcagtacgtcgttttaatattgatatgaatatattaagttctcaaatcgactatgccggtggcgtaaaatttggtgtgatgttagctgaattacacggtgaaaatggtggcgttgagtcaacgattaagtttttacaagatcatcatgtgaaagtagaggttctcggttatgtctga

SEQ ID NO: 8174 - DNA, 654 bp, Photorhabdus luminescens
atgtctgaaggaatgatgttattactggctaaaggcgtctgggaaactctagtaatgacttttgtttctggtttctttggcttcattatcgggctgccgataggtgtattgttatatgtcacccgtcccaatcaaattatggaaaatagtaaactctatcgttttctttcagcggtagttaatattttccgttctatcccatttattattttactggtgtggatgattccttttaccagactaattgtgggaacatcgatcggtttacaagctgccattgtcccattaaccataggtgctgcaccatttattgctcgtatggtggaaaatgctttattagaaattccatcgggactcattgaagctgctagagcaatgggagcatccccattccagattataaagaaaattctgttacctgaagcattacctggtttgctcaatgcagccacaattaccctcataactttagtcggttattctgcaatgggaggtgcggtaggtgcaggcggattaggccagattggttaccaatacggatatatcggctataatgcaacagtaatgaataccgtattagtgttactggttattttagtttatttaattcaattaagtggtgaccatttagtcaaggccacaacacgtaaataa

SEQ ID NO: 8175 - DNA, 816 bp, Photorhabdus luminescens
atgtctgttaaattaaaaaccatcgcaactatcagcgctcttttaggttcattaattctgtctggctgcgggcaggaaaaacaagatccaaaccatattaaagtaggcgttatcgttggtgcagagcaggaagtggctgaaattgcaaaaaaagtcgctaaagataaatatggtcttgatgtagaactggtaacctttaatgattttgtattgccaaacgaagctctgagcaaaggcgatattgatctgaatgcataccagcacaaaccctatatggatcagcaaatcaaagatcgtggttataagatggtcaccgttggcaactcttttgtttatccaattgcgggttattccaaaaaaattaagtccttggatgaattgcaggatggttcccaaattgcgttaccaaacgatccaacgaacttaggccgttctttattactgttacagaaacaaggtttaattaaattgaaagatggcataggcttattaccaacggttctagacgttgttgaaaatcctaagaatttaaaactagtcgaattggaagcaccacaattgccacgttcactggatgatcaaaaaattgctctcgccatcattaatacaacctatgcaagccagattggtctgactccagcaaaagatggtttatttgttgaagataaaaattctccatatgtaaacctactggttagtcgagaagataataaagatgctgaaaacgttaagaaattcgttaaggcatatcaatcagacgaagttgatgaagctgccaataagatctttaatggtggtgcagtgaaaggttggtaa

SEQ ID NO: 8176 - DNA, 399 bp, Photorhabdus luminescens
atgcgtaggctacttgcctctttattagcactgtccataacaggatgttcagtacaacaagcaacatttcctgacgcttcccagttatcagatatgaagtacacaaaactatcaaccggagaaaaaaaacatttctcttcatccgtaaagttatataccaaaagtgaagaattattaggtgtctcatttaaagatttagggattgtttctggtcaatcgtgtcgtagttccttacaggatccacccgcaaatatcatcgtggctcgcaaccagatgatgaccaaagcagcttatttgaatgctaacgctgttttattgcatcaatgcgaaatattatcaggccaaggatgctaccagatagcaatatgtgaaggttcagccttgcttatcacccaatga

SEQ ID NO: 8177 - DNA, 708 bp, Photorhabdus luminescens
atgaccgatttccatttcacgcagataggggttatccactccccttataaagaaaaatttgccgttccccgccaacccggtcttattgaagatggtggtgggaaactggtacttcttcctccctataatcaaccggatgcagttcgtggtctggaacaatttagtcatctgtgggttattttcatcttccatcaaacaatagaaggcggctggaagccaatggtgcgtcctcctcgtttaggtggcaatgcaaaaatgggcgtattcgcaacccgttcgacttttcggcctaatccaattggcatgtctctgattgaacttaaaggaatcgaatacaggaaaggtcgagttattctggaactgggtagcctggatttagttgatggtacgccggttatcgatattaagccttatctgcctttcgctgaatgtcagccacatgcaatggcgggttttgcgcagcaagctccttctaccaatatggaagtggtattttcgcctgccgctgagcaacagctaatctcaattcaaaatatttatccgaatttacgccgttttatcagtcaagttttagcccaagatcctcgtccagcttaccggagaagagaacaggaaaatcgggaatatgctgctcatttactggattttaatgtacgctggaaaatctgtggcacattgaccgaagtagtctccatagatccccattaa

SEQ ID NO: 8178 - DNA, 1719 bp, Photorhabdus luminescens
atgcgtactagccaatatctgctctctacattaaaagagactcctgccgatgcggaggttgtcagccataagctgatgctgcgtgcgggcatgatccgtaagctcgcttcaggtctgtacaattggatgcctacaggtatccgtgtactcaaaaaagtcgaaaaaattgttcgagaagagatgaacaataccggagcgattgaaatatctatgcccgtcgtacaaccggcagatctatggcaagaaagtggccgctgggaacaatatggtccagagttactgcgttttgttgaccgaggtgatcgtccttttgtactaggcccaactcatgaagaggtcatcactgatctgatccgcaatgaagtcagctcatataagcagttaccactgactctattccagatccagactaaatttcgcgatgaagttcgccctcgttttggcgtgatgcgctcccgtgaattcctaatgaaagatgcttactctttccatgctacccagacatcattacaagaaacttacgacaacatgtacgaagcctacagcaaaatttttacccgtataggtttggattttcgtgctgttctggctgataccggttccatcggtggtagtgcttctcatgaatttcaggttctggcagccagtggagaagatgatatcgtcttctccactgaatccaactacgcagccaatattgaattagccgaagctgttgcccccgctcatgatcgcgcagtaccaacagaagatatgcatctggtagataccccaaacgcaaaaacaattgctgaactggttgagcaattcaatctaccaattgagaaaacagttaaaaccctgatggttcacgcagcagaaggaacaagtcataaattgatcgccttactggttcgcggcgaccatgaacttaatgaaatcaaggcagagaaattatctttagttgccagcccactgactttcgctaccgaagaagagattcgctcaattgttggtgcaggcccgggttcattgggacctgtcaatctgccaatacctgctattattgaccgcagtgtggcagtgatgagtgactttggcgcaggtgccaatatcaatgacaaacactatttcggtattaactgggagcgtgatctaccagtaccagaggttgctgatatccgtaatgttgttgaaggtgatgccagcccggatggtaaaggtacattgctcatcaaacgtggtattgaagtgggccatatcttccagcttggcaccaaatattctgatgccatgaaagcgacggttcaaggcgaagacggccacaatcagatagtcactatgggctgttatggtattggcgtcactcgtattgtcgccgcagcgattgaacaaaatcacgatgaccgcggtatcatctggcctgatgcaattgcaccattccaagttgctattttgccaatgaatatgcacaagtcataccgtgttaaagaagttgcagagaaactgtatgccgatctacgcgctagcggtattgatgttatttttgatgatcgcaaggaacgcccaggcgtgatgtttgccgatatggagcttatcggtgtaccacacactgtcgttattggtgaccgtaatcttgataatggcgaagtagaatataaacatcgtcgcaatgatgaaaaacagatgctgaaactagacaatgttgttgattacctgaagcaacaacttggttgttaa

SEQ ID NO: 8179 - DNA, 672 bp, Photorhabdus luminescens
gtgaataaaaaacttttgacagcgttagttgctgtgggcgtatctgctttgatgggatgtaaaggtaactcagcacagcaaatgagttcacagccagtagatcagacttttcatggtgctcttccttgtgctgattgttctggtattgataccacactgttattggataatgacggtacttatattctggaacaaacttatattggcgctcgtgatggtgaccagtcgttctttgaatccggtctatgggcgaaagatggagagaaaattcgcctgacaaaatcagacgaccagaaatcttattatctgtcgaaaggtgaaaacctggtaatgctggatattgaaggcaataaaattgaatcatcattcaattatgaactgcaacgggtaaaaccgaagaaattggcgggtgaatacagttatatggctgatgctgctttgtttacagattgtagtacgggtaagcggtatgctgtaacggaaagtctggatttggagcaaggctatcaccaagtcggtgtggaaggtggaacgccggtttatgttgaagttgaaggctattacagcgtccgtccttcaatggaagatgggcaatttgatcctgccttgattcagacaggtaaaatccatttcgataaatcgaaatcttgtaatatgaagaaacaattctag

SEQ ID NO: 8180 - DNA, 267 bp, Photorhabdus luminescens
atgtctataaatactgaatatcaaccaattaactgtgacgactacgacaatcttgagtcaacttgccaacatcagctccacctccacataaagttgcggggtggggaagttattgaaggaaaagcctgtgatttggttttaagaaaaaaagttgaatacttgatcattgaaacagaaggtaaaccttgtgaattgcggttagatcatattgctagtttcagtcaccctaagattggcactattattattgaaccctctgaatcttga

SEQ ID NO: 8181 - DNA, 1329 bp, Photorhabdus luminescens
atggcaaacattgatgagagactatttgtcaccttggctaaacagcttggtgaatataagaaaatcctggttggattcagtggtgggctagattcctctgttttgcttcatttattggttaattggcgtaatcaacataatcagaaaattcaactaagggcaatacatattcaccacggtttaaacctaaaagcagatcagtggattgaacattgtcagctgatctgtgatgactggcaagtggagtttcattctgcaagagtaacgatagatgctcgtcaaaaggggattgaggctgctgctcgtgatgctcgatatcaggtattcaagagcgaattacaaaaagatgaagttttggtaacagctcaacatcttgatgatcaggcggagacttttttactggcattaaagcgaggtagtggtccggcaggtcttgcttctatgccttcaatcgctgtatttgctgatacattattgttacgtccgttacttgactatagccggaatgaattggaaaagtatgccagtaaacatcgtctgaattggattgaagacgatagtaatcaagatgatcgttatgacagaaattttctgcgcttacatatcatgccgttactaaatcaacgttggtcgcatttccctaaagctgctgctcgtagtgcaagtttatgtggtgaacaagagcagcttctagatgagttactgaatgagtctttgaaagagttgataacccaagatggtgctttgggtattgtgtctttggctgtatgttcagaagctaaacgaaatgctttgttacgccgttggtttggttaccatgggatgaaaatgccttcacgagagcagcttaaccggctttggtatgaggtagctctggctcgtactgatgcggagcctcggctacaatttggtaaatatgatgtacgccgttataagcaaaaactctggttggttcctcagtggcaatctttgagagagactattcttgagtgggatatttgcaatactttggtattaccggatcgcttaggagaattgaatattgctgaccgcggtattcaagtaagggtcccggctgataatgaacgagtgactattcgctttggtgtccagggaatgataagtattgtggggcgtcaacactcccggcatagtaaaaaattgtggcaagagcttggggttgctccatggcttagagagcgaattccattgctttattacaacgaacaattgatagcggcgttaggtgtttttgtcaccaaggaaagtgaagcggcagaaggaaggaagatgttaacaatgaactggcataaaacgctgttaaaataa

SEQ ID NO: 8182 - DNA, 960 bp, Photorhabdus luminescens
atgagtctgaattttcttgaatttgaacagccgattgccgagctggaagcgaaaattgattcgctaaccgcagttagccgtcaaggtgaaaaattagatataaatctggatgaagaagtacaacgtttgcgggaaaaaagtctggaattgactcgcaaaatcttttcagatttaggtgcctggcaaattgctcagcttgctcgtcacccacgtcgtccttatacgttggactatattcagcatatttttactgattttgaagagcttgctggtgatcgtgcttatgctgatgacaaagcaattgtgggtggtctggctcgtattgatggacgtccagtgatggtgattggtcaccaaaaaggccgtgaaaccaaagaaaaaattcgccgtaatttcggtatgccagcgccagaaggttatcgtaaagctttgcgcctgatggaaatggcagagcgttttaaactgccaattattactttcattgatactcctggtgcatatcctggggttggtgcagaagaacgtggtcaatctgaggcgatagctcgcaacttgcgtgaaatgtcccgcctgtctgtgcctgttatttgtactgtgattggtgaaggtggctctggtggtgcattggcgattggtgttggtgataaagtgaatatgctgcaatatagtacttattctgttatctccccagaaggttgtgcctcaattttgtggaaaagcgcggaaaaagcacctttggcggcagaagctatggggatcactgctcctcgtttgaaagagttggagttggtcgatactgtgatttcagagccattaggtggtgctcatcgtgactatgaagcaatatccacgtcgttgaaagctcagttgttgattgacctggcagagcttgatcatttgacatctgaagaattagtcaaccgccgatatcagcgcttgatgcaatatggttattgctga

SEQ ID NO: 8183 - DNA, 3483 bp, Photorhabdus luminescens
atggccgaaccccgttttgtgcacttacgtgttcacagcgactattcaatgattgatggcttagccaaaaccagccctttagtgaaaaaggttgcgcaattaggtatgccggcttttgcgatcactgattttactaatttgtgtgggctggtgagattttacggcagtgctcatggagcaggaataaaaccgattattggtgctgatttttatgtagaaagtgaactgcttggtgatgagcacgctagcttgaccattcttgcgcgcaataatacgggttaccataacctgacattgctgatatcagaggcttatcagaagggatatggtgcgattggtccgacaattaaacaggaatggctgataaaccataaagaagggctaattctgctctccggtggtcgtatgggggatgtgggtaagttcttgttgcgtggtaatcaggctatggtggaccaatgccttgagttttatcaggaacattttcccggctgttattatttggagctgatccgtactggccgtgcagatgaagaaagttatcttcatgcggcggtggcattggcaacggaaaaaagcctgcctgttgttgcaactaatgacgtttgtttcattgatggcgaagatttcgatgctcatgagattcgcgtagcgattcatgatggctataccttggctgatcctaaacgtccgaaaaattacagccctcagcaatatctgcgtagtgagcaggaaatgtgtgagctattcgctgatattcctgaagcgctggaaaacagtgtagaaattgctaagcgctgtaatgtcactattcgccttggtgaatatttcctgccgcaattccctacgggagaaatgagtaccgaagattatctgataaatagatctcaacaagggttggaagaacgtttagcatttctctacccggatcctaaagtacgcgcagaaaaacgtcctgaatatgatgagagactcgatattgaacttcgggttatcaaccaaatgggattcccgggctacttcctgatcgtgatggaattcattcagtggtcgaaagacaacggtgttcctgttggtccgggacgtggttcgggagcaggttctctggtggcttatgccctaaaaataaccgatctcgatcctttggaatttgatctgctctttgaacgattccttaaccctgaacgtgtttccatgcccgattttgacgtcgatttttgtatggaaaaacgcgatctagtgattgatcatgtggctgatatgtatggtcgtaatgccgtatctcagatcattacattcggtacaatggcagcgaaagcagtaattcgggatgttggccgcgtgctagggcatccatacggatttgttgataggatttccaaattgataccgcttgatcccggtatgacgttggagaaagcatttgccgctgagccacaacttcctgaaatctatgaagcggatgaggaagttaaagcactgatagatatggcgcgtaaattggaaggtgtcactcgtaatgcagggaaacatgcgggtggggtggttatcgccccaacgaagatcaccgatttttcgcctctctattgtgacccggaaggtttgaacccggttactcagtttgataaaaatgatgtggaatatgcagggttggtgaaatttgacttcctcgggctgagaacactgaccattatcaactgggcattggagatgatcaacgcgcgtagaacgaagaaaggtctagagccgattgatattgcagcgattccgctgaacgatgctaaaagctttgatatgttgcaacgcgctgaaacaacagcagtatttcagctggaatcccgtggtatgaaggatctgattaaacgtctgcgtcccgattgcttcgaagatatgatcgcgcttgtcgctttattccgtccaggtcccttgcagtcaggcatggtggataacttcattgaccgcaaacatggccgggaagagctctcatacccagatatacagtggcagcacgaatctctacagcctgtgttggagccaacttacggcatcatcctttatcaagaacaagtgatgcagattgctcaggtgctggcgggatatactctcggtggtgcagatatgctccgacgggcgatgggtaagaaaaagccggaggagatggctaagcagcgttctgtttttgaagacggtgcaaagaaactgggtattaatggcgaactggcaatgaaaatctttgacctggtagagaagtttgccggttatggatttaataaatctcactctgctgcgtatgccttggtttcttatcagactttatggctgaaagcgcattacccggctgaattcatggctgcggtaatgactgcggatatggataatacagaaaaagtcgttgggttgattgatgaatgctggcgcatggggctgaaaatcttaccacctgatattaatagtggtttgtatcatttccacgttaatgatgatggggagatcgtatatggaatcggcgcaattaaaggggtaggtgaagggccgattgaagcgatcatcgaagctcgtcagaaagatggttattttagagaactgtttgatttatgtgcccgtgttgacaccaagaagttaaatcgccgagtgatggaaaaactgatcatgtcaggggcatttgaccgtttagggccgcaccgtgcagcactgatgtcttcgttggaagatgcgctaaaagcggcagatcaacatgctaaagcagaagctactggtcagactgatatgtttggtgtattagctgaagcgccagaagaagtggaacgctcttatgccaatatttctcaatggccggaacagattgttcttgatggtgaacgggaaacgctaggtctctatttaactgggcatcctatcacccgttatttaaaagaaattgagcgttatactagtggattgcggttaaaagatgtgaatccaaccccacgcggtcaagtaacaactgtgataggtttggtgctggcatccaaagtgattataaccaaacgaggtaaccggattggtatttgtactttagatgatcgttcaggacgtctagaagttatgttattttccgatgccttggagaaatatcggcatttgctagaacaagaccggatattaatcgctacaggtcaggtcagctttgatgatttcaatggcggtcttaaaatgacagcccgtgaattaatggatattagtgaagcgcgtgaaaaatatgcgcgtgggcttgctatctcgctgtcagacaggcaaattgatgatcaattgttgagccgtcttcgtagtgcattggaaccacatcgttcgggaacgataccggttcatctttattaccagagggaagacgcccgcgcccgtttaagatttggcgcgacgtggagggtaacgccaacggataaccttctgacagatttgcgaactctgctgggtaatgagcaggtagaattagaatttgactaa

SEQ ID NO: 8184 - DNA, 591 bp, Photorhabdus luminescens
atggaatttatatatcctcaggcaagtctgattgctggagttgatgaagttggtcgaggtccgttagtgggtgcagttgtgactgcggctgttattttagatccattgcagccgatagttggtttggctgattctaaaaaacttagtgaaaaacgccgcgaggcactgtatctggaaattacagaaaaagcattgtgctggagtttggggcgtgcagaaccggcagaaattgaccaattgaatatcctgcatgcaactatgcttgcgatgcaaagggctgtggctaatttgcctatttctcctgaatatgtgctgattgatggtaaccgttgccctaaattacctatgccggcacaagcggtgataaaaggcgatggactggttgctgaaatcagtgccgcttctattgtggcgaaagttaccagagatcgggaaatggctgaacttgatcagctgtttcctgaatatggatttgctaagcataaaggctacccgacggcatttcatttagaaaagttggttcagttgggagcgacagaacatcatcgtaaaagttttgcgccggttaagagagcaattggccttaaataa

SEQ ID NO: 8185 - DNA, 1170 bp, Photorhabdus luminescens
ttggctaccatttcttctattgatagtctgcgtccgttgactattggattaatcgccggagaaacttccggtgatatccttggagcaggtttaattcgtgcattaaaagctaaagtacctaatgcccgttttgttggtgtagcaggccctcttatgcaggctgaaggttgtgaagcttggtatgagatggaagagctagcagtaatggggattgtcgaagttctcggacgtttgcctcgtttgttgaaaatacgtaaggatctgacaacccgtttcacggaactaaagcctgatgtgtttgtgggcatcgatgcgccggatttcaatattacattagaaggtcggttaaaacagcgaggcatccgcaccattcattatgttagtccgtcggtatgggcttggcgtcagaaacgcgttttcaaaattggtaaagccacagatatggttctggctttcttaccttttgaaaaagcgttttacgataaatttaatgttccgtgccggtttattggacataccatggcggatgctatgccattgcaacccaataaagcgacggcacgtgagctattaggtattctgccagagtctgtttgcttggctttattgccggggagtcgccattctgaggttgagatgctgagtgcggattttcttaaaactgctcagttattgaagcgaaacatacctgatctgcatgtatttgtgccgttggtgaatgctaaacggcgtgaacaatttgagcgcattaagcaagaagttgcgccagagctgaatgttcatcttgtcgatggcaaagcgagagaaattatgatcgcaagtgatgccgcacttttggcctctggtactgctgctctggaatgtatgctggcaaagtgtccaatggtagttggttatcggatgaagccattgactttttggctggcaaaacgcctggtaaaaacgccttatgtttcattgcctaacttattatccggtgaagagttagttaaagaattattgcaggaaaaatgtcagccgcaaaaacttgcagatgagttgttgccgttactacaaggcagtgaaaaagttggagcattgaaacagacatttttacatttgcataaaagcattcgttgtaatgctgacgaacaggcagcacaagccgtgttggaattggcagggaaataa

SEQ ID NO: 8186 - DNA, 789 bp, Photorhabdus luminescens
atgattgatgaaaccgcttatatacatcctagcgctattgtagaagatggtgcggttattggtgccaatgttcgtattgggccgttttgttgtattggctctcaggttgaaattggtgaaggtacagagctgaagtctcatgttgttgtcaatggaataaccaaaatcggccgtgataatcagatttttcagtttgcttctattggtgaaatgaatcaggacctgaaatatcacggtgaaccaacccgagttgaaattggtgatcgtaaccgtatccgcgaaagtgtcaccattcatcgtggcactgtgcagggtggcggtgtaacgaaaatcggtaatgataatttgttgatggttaatgcccatattgctcatgactgtattgtcggtgaccgttgtgtcattgctaataatggtactttgggggggcatgttatcttgggtgattatgtcatcattggtggtatgagtgcgattcatcagttttgtcagattggctctcatgctatggtgggcgggtgttccggtgtggtacaggatattccgccatacgttattgctcaggggaatcatgcaacaccttttggcactaatgtcgaaggcttgaaacgccgtggttttgataaagattcattgaatgtaattagaaatgcgtacaagattttgtatcgtaatggaaaaacgttagaagaagcacaacaagaaattgctgagctggctgaaaataatcagcatgtaaaaatcttcagcgattttctggcaaattctacccgcggcatcgtccgttaa

SEQ ID NO: 8187 - DNA, 453 bp, Photorhabdus luminescens
atgagtgataatcatactctgcacattgaagaaattttagatctacttccacatcgttatccgtttttattagtggatcgcgtgcttgattttgaggaaggtaaattcttacgtgcagtaaaaaacgtatcttttaacgaacccttctttcaggggcattttcccggcaaacctattttcccaggtgttctgatccttgaagctatggcacaggccaccggaatcctggcatttaggagtgtgggcaagctagagccaaatgagctctattattttgccgctatcgatggtgcccgctttaaacgcccggtagtgcctggggatcaaatgatattagaagtagaatttattaaggagcgtcgaggggttgcgcgttgtagaggcgtagcgaaagtcgatggagaaatagcttgcgaagcagaaatgatgtgtgctcgccgtcgtgaggtttag

SEQ ID NO: 8188 - DNA, 1029 bp, Photorhabdus luminescens
atgtcttcaattcgattggctgatttagctcagcagttgaatgcacaattacatggtgatggcgatattgttatcaccagtattgcaccaatgcattcggccaatggcgaacagatcacttttttgtctgacagtcgttatcgtgaacgtttgggtgaatgtcaggctgccgctgtcgttcttcaggcgtcagatcttccttattgcaatattccagcgttggttgtcgccaatccttatctggcatatgcctatatggctcagattatggatacaacaccgattcccgcacaggatattcactcttctgcggtgatttcacctcaggcaactttgggtaaaaacgttgctgtcggagccaatgcggttatcgaatctggcgttgttcttggcgacaatgttgttatcggtgcaggctgctttattggtaaaaatacgcgtattggagcaggaagccgtctttgggcgaatgtctctgtttatcataatgttgaaatgggtgaacagtgtttgatccagtcaggagcagtgattgggtctgatggttttggctatgcgaatgatcgtggcaagtgggttaaaatccctcaattaggttcagtcattattggtgaccgagttgagattggtgcctgtacaactattgatcgaggagctttagataataccattattggcaatggcgtcattatcgataaccagtgtcagattgcgcataatgttatcattggtgacaatacggcggttgctggcggtgtgatcatggccggtagtctgaaaattggttgttactgtatgattggtggtgccagtgtcattaatgggcatatggaaatctgtgataaggtaacagtcacggggatgagtatggtgatgcgccctatcactgaacctggtgtatactcctctgggattccagcacaaccaaataaagtttggcgtaagacggcagctttagtcatgaatatcaatgaaatgaataaacgtcttaagtcaatggagagtaagctggaagacgaaaacgagtaa

SEQ ID NO: 8189 - DNA, 498 bp, Photorhabdus luminescens
gtgaaaaaattgttgtgtgcagcaagctttggtattgcattagctttctctgttggtgctcaggcagcagacaaaattgccgttgtaaatgttggtgagattttccagcagctgccagcccgcgaagctgttgtgaagcagttggaaaatgagtttaaaaaccgcgcatctgaattgcaacggatggaaactgacttgcagtccaagatccagaaattacagcgtgatggctccactatgaaatccagtgaacgtactaatctggaaaaagaggtgatggctaagcgtgaagaatttgccaaaaaagcccaagcttttgaacaagatcatcgtcgtcgcgagatggaagaacgcaacaaaattctaagtcgtattcaggacgcaatcaaagtggttgctggcaaagaaggctatgatgtcgttattgatgcgaatgctgttgcttattcagtatctggcaaaaatattactacaagtgtattgaaacaggttaaataa

SEQ ID NO: 8190 - DNA, 2394 bp, Photorhabdus luminescens
atggcgatgaaaaagttactcatagcgtcgctgctgtttggcagcgccactgcatacggtgcagacggattcgtagttcaggacattcactttgagggtcttcaacgcgtcgccgtaggtgcagcattactgaatatgccagttcgcgtaggtgatacggtcagcgatgaagatatcggtcgtaccattcatgcactatttgctactggtaactttgaagacgttcgtgtcctgcgtgatagcaatacacttattgttcaagtaaaagaacggccgactattgccagcatcactttctccggcaataaatcggtgaaagatgacatgttgaaacaaaaccttgaggcatctcatgttcggatcggcgaagcccttgaccgcacgatgctgtccaatatcgaaagagggttggaggatttctattacagtgtgggtaaatacaacgccagtgtaaaagcggttgttacgccacttccacgtaaccgtgtcgatttaaaactggttttcgctgaaggtgtctcggcaaaaatccagcaaattaacattgttggtaataaatcattttcttctgatgagttattgaatcgtttccaacttagagatgatgtgccgtggtggaatttgactgccgatcagaaatatcagaaacaaaagctgactggtgaccttgaagcattgcgcagtttttaccttgatcgcggttatgcccgttttaacattgattcgactcaagtcagtttgacgccagataaaaaaggtatttatgtcacgataaatataactgaaggtgatcaatacaaaatatcaggtattgacctgaacggtaatatggcgggttatcagtcagaaattactaaactggctgccattgagcctggatctctgtataacgggactcaggtgactaaaatggaaaatgacatcaagaacttgcttggtcgctatggttatgcttacccacgagtgatgacgcaacctgaaatcaatgatcaaggcaagacagtaaaactgcatgtcaatattgatgcaggtaaccgtttctatgttcgtaaaattcgtttctctggtaatgacaccactaaagattctgttctgcgtcgtgaaatgcgtcagatggaaagagcatggttaggaagtgatctgattgaactgggtaaagagcgccttaaccgtttgggttatttcgaaacggtagatgttgaaactcagcgtgtaccaggcagccctgatcaggtagatgttgtttataaagttaaagagcgtaataccggctctttgaactttggtgttggttttggtacagaaagtggcgttagtttccagattggtgctcagcaggataactggttgggtacaggtaattctgtgggggttaatgccagtaagaacgattattcaacctatgcagagctctccttcactgatccgtacttcacggttaatggtgtgagccttggtggtcgggtattctacaacgatttcagggctgatgatgctgaattatccggctatactaaccaaagctacggtatagatggtttcctcggttttccgattaatgaaaataactctctgcgttttggattaaattatgttcataactcgctgtctgatatgcttccgcaggctgcaatgtggcgttatttgaattccatgggagagaaaccagattataaaagtaaagctgagttcaaagcagatgactttgctttgaatgtaggttggacatataacaaccttgaccgtggcttcttcccaacatccggtgtgaaatcgacgctgaatggtaaagtgactattcctggttcggataacgaattctataaagtaacttttgatacctctgcgtattatccgattaatgacgatcgtacttgggtgatcttggggcgcagccgtttaggttatggtgatggattaggcggtaaagagttaccattctatgaaaacttttatgcaggtggctccagtacggttcgtggtttccgttctaacaatatcggccctaaagcgatttatatgaatggaaaagatgaccctaagaaagatagcccatctcgcgatgccgtgggggggaacgcaatggcggtagccagccttgagttgattactccgacgccattcctcgatagtaagtattcgaattctgtccgaacttcattctttattgattcaggtacggtttgggatacttattggaatgattctgctgcgatgaaaggcagtggtatacctgattacggtaaaccaggtaatatccgcgtttcagcgggtattgcattgcaatgggtgtctcctttaggtccactggtgttctcttatgctaagccgatcaaagattacgaaggtgatagatcagagcaattccaatttaatattggcaaaacctggtga

SEQ ID NO: 8191 - DNA, 1356 bp, Photorhabdus luminescens
atgatgggaattctctggaatctggcggcttttattattgcgctagggatattgatcactgtgcatgagtttggccatttttgggtggccagaaagtgtggtattcacgttgaacgtttctccattggttttggtaaagctctatggcggcgtacagatcgtcaaggaactgaatatgttgtagcccttattccactggggggatatgtgaaaatgcttgatgagcgtgtttcacctgtttctcctgaacaccgtcatatggcatttaataataaaacacttggtcagcgtgctgcggtggtcagtgccgggccaattgctaactttttattggcggctgtggtttattggttggtgtttattattggtgtgccggcaatccgtcctgttgttgcggatatcaaaccagattctatcgctgcgcaagcaaatatttcatcgggaatggaactaaaatccgtagatggtatcgaaacgcctgattggaattcagttcgttttgctctggtaggtaagataggtgacgataacatgactgttcaggttatttctccaggctcatcatattcggtggagaaaactctggatttgcagcaatggagttttgatccggataaacaggatcctgtgttgtcattaggaattatgcccgtcggtcctcgtttggattctctggtggaaaaagttatccctggctccgcagcagaaaaagcgggtttgcaaaagggggataggatagttaaagtcggtgaccaggaaatagatgtttggcatacttttacatcctttgtcagcaataatccaaatgtcccgctggaactttccgtggatcgggctggtcatattatttctctctctatgacgccggaagcaagacaacagtctggtggcaggaaagttggttttgccggtgtggaactgcgagttgtgccattagccgatgaatacagaatcgttcagcaatacgggcctttctctgccatgtatcaggcaggagagaagacttggcaactgatgcgattaactgtcagtatgattggtaagctgatcgttggtgatgtgaaaattaacaacctgagtggacctatctctatcgctaaaggggcaggggtgtcggctgattccggcttggtgtattatttgatgtttttggcgctaataagtgtcaatcttggggttattaatttgatcccattacctgtgttagatggtggacacttgctcttcttgtttatcgaaaagataaaaggtgggccagtttccgagcgtgtacaagacttcagctatcgcatcggtgccatagtactggtgttattgatggggcttgcacttttcaatgatttctcccgtttttaa

SEQ ID NO: 8192 - DNA, 849 bp, Photorhabdus luminescens
ttgctgaagtaccgccttataacggctgtgatattaatccctcttgtgattgccgctctgtttttgctgccaccagtagcgtttgggctggtgattattgctgtttcagcacttgctgcgtgggaatgggggcaattcgctggcttatttaaccaaaagaaacgggctattttggcagttctgtttgctattggtttattggccttacaatatactctgccagatttcactgatttgattggacaacctcaaatcacttttatcctatgggggggaatgatttggtggattgttgcgacgcttctggttgttacctatccttcttccgctgtaatttggaagagatccattttattgcgccttttgtttggtgtcctgacattagtgccgttttactgtggaatgatggtgttacggactcagggatatgatgataattcatattatggtgcatggtggttactgtatgtcatgttgctagtgtggggagcggattccggcgcttatctcttcggacgtactttaggtaaacgtaaaatggcaccgaaagtttctccaggaaaaacgctggaaggattaatcggggggttaatgacagcggccattatttcatggttgtttgggaaatatgctccagtacctgcaatgcctgaaaaactcatgttgtgctctgctattgttgttatcgcttctgtatttggtgatttgacagagagtatgttcaaacgtgaatcgggtattaaggatagcagccagctaattccgggacatggcggtgttatggatcgtattgatagcctgacggctgcgatccctgtttttactggcctaatgttgctggtattttga

SEQ ID NO: 8193 - DNA, 765 bp, Photorhabdus luminescens
gtgatattatccagcgatcatcatcagaacgatttatcgtcattattacctaaacatgttgccattattatggatggtaacggccgttgggcaaagaaacgagggaaattaagagcctttggtcatcgtgcagggattaaagcggtacgtagtgcggtgagtttctcggctaaacataacattgagtcactgacgttgtacgctttcagtagtgaaaactggaatcggccggaacaagaagtcagctctttaatggaattatttatttttgcactagatagcgaaatcaaaagtttacataagcataatattagattatctgttattggtgatatcggccgcttcagtgagcgtttacaggatcgaatccatcgctcagttaagttgaccgctaataatacgggtctgcaacttaatattgctgcaaattatggtggtcgttgggatattgttcaaagtgttcagaaaattgctcagcagattaaggataattctcttgagcaacaggatattactgaagaattagttaataattatatgaatctaagccagcagccccaggttgatttggtcatcagaaccggaggtgaacatcgtatcagtaattttctgttatggcagatagcttatgcagaattctattttaccgatatactctggcctgattttgatgaaaacgtttttgaaggtgcaattaatgcctttgccaaaagagaacgccggtttggcggaacaataccagacgatgccgatgtgggatcatag

SEQ ID NO: 8194 - DNA, 1197 bp, Photorhabdus luminescens
atgaaaaggttgaccatccttggttccacaggttccgtgggcaaaagtacacttactgtagttcgcaataatcctgataaattcaaagtaacagcgcttgccgctggaaaaaatatccaagttatggctgagcaatgtctggagtttcggcctcaatatgctgcaatggcagatgaagtttccgcaaaagagttgcgtcagctgcttattgaacaaggttgtaaaaccgaggtatttttcggggaacaggctgcgtgtgatttggctgctttgaatgatgttgatcaggttatgtctgggattgttggtgtggctggtttattgccaacgctggctgccatccgggcgggtaaacagattttacttgctaataaagagtcgctgatcaccagcggtcggttttttatggatgctgtagcgaaacataatgctcaattattacccattgacagtgagcataatgctattttccagagcttaccagaggtaatacaacgaaaccttgggcgcggagatctaaaacaatatggaattgctaatatcattttgacaggatctggcgggccttttcgtcatacccctttagagcaattagcttttgtaacaccggaccaagcttgtgctcatccgaattggtcgatggggcgtaagatttcggtagattctgcgacaatgatgaataagggtctggaatatattgaggcgtgttgtctgttcaatgcatctgctgcggaaatggaagtggtagttcatcctcagtcagttattcactctatggtccgttatcaggatggcagcgttattgctcaattaggaacaccggatatgtgtacacccattgcctatgcaatggcatacccaaatcgtattgcttctggtgttgaacctcttgatttttattctttaggtacactgacgttctcgaaaccagattatgaacggtatccatgtttgaaactggctattgaagcttgccacgcaggtcaggctgcaacgacggtgttgaatgcagcgaatgaagaaatcgttaagatttttttacaaaatggaatctctttcacagatattgcaattataaaccggcaggttgtagaaaaactaaatttgtcggaacctcagagcattgaggaagtcttacagattgataatctcgcaagagatttagccataaagactattcgttcatttatcagatag

SEQ ID NO: 8195 - DNA, 558 bp, Photorhabdus luminescens
gtgattaatgaaatcaaaaaagacgcacaagaccgtatggaaaagagcgtcgaagcacttaaaaaccaaatcagcaaggttcgtactggccgagcttctcctagtctgctggatggtatcattgttgagtattatggtgcaccaacgcctttgcgtcagcttgctaacgtcatcgctgaggatgcacgtaccttggctatcacggtatttgatcgtactatgacgccggcgattgaaaaggcaatcatggcttctgatttagggctgaatccatcttctgcggggacaacaattcgtgttcctttaccaccattgacagaagagcgtcgtaaagatctgattaaggtggttcgtagcgaagctgagcaggggcgtgtctctgtacgtaatattcgtcgtgacgctaacgacaaaatcaaagcactgctgaaagacaaagagatcagtgaagatgatgagcgtcgtgcgcaggatgatattcaaaagctgacggataatttcatcaaaaaagttgatgaagctttaacaaagaaagaagaagaactgatggagttctaa

SEQ ID NO: 8196 - DNA, 729 bp, Photorhabdus luminescens
atggcaaccaatgcaaaacccgtatatcagcgtatcctgcttaaactcagtggagaagccctgcaaggtgcagaaggttttggtatagatgccagcgtgttagatcgcatggctcaggaggtcaaagaactggttgagttaggcgtagaagtcggtgtcgtcattggcggtggtaatctgtttcgtggtgctggcttggcagaagcagggatgaaccgtgtagtcggcgaccacatgggcatgttggcaacagtgatgaatggtctggcaatgcgggacgcattacatcgcgcctatgtgaacgcccgtctaatgtctgcgattcctttaaatggcgtttgcgataactatagttgggcagaagcaattagtttattacgtcatggtcgtgttgttattttctctgcgggtaccggcaatccgttctttactacagattcggcagcgtgtttgcgtggtattgagattgaagcagatgttgtgctaaaagcaactaaagtagatggtgtttactcggctgatccggctaaagattcggaagcggtattgttcgataagctctcttaccagcaggtattagagcgtgaattgaaagttatggatttggcggcattcacgttggctcgtgatcacagcttacccattcgcgtatttaacatgaataagccgggagcgttgcgtcgtgtggtaatgggagaaaatgaaggcaccctgatttttcacgagtaa

SEQ ID NO: 8197 - DNA, 852 bp, Photorhabdus luminescens
atgtctggaattaccgctgctttggtaaaagaactgcgtgagcgtactggcgcaggtatgatggaatgtaaaaaagcgctggttgaagctaatggtgatatcgaattagcgattgacaacatgcgtaaatcaggtcaagcgaaagcggctaagaaagctggccgtgttgctgctgaaggtatcatcttggcggaagtggctgctgatggcaaattcggcgctctggttgaactgaactgtgaaactgacttcgttgccaaagatgcaggcttcatcgctttcggtaaagaagttatggcaacagtattggctgataaaatctctgatattgaaactctgaaagctaagtttgaagaacagcgtactgcactggttgctaagatcggtgaaaacattaacattcgtcgcgtttctgtattagaaggtgaacaactgggtacttatctgcatggtgcacgtatcggtgttctggttgcggctgaaggcgctaatgaagagctgattaagcatgtggctatgcacatcgccgcaagcaagccagaatatgttaacccaagtgatgtaccggctgatgttgttgatcgtgagcaccaaatccaactggatatcgcaatgcagtctggcaagccacgcgaaatcgcagagaaaatggtttctggtcgtatgaataaattcactggtgagatttctctgacaggtcagaatttcgtgatggatccaagcaaaacagttggcgatctattgaaagaaaacaatgctacagtgaccagtttcatccgttatgaagtgggtgaaggtattgagaaagttgagactgatttcgcagcagaagttgctgcaatgagtaaatag

SEQ ID NO: 8198 - DNA, 726 bp, Photorhabdus luminescens
atggcaactgtttccatgcgcgatatgctgcaagcgggcgttcacttcggtcaccagactcgttactggaacccaaaaatgaaaccattcatctttggtgctcgtaacaaagtgcatatcatcaacctggaaaaaactgttccaatgttcaacgatgcgttagctgaactgaacaaaattgcttcacgcaaaggcaaaattctgtttgttggtactaagcgtgctgcgagcgaagcggttaaagaagcagctcagaactgtgatcaattcttcgttaatcaccgttggttgggcggtatgctgactaactggaaaaccgttcgtcaatccatcaaacgtttgaaagatttagaagcacagtctcaggacggtacttttgacaaactgaccaagaaagaagcgttaattcgttctcgtgaacttggtaagttagaaaatagtctgggcggtatcaaagatatgggcggcttacctgatgctctgtttgttatcgatgctgaacatgaacacattgctatcaaagaagcaaacaacctgggtatcccggtattcgctgttgttgatactaactctgatccagatggtgttgatttcatcatccctggtaatgatgacgcaatccgtgcagtaaaactgtatctaggtgctgttgctactgctgttcgtgaaggtcgttctcaagatctggctgttcaggcagaagaaagctttgtagaagctgaataa

SEQ ID NO: 8199 - DNA, 168 bp, Photorhabdus luminescens
atggtatcagcctacagaatatctgccaataacagttggcagccctatttccctcgttacctttatttacccatcaagaataccgttcgtaaccgggcttttcttttcacattgagctatcagaaaatggcaacaaaagttggtgtcttaggcgggtttatgatataa

SEQ ID NO: 8200 - DNA, 798 bp, Photorhabdus luminescens
atggcaatctcaattaaaacctctgaagatattaaaaaaatgcgcgtcgccggtcggctggcggcagaagtgttagaaattattgaaccttacgtcaaacccggtgtaacaacaggtgaattagatcgtatctgtcacgatcacattaccaataaacaacaggctgtctctgcctgccttggttatcacggtttcccaaaatctgtttgtatctctgttaatgacgtagtgtgtcatggtatccctagtgatgataagaccttgaaagatggcgatattgttaatatcgatgtgactgtcatcaaagagggcttccacggtgatacatcaaaaatgttcatagttggtaaaccaaccattcagggtgagcgcttgtgccgcatcactcaggaaagcctctatctagccttgaaaatggtgaaacccggtattcgtctgcgcaccctcggtagagccatccaacaatttgttgaagccaacgatttttctgtggtccgtgaatattgtggtcacggcatcggcgcaggcttccacgaggaaccacaagtactgcactatgatgcagatgatagtggtgttgttctgcaaaaagggatggctttcactattgagccaatggttaacaccggtgactaccacatccgtaccatgaaagatggctggacagtcaaaaccaaggaccgcagcctgtctgcacagtatgaacatacgattgttgttactgataacggctgtgaaatcatgacattgcgtaaagaagaagagccagcactttcctcagtattagtaaatgaataa

SEQ ID NO: 8201 - DNA, 2649 bp, Photorhabdus luminescens
atgtcagcagatatcgccacaattcaagcccctattccaccactttcccccgctgatttttctagtgaagatcttcgctaccctgtgttgaaacagcacctcgaagaatttcagctttggctggaacatgcatttaaagcgggtatttccgcagaagccttgatttctgcacgcagtgattacatagaccagttgttacagcaattatggtatgcctatagatttgataaaatttcatcactttcattgattgccgtcggcggatatggccggcgggaactgcatccgctatctgacattgacgtgctgatactcagtgaacaaccactcacaccgcctcaagctcagaatgtcgggcaatttatcactttactatgggatatccgactggaagtcggccacagtgttcgcacacttgaagagtgtttgctggaagggttatcagatctgactattgcgacgaatttaatcgaatcacggttaatttgtggcgattcctccatttttcttcgattacagcgacataccttcagtgatggtttttggccttccactgaattctttgatgccaaaattgtcgaacaacacgaacgccatcagcgctatcacagcaccagttataacctggaacctgatatcaaaagcagccccggaggattgcgagacattcataccttactatgggttgcccgccgccattttggtgcaacctccatagatgaaatggtcgattttggtttcctgacagcagaagaacgtaatgaattaaatgaatgccaaagcttcctctggcgtatccgctttgctcttcatctggtagtcaatcgttatgataatcgcctgttatttgatcgccagttcagtattgctcaattactaggctatcacggagaacgtaatcaaccggtagaacgaatgatgaaagatttctaccggatgacacgccgcgttagcgaacttaacaatatgctactgcaactgtttgatgaagccattctggcattggaaaccaatgaaaaatcccgctcgctggatagtgaattccagctacgggggcaacttattgatctcatcgatgaaaccctgtttatcaaagaacccgcagctattatgcgaatgttttatcgcatggcggaacatgaagaagttcaaggtatttattctactacgttacgccacctccgttatgcacgccgcaacttgtctcagccattgtgtgaattaccggaagctcgccaaatctttatggacatcctacgtcacccaagagcagttgaaagcgcatttgtacccatgcatcgccacagtgtccttggcgcttacacaccgctttggggcaatatcgtcggtcagatgcagtttgatctgtttcacgcctataccgtggatgaacataccatccgcgtactgagaaaactggaaagttttgccaatgaaaataatcgtccagcccatccactctgtgttgagctataccctcgtctgcctcaaccagagcttctacatcttgctgcactatttcatgatatcgccaaagggcgtaccggcgaccattctgaacttggcgctgacgatgcgctagcgttttcactgaaacatgggcttaactcacgagaagctgatttggtagcctggctagttcgtcatcatctattaatgtcagtcacagctcaacggcgagatattcaggatccagaaatcatcaagcaatttacccatcaaatcctcaatgaaacccggttacgttacctgatctgcctgacagtcgctgatatctgcgccaccaatgtcaacctatggaatagttggaagcaaagtttgttacgggaactctatttctctacagagaatcaattgcgccagggaaatacgccagattttcgggaacgcatccgacataaccgttttcaggcacttgctctgttgcgccaagataatattaacgaacagaagcttcatcagctttggagtcgttgtcatgcagattattttcttcggcatacgccaaaacaacttgcctggcacgcccatcatctcgtgcagcatgattctcaagagtcactgatactaataagtaccaagccaacccgcggcggtacagaaatttttatctggagcgtagatcgtccttccttgtttgcggcggttgtcggcgaactggatagacgtaacctgagtgttcatcatgctcagatctttaccaatcgtgatggtatgacaatggacactttcgtggtactggaacccaatggtcatcctttagcatcagatcgccatgaaataatacgtaacgcacttttacaagttgttctagctccccataccaaaacaccgaaaacacgaaaattgccaaccaaactgcgtcacttcaacgtaccaacaaaagtcaccttcttacctacccataacgaacgacgaacctatatggaactatttgccctggatcaaccggggttgctggcaagggtcggtaatattttcgccgaaatgggggtttcactgcatggtgcacatatcaccaccatcggtgaacgtgtcgaagattttttcgttctggcggataaagaccataaagcattaaataaaaaagtcagagaagaattatcagaaaggttgacagcaaccctaaatccaaaggataaaatataa

SEQ ID NO: 8202 - DNA, 825 bp, Photorhabdus luminescens
atgcagcaattacaatccattatcgaaagtgcatttgaaaaccgcgcaacgcttactccagcaactgtcaaccatgaaacacgtgatgctgttactcaagtcatcaacctgctggatagtggaaaactgcgcgttgcagagaaaattgacggtcagtgggtcactcatcaatggctaaaaatggctgtactgctctctttccgtattaatgaaaatcagatcatcgatggcacagaaagccgttatttcgataaagtcccgatgaaattctctgactatgatcagacaagatttgaaaaagagggctttcgtgtagtgcctcctgcggcagcacgtcaaggggcctttattgcccgtaactgcgtactgatgccttcctatgtcaacatcggcgcttatgttgatgaaggaacaatggtagatacttggacaacagtcggctcctgtgcccaaattggtaaaaatgtccatttatctggtggtgtcggcatcggcggcgtattagaaccattgcaagcgaacccaaccattattgaagacaactgctttattggtgcccgttctgaaattgtagaaggtgtgattatcgaagagggttcagtgatttcaatgggtgtttatattggtcaaagcaccaaaatctatgatcgtgaaacaggagaaatccattatggtcgagtccctgcgggttctgttgttgtctctggcaacctcccatcaaaagatggtagttacagcctgtattgtgctgtcattgtcaaaaaagtggatgccaaaacacaaggaaaagtgggcattaatgaactactcagatcgatagattaa

SEQ ID NO: 8203 - DNA, 387 bp, Photorhabdus luminescens
atgtacgataacttaaagagtctggggatcacatatcccgaagaaattgaccgctatagtctgcgtcaagaagctaacaacgatattctgaaaatctattttcgtaaggataaaggtgaattctttgctaaaagcgtgaaattcaaatatccgcgccagcgcaaaactgtgactgcaaacaatgcagagcaaggatacaaagagatcaacgaaatcaataccaacctgcgttatgtgattgaagagttggatcagatttgcaaacgtgaccaagtagaaatcgacttgaaacacaaaatcctcgatgacctacgtcatcttgaacacgttgttgccaacaaaattgccgagattgaagccgatctggaaaaactaacccgtaaataa

SEQ ID NO: 8204 - DNA, 450 bp, Photorhabdus luminescens
atggcaaagataggtatttttgttggtactgtttatggtaacgcgcttgctgtcgcagaagaagcacagcagatccttgaacaacaaggtcatgatgtagaagtctttgaagaaggggagctggaacagtggcaatcctatcttgatcaaatggttttagttatcacttcaacaaccgggcaaggggatttgcctgataatattcggcctctttactatgctttgcgagatgagcaggggtatcagccagaattacgctatggcgtgatcgctttgggtgatagcagttacgagaatttttgtggtggtggccgcacttttgatgagttgcttcaagagcaaggagcaataagaatcggtgaagttttgatggtggatgcagtggaagaagctgaaccggaagtttttgctcagccttggatcaggcaatggggagaattaattgaataa

SEQ ID NO: 8205 - DNA, 603 bp, Photorhabdus luminescens
atgtttaacaatagagctgttgtgctaagtatactattaagtgccgcaaatattaccgtctcatctggcctgatgatttgggtagataccgtgcttaaagatggaagcatgattttaaacgcttatattcctgttttttcctatttattggggttatctctgggatgtatgaccgtatccttttttattcgaaaaatgaatatttctttttttgaaagaaatatttttggcttctttttattactaacaacgataaactgcattctctttgcaaaagaaacaacatttattccagtttggctggatactccgcatagaatattatggggagtaataagtggatttattgttataatgggaagaaatattcttataaccgcaggcaatgaaaagaaaacgaatagtgatttttctattttaagcctggcgttattaagcctgccattttcaattcccgttattttctctcttttaggtttaaattcccgtacatcagcagatttttttgctgcttttatttattctattgcttcaattatctatttcactggctttaaaagctatatggttcccctgtgcaattggcatcatgaaaatcattaa

SEQ ID NO: 8206 - DNA, 771 bp, Photorhabdus luminescens
atgttggaagtgttataccaggatgatcatattgtggcagttaacaagccagcggggtggttagttcatcgtagctggttggcgcgtcatgaaacggtctttgttatgcagacattgcgtgatcagattggtcagcatgtttttccggtacaccgtctggatagaccaacgtctggcgtattgctgatggcgctttccagcgatgttgctcgccagctctctcaacagtttgaacatcatcaattacaaaaaacttatcatgctgtcgtgcgcggttatgtgttggaatcagctattattgattacgctttggttgaggagctggataagatcgccgataaatttgcagagggtgataaagaggcccaatcctgcgtgacttattaccgaccactggcaacggtggagtgtccggtagaaataggtcgttatcctacatcacgttttagtttgttggaattgacaccgaaaacaggtcgaaaacatcaattaagacgccatatggcacatattcgtcaccccattattggtgatacaacacatggcgatttacggcaaaacagaggcgttgctgttcattatcaaaccagccggttaatgcttcatgccagttatcttgagttggatcatcctgttacgggggagaaattatcgcttacggcaaaatgggatgcatcatggcagcatttaatacaacaatttggctggcaaggtattatccccgatttggaatatgatgaagcgagtaagatagaaaattttatagattag

SEQ ID NO: 8207 - DNA, 333 bp, Photorhabdus luminescens
atgagtactgcaaaacaaattctgcataaattacagttaattgaagaagccatgagggaaattgacctgtggcagagccatccgcccaaaccggaagctttcgaaagtgttgagccgttttccattgatcggatgttagctgaagagtggttgcagtgggtattgattccgagaatgtatgcattgttggagcagggattggcgttgcctacggcatttgctatcgcgccttactttgaggagtcttataaagaagatactaccgggcgttaccagcaactgtttgaacatcttcgtgcgttggatcgcttatttatgcaggataacgtctga

SEQ ID NO: 8208 - DNA, 555 bp, Photorhabdus luminescens
atgatttctaatgttacagaagcgttgtctaattttacccgttgttatgttgatttgtggcaaaaggaaaccggggcccctcctgccagccgtgaactttatggtgtgccatcaccttgtattacccagactggtgacaacatcgtttattggctgccacagccttttcctttagaggaaaagttgaatagcgtcgaagttgcactggatattcaattacaaccggcaattcatgatttttatacatcacaattggccggtgatatgacggtaacgtttgaaggtcaacggcttagtttgattcaggtttggagtgaggatgattttatccgtttacaggaaaacctgataggacatttagtgacgcagaaacggctgaaactgtcgccaacggcatttattgcgacgatggaatcagatgatatgggtatcatttctctgtgtaatttgaccggtgaagtgatcttggaacagtttggcagtcataaacgagagcgcttatttaccgacttagttgggtttcttggcgcaattgagcctgtctttatgcgttag

SEQ ID NO: 8209 - DNA, 849 bp, Photorhabdus luminescens
atgtcattatatcgggatcaccaagctcttgagcagcttacgctaggtaaaaccactttatatcgtgaccaatatgatgccagcttattgcaagctgtaccccgcaatatgaaccgtgaaccgctggaaattttccctgataatttgccgtttcatggcgctgatatctggacactgtatgagctgtcatggctgaataaccgcggtttgccacaagttgctgtcgggcatgttagtttaaatgcagcaagcacaaacctgattgaatctaaaagttttaagctctatctgaacagctttaatcagactcgttttgaaaactggcaagccgtcgaagaaacactacagcgcgatctggctgcttgtgctgaaggtgaggtggaagtggcacttcatcacttagatcatttcaataatcagccaatctccacttttacaggtgaatgtattgatgatcaggacattgaagtgactgaatatgatttcaatcgtcattatctgcaaaatgcagcgcaaggcccgcaggtagaagaagttttggttagccatctgctgaaatctaattgcctgatcactcatcaacctgactggggatctgtccagattcactacaaagggtcaaaaatcaatcgggaagcattgttacgttacttgatatcattccggcatcacaatgagtttcacgagcaatgtgtcgagcgtatcttcagcgatttacaacaattatgtgcacccgaaaagctctcagtctacgctcgttatacccgtcgtggggggctagatatcaatccgtggcgtacaaatagtgaaggctttgttccagcaacaggccgattggcacgtcaataa

SEQ ID NO: 8210 - DNA, 1368 bp, Photorhabdus luminescens
ttgatcacacatatcaacccactcggctcgatggatttattatctcaacttgaagtagatatgctaaagagtaccgcaaaaagtgatctgtatcgcctgttccgtaattgctcactggccgtactcaattcaggtagccaaaccgataatagcaaagagctgctctctaaatacaccgattttgagattaacgtattgcgccgtgagcgcggggtaaaactggagctggtggatccaccagaagatgcattcgttgatggaaaaattattcattcactacaagctaacctgttcgcagtgctgcgggatatcttgttcgttcatacacagattaccgatccagaacaacaggattattccgattcagagaatagcgcgtatatcaccaacagaatattctctattctgcgccacgccagagcactgcataccgatgaagatctcaacatgatcgtctgttggggaggccactcaattagtaagcaagagtatcagtatggccgtaaagtcggtaatcaacttgggttacgtggactgaatatctgtaccggctgtggccccggagcaatggaagcaccaatgaaaggcgcggctgtcggccatgcccaacagaattacaaaaatagccgttttattggtattaccgagccttcaatcattgcggctgaacccccaaatccattagtgaacgagctaattatcatgccagacatcgaaaaacgtctggaagcttttgttcgtattgctcatggtatcgttattttcccaggtggtgttggtacagcagaagaattactttatttgctaggtattctgatgaatccagaaaatcaggagcaaatactgccattgattcttaccggaccgaagcagagtgaagcctatttccaagttctggacgaatttattgttcatacattgggcaaagagactcgacgctattatcacatcatcattgataatgcgcctgaagttgccagaataatgaaaaaagcgatgccattagtgagagataatcgccacagtaccggtgatgcatacagttttaattggtcaatgaagatcaattatgatttgcaacaaccgtttgaaccatcacatgaaaacatggctaacctcaatctctatcctgatcagtcacctgaaaaactggcagcgtcattgcgccgggctttttccggaattgttgcaggcaatgtaaaagagatgggtattcaatcgattgaacaacaaggtccattcaaaatccacggggatgttaaaataatgcgccatatggataagctactgaaagactttgtggaacagcaccgaatgaaactaccgggaggtactgcctacgaaccttgctacgaaatcatcaaataa

SEQ ID NO: 8211 - DNA, 759 bp, Photorhabdus luminescens
atgatacaccttcttattgttgatgctcttaaccttatccgacgcattcatgctgtacagggcagcccatgcattcctgcttgtgaacatgcgctaaggcaacttatccaacattctcatcccacacatgccgtcgcagtattcgatgaagagaatcgcaatcacagttggcgtcaccagatattacctgactacaaagctggtcgttcacccatgcctgacaatctgcaacaagaaatgccgcaaatcagagcgtcgtttgagcaacaaggagtcacttgctggcatgccaaagggcatgaagctgatgatctggcagcaacactggcagtaaaagtcactgcggccggtcacaacgtaacgattgtttctactgataaaggctattgccaattactttcacccaatatccgtatccgtgattacttccagaaacgctggttggatatgccctttgttcaacaagaatttggggttttaccggaacaattgcctgattattgggggctggcggggatcagtagcagtaaaattccggggatccaggggatcggcccgaaaaccgctgccactttactgcaacaggccggtacactggataatctgttccaacacctcgaccaacaacccgagaaatggcgcaataaactagaatccaatcaagaaatcgcgtttatcagccgggaagttgcgtcattacgtaccgatctggctttaaagggtaatttgcaacaactccggctgacaatagcaacctaa

SEQ ID NO: 8212 - DNA, 1377 bp, Photorhabdus luminescens
atgatgaaacggaataatgcttctttatcaatgggtttgctgattcttgtctgtgtcaatctgttctcttttcctgcatgggcattgagtttgactgaagtttatgcgctggcgttagaaaatgatccgatttttctcgccgccgtgaaagagcgggaaggcggtgaggaacatgaaaagatcggcagggcagacttgttgcctaaggtgataatgtcttaccagcagtcaccgaagaattggcaacatacggagtatcccaggtataacttgcggggcgggaagacaaccgaaagccaggatcgccaatatcgcagttatagcgcggctgttgtgttgactcagccgttgatcgattttgaaatatgggcgcgttataaagccagccaggctcacactttgatgagcaatgagcgttttcgggcagattttcagcaattggctgttcgggtcgtgaatgcttacgtagatgtggcttatgcacaggatcagattgatttagtcatacggcagaaaatggcttatgaaaaacaactggaactgaataagaagttgtttacttctggtgaagggacgctcactgatgtggtagaaacacaatcgcgttacagtcaggcgattgccgatgagatagcggccaaagatgatttggatgcagcaatccgaaatttacagctcattgtgggggtttctctcccggttgatttaccggtgcaacggttatcaaataaaaaacgattccagatattgaagttgttacctgaacgttatgaggcgtgggaagagttggcattagccaacaatccgcttctgtccgcttcgcgtcaggaagtgaaagccgcgtaccatgaagtgcaacgtaatcgggcgggctatttacctaggctggagttgtacgcttcccactctgaaaacgaatccagcagcgataataccatagatcaaaaatatcgcaccgataccattggcttgcggatgagcatgaatatctataatggtggtgctacgtctgccgctgtacgtcaggcggcggcccactatggcaggactaaatatgatcttgatgctcaggcgggagaaatccttaatgcattacgccgcaattataatcagtacttaaatagtgaaaaaagaattagtgcttatgaaatggcggttgaatcagctagcttacaggtagacgcaaccagtaaaagcgttgcgcttgggcagcgggttaatgtggatgtcttgaatgctgaacagcagttatatactgcccgacgtgatctctcacaagcaaaatataattatattaaggcttggatcggcctgcttagtgaggccggagaattaaaaggcgaacatctggataaggtagcgaagtattttcgttag

SEQ ID NO: 8213 - DNA, 1335 bp, Photorhabdus luminescens
gtggatatgtctgatcagattacgccggtaagagaggaaaaaggattattgcctttggaagaaaggcattttttacgactaggatggttcgtgattggtgtggggatcctgggatttctcatttgggccgcgttagcaccgttagataaaggggtggcatcttcaggtgtggtggtggtggatggtaatcgtaaaacagttcaggccccggcaagcgggattatcagtcagattaaggttgttgaaggcgaaacagtaaaagcgggtcagacactcgtccagctcagtcaggtgcaggcaaaggcacaggttgatgcacttcaagatcaactgcataccacgctggcaacggaagcccgtttattagccgagcagcatggtgatgaagcgttaattttccccgacctattacagcaattacactctgaaccgcgggtgaatgagattattgaactgcaaaagcaactgtttgtatcacgccgtgaagtgctgagaagcgacttggcagggcttgagcagtctgtcgaaggaatagatttccaaattaaagggctgaaatcttcttttctcaataaacgcatgcagcaggcggcgcttaaagagcaaataactaatctgaaatctttagcggatgagggctattttccgcgtaatcgttatctggaactgctgcgtgaacaggctgagctcaacagcagcatagcggaaatggaaggacgagccggtcagcttgaaaaacaattacaggaaacacagcagcgtattattcagcgcaaagcagactatcagcgggaagtgcgcacacaattagccgaggtgcaggtctctgccagtgaatatagaaataagctggatacagcccagtttgaactgactcatacctcaattgttgcgccggttgatggcactgttgtgggattaaatatttttacccaagggggggttgttgctcccggcgaaaaactgatggaaattctgccggaccagagggcgtttgaagtggaaacgcgtgttgcggttaatttggcagataagattagtaaagggttgaatgtggatctgatgtttaccgcttttaaccagaatcggacgccaaaagttgaaggaaaagttgccgtgatttccgcagataggttggtcgatcccgcaaccagtcaaccttattatcagatgagagtggttgtctctcctgagggaatggaaaaactgaaagggttggatatcaggccaggaatgccggttgaggtttttgtcaagacgggttcccgctctctgttaagttatctgtttaagccattgctggatcgggcttcaacatcgttgatagaggagtaa

SEQ ID NO: 8214 - DNA, 1731 bp, Photorhabdus luminescens
gtgaaattactactcccaaaggatgaaattactgatgtcattcgtgctcgtagtcgggtattttgggctatcgggttgttcactgcttttattaacctgctgatgttagttccatctgtttatatgttgcaggtttatgacagagtattgccgtcgggcaatgaaatcactttgctgatgttgacgctgattaccctcggcatgtttgccatgatgggcatgctggaatatatccgtagcatgattgttatccgtattggcagccagcttgatatgaagctgaataaccgggtttataccgcatcttatgaatcgaatctgaaaaatggcacgactgatgccggtcagatgctcaatgatttagccaatatccgccagtttttgacgggtaacgccttgtttgccttctttgatgccccttggtttccaatctatctgctggttatttttctttttaacccctggcttggtctgttgtcattgggcggtgcactggtattgattgccctggctgtgttgaatcaatggttatcaagtcagccgttatccgaagccagtaaactctctctacgttcagcaagtcttgccagcactaatttacgtaatgccgaagtcatagaggcgttagggatgttgccggtgctacgtcggagatggtttggattacatgagcgtttcctggatttccagcgcattgcgagtgagcgggcttcagtgattaattcagtcactaaaacagtgcgtttggccttgcagtcactgatcctgggattagggggctggttagcgattggtgggcatattacgccgggcatgatgattgcggcttcaattttgatgggacgtgcactttcaccgattgaacaattgatccaagcctggaaaggctggagtggtgctcgtttgtcatggcaacggttaacccacctgttggaacaacaaccggaacgcaaaccgggcatgtcattgcctgcgccaaaaggaaatttagccgtggataaagtttccgcagcgccgccgggaagaaacagtaaggttgttttgcaggatattagcttctcgttggatgccggtgatgtgatgggattaattggtcccagtgcgtctgggaaatcgacgcttgcccggttactggtcggaatatggccgacacaggaaggcgttgttcgtctggataatgccgatatttatcagtggaataaagatgaactgggctcctcaatcggttatttaccgcaagatattgagctatttggcggcactattgctgaaaatattgcccgttttaatgcagtagaacccgaaaaggtggttcaggcggcaaagaaagcgggtgttcatgagctgatattagcacttgataagggctatgacaccgtgattggtgctggcggagtgggattatctggtgggcagaaacagcgcattggccttgctcgtgcgctatatgacgagccgtcattggtggtgttggatgagcctaattccagcctggatgaggcaggggaaagagcattgaatgaggcgatttctcagttaaaggcacaaggaaagacagtgattgtgattactcaccgcacctcattgctatcacagacaaacaaaatattgctactggttcaggggaaaatgaagatgttcggttcatctcaacaggtgatggccgctttatcacaaaggaataatagtcaggaacattctgcaaccaaggcagtcgcccaggcatcatag

SEQ ID NO: 8215 - DNA, 333 bp, Photorhabdus luminescens
atggcgagtagtcttgttctcccacacgccagtgaattgaaaggcgtgtggcaattgtcggataaacatcaacaatgcgatgtgttattgactgaccatcccttaccagagggatcaatttggtcacttaatggtgataacgattgtttagcgtatatgtttggcgaagtgcctgccggttggcgaccaacaccagatgggctcacaattactgatgaacaggggagtggtttggctttttttgctcatgaaccggatggttggtttgctcgttttgccgatggtcgggaattaatgataaagcccaataagacgagtaagaaaaatgaataa

SEQ ID NO: 8216 - DNA, 1443 bp, Photorhabdus luminescens
atgtctttaaagaagaaaatttcatactcggaagacgttagcggttcagaaaaagcaaatgagttgctgaaatggttacaggcttatataccaggtaaagactctaatattgtcgttgagcatgagcccagtaaagatgctgctaaagaattaatccggggtgattatcgttgggggcatcaggatgacgataaatctaaagctttccaattaaagtattctttcctggagagtaagccggataatatgccgtggcatatttctgaattttcagcatttaatgaagcacaaaaagctgctgcaaaactgtcaatacaatcttgggctgatgttgctaatattaatttcgttgaaaccactgacgccaaagaggcaaatgttacctttggattctttgatgttagcttgacggggagttatgcgtttgcttatctgccaacccccgagaagacacaggtaggaacttggtataacgcgaaaagccgtactttcttaaacaacgatattgacgtgaatggttatggccgtcagacgtttactcatgaaattggccacactctagggttgcaacatccggctgattataatgcgtctgacaaggtaagcccgacttataagaacagtgcgacttattttgaagatagccgtgcttataccgtcatgagttattttggtgagaaaaataccggtcaggactttaaaggtatttattcttccgcaccattacttaacgatatttctgccattcaggcggtatacggcgcgaataataccatccgtgctgatgacaccgtatatggttttaattccaacacagatcgtgacttctataccgcaaaagacgagaacagcaaactgttgttcaccgcttgggataccggggggaatgatacgtttgatttctctggatttactcaggatcaacgtatcaatctgaatgaagcgtctttctctgatgtcggtgggttgaaagggaacgtctctattgcccgtggcgtcacgattgaaaatgcaattggtggcagtggtaatgacgttttaatcgggaatgatgccgccaatactctgaaaggtggagcgggtgatgacatcatttacggcggcttgggagcggataatctttggggcggggagggcaacgatacctttgtctacctgagcgccaaggaatcaccgcctcttgagcgtgattggatccatgactttgtttccggtaaagacaagatcgatgtgtcactgttcgatctgggtgaagccgggaaggggggcgttaaatttgtaagggaattcacgggtgaagtcggagaagcggtgcttcgttataacacggttgataaggtgaatgatttcgccattaatttgggcggtgaattttcctacgatgatttttgggtgaagatagtcggagagccaatcttagagtctgatttcattctttcataa

SEQ ID NO: 8217 - DNA, 1101 bp, Photorhabdus luminescens
atgaataaaattgctttatattgccgccctggttttgaaaaagagtgtgcagcagaaatcaccgataaggcgggccaaaaagagatttacggttttgcccgggtgaaagacaacagtggttatgtcctgtttgagtgttatcaatatgaagatgccgatcggctgattcgtgagatcccatttcgggagctgatttttgcccgccagatgctggtcgtgggtgaattattgcgagatttacctcctgaagatcggataagcccgattgtaggtatgttgcatggtgtcattgaacgtgcaggtgaattacgggttgaggtgcctgatactaatgaaagtaaagagttattaaaattctgtcgaaaatttactgttccgttgcgtaatgctatgcgtcaggaaaagatcttgctgattcgggaaaacgttaaccgcccggtgatacacgttttctttatcgctccgggttgctgttatgttggttattcttacagtaacaataattcgccattttatatgggtattcctcggttgaaatttccttcggatgcaccaagtcgttcaacattaaaactggaagaagcctttcatgtttttatcccacatgacgaatgggaagagcgattggctagcggtttgtatgcagttgatttaggtgcatgccctggtggttggacttaccaactggtgaaacggagtatgatggttcatgcggtagataatggcacgatgtcgaaaagtttgatggatacggggcaagttaaacatcacaaagttgatggttttaagtttgagccttcggcaaagaacatttattggctggtatgcgacatggtggaaaaaccagcaaaagtgacgcagttaatggtagattggttagttaatggctggtgccgggaagctatttttaatctcaaattacccatgaaaaagcgttatgaagaagttgctcataatttgcagaaaatgcacttgcaattaaaagaagggggtattaatgcacaaattcaggcaaaacacctttatcatgacagggaagaaataacggttcatgttcgtcgtatttggtctgcctatgcagctagccggaatgattactga

SEQ ID NO: 8218 - DNA, 396 bp, Photorhabdus luminescens
gtgaatagtcgcctaatgcttatctttgctggcttaagtgggtttttctatgtggcgtttggtgctgtagggtcacatttattatctccgatgatggaaaaatatcagataagttggattgatcttggtctgcaatatcagggtattcacactctggcaatgatggcgatgtctgccatgctaatgcgtaaagttgtgctctggttttactggagtggcgttttttttgcagtaggtattttgttgtttagtggcagtctctattgtatggccttattgcaggttaaatttttcgcttatattacgccagttggaggatttagctttcttattggctggtttttagtattaattggcgctttgcgtctaaggaaatcggcgcttcgccatgaataa

SEQ ID NO: 8219 - DNA, 921 bp, Photorhabdus luminescens
atgtccaaacgtttacctccacttaatgcgttgcgggtttttgatgccgcagcgcgccatttaagttttactaaggcggcagaagaattatttgtgacgcaggccgcagttagccatcagatgaaaagtctggaggattttcttgggttgaagttatttcgtcgccgcaatcgatcactattgttgactgaagaaggtcaaagctactatctggacattaaagagatattcacggcgataaatgaagcaacacgtaaacttcaagctagaagtgctaaaggtgctttgacggttagcctttcacctagctttgctatccagtggttggttccaaggctgtccagctttaatttagcttatcccggcattgatgtcaggatacaggcggtagatagagaagaagataagcttgctgatgatgttgatgttgccatattttatggtcgtggaaattggccggggttacgcactgatcgtctttacgcagaatatttgcttcccgtttgttctccttcgttactgactggagaaaattctttgaagacccccgcagatttggcgcgtcatacgttgttacacgattcttctcgtcgtgactggcaagcgtatgtgcgccagcttgatatgcagcagcagataaacgttcagcaaggaccgatatttagccatagtgcaatggtgatccaagccgctgttcatgggcaaggtattgcactggcaaataatgtcatggctcggactgaaattgatgcggggcgcttagtttgcccatttaatgatgtgttagtgagtaagaatgcattttaccttgtttgtcatgacaatcaggctgaattggggaaaattgctgcattcagacaatgggttttggcacaggcagccagtgagcaggaaaaattgggctttattaccaatgagtaa

SEQ ID NO: 8220 - DNA, 1254 bp, Photorhabdus luminescens
atgaaaaagttcgaaccagaacagttccgccagcaatttccagcgctacagcaatttccatcacaacaatttccatcacagcaattaccatcacaacaacagacggtatttctggatagtgcagccactgctctcaaaccacaagccatgataaaggcaactcaagattattatcgaaacagtagcgctaccgtacatcgtagccaacaccacgcagcgctggaaatcacctcccgctatgaacaagcccggcaacaagttgctgaattcatcaacgctccacaagctgaaaatattatctggacaaaaggaacaacagaatccctcaatctagtggttcaaagttatttccgccctcatctccagcccgatgatgaaattatcgttagtgagcaggaacaccattccaatctgataccgtggttaatgttggcagagcaaatcggtgccaaggttattaaatggcctttaggcaatggcaaattgcctgatatccacatgttgcctgaactgctaaacaaacacacccgcttgatagccatcagccaaatgtccaatgtgactggcggagcagttgatcttgctgcaataactgcaatagcacaccaacatggctgtctggtcgttgtagacggcgcacaaggcgttgttcacaatcccattgatgtccaacaatcagatatcgatttctacgcattctctgctcataaactctatagttcgaacggcgttggtatactttacggcaaaagtgagcttcttaatgctatgcctccctggcaagggggcggaaaaatgctctcccacacgtcattcagcggttttatacccgaagcggtacctttccgatttgaagcgggcacaccgaatgttgcaggtattattggtttttctgccacgctggaatggttaaaagatattgatattaccaaagccgaaacccatgcagtcacactggctgattataccgaagaacaactctccgctttacccggatttatcagctatcgcattgccggttccagcttattggcttttaattttaccgacattcatcacagtgatttggccgccattctggcagaacaaaatattgcgttacgttccggtcagcattgcgctcaacccttgatcgaagcgttaggtatcagcggctgtttgcgcgcctcctttatgccttacaacaaccaacaagatgccgatgctttaattcaggcagtaaaatttggcctttctctattacaggatgaatga

SEQ ID NO: 8221 - DNA, 456 bp, Photorhabdus luminescens
atgactcaagccactgaaaaccggattgcaccacacccatttggccgggaaatcagccaacaacagctcattgcaacctttgaccaatgccgccaatgggaagatcgttatcgccagttaatcttactggcaaagaaactgcccgcattaccagagaacttgaaacagcaagacactgaaatgtccggctgtgaaaaccgggtttggttagggcatcaattactgccagatggctatttacatttttatggtgacagcgaaggccgcattgtaaaaggcctgctggcagtgatcttaacggccgtagaaggcaagacaccggaacaagttttaacaaccaatctattggcgctgttccaacaacttgggctggaacaacagataagcggctcacggctaaacggcgtcaagtcgctgattaataccgtgcaaaacgccgcaagatcttatatgtaa

SEQ ID NO: 8222 - DNA, 813 bp, Photorhabdus luminescens
atgcaaacttctctttctgatgcatatatgcagcgctttgccgggactgcccgtttatatggacaaaaagcgctttctttgttttgccattctcatgtttgtgttgtgggtatcggtggtgttggctcttgggcggctgaggctctggctcgtacaggaatcggtgcgatcactctgattgatatggatgatgtttgtatcaccaatactaatcgccaattacatgctttaaaacagcatattgggcaaccaaaaactgaagtgattgccgagcgtattctggcaattaatccagagtgcaaagtgacttgtgttgatgattttctcacacccgataatgttgaagagatgatggcggctggattcagttatgtgattgatgctatcgatagtgtcaggccgaaagctgcgctgttggcttattgccgtcgccataaaattccgctggtgacaaccggtggagcaggagggcaacttgatcctacacagattcaggttgttgatttggcaaaaacggttcaggaccctttagcggctaaactgcgcgaaaggctgaaatctgattatcgtgttgtgaagaatggcaaaggtaaattaggcattgattgtgtgttttcaaccgagcaattagtttatccgcagagtgatggttctgtttgcgccgcgaaaagtaccgcagagggaactaagcgtatggattgcgcttctggttttggtgccgcaacgatggtcacggcgacatttggatttgttgcggtttcccatgctctgaaaaaaatgatagctaaagcgcaacgtcagggtgatctttaa

SEQ ID NO: 8223 - DNA, 1098 bp, Photorhabdus luminescens
atgaaatactggggtaagtatctgttgtgtggaaccgtgatttcactgttggttggatgtcattctcgcccaacagcacagggccaacaatatagagatggtcatattgctcaggatttacggttggttaatcaacctaatgcgcagggtaagccagttaatgcaaaggatttttcagagcaggttgcgctgattagtcagtctgctcctcgtctgtataatcgtaatagtttaacttttgacgctgttcaaaactggatgctagcgggtggtgaaaccagtaagttgcatctgtttaatttacgcgcttaccagatggaaggtgtggataattacggtaatgtccaatttaccggctactatacgccagtgttacaagctcgtcgtgttaaacagggagaatttaaatatcctctgtaccggatgccgcctaagagtaaataccgtttaccaagccgaactgaaatagacaatggcgcccttagccccagtctgattattggttatagtcgttcactgattgataattatattatggaggtacaagggagtggctatgtcgattttggtgatggtgggccactgactcttttgggttatgccggtaagaatggccatatttaccggagcattggcaagttgctgattgagcgcggagaaattgcgcaggaagatatctccatactggcgattcgtaaatggacagaatctcacagtgaggcagaagtccgtgaactgttggagcagaacccatcatttgttttctttaaacctgaaaactatgcaccggtacgtggtgcgagtagtgttcctttaattgcaaaagcttctgtggctgctgataaaatgcttattccaccaggaacaaccctgttagcagagatacctctgttggatagagagggtaagtttaccggtcagtaccagatgcggctggtggttgcattggatgttggtggggcgataaagggacatcatttcgatatctatcatggtattggtggggaggcaggtatagcggcaggtttctataaccactacggtcgggtttgggtgttaaaaaaagcgcagcctaccatgttgatggtaagtcagtga

SEQ ID NO: 8224 - DNA, 225 bp, Photorhabdus luminescens
ttgattagcgaaaattggttgcgggagccggatttgaaccgacgaccttcgggttatgagcccgacgagctaccaagctgctccatcccgcgtccgtttagaacctactttgtattttcctgcatcactaacgcctgctggaatcggttccattcgcaaatattgaactactttatagtgttggttgcgggagccggatttgaaccgacgaccttcgggttatga

SEQ ID NO: 8225 - DNA, 126 bp, Photorhabdus luminescens
ttgaagaatggcgagaacatagtacgtgacaccaaggctcaaattgccattgaccgacgcattatgcgcatggaactgatcacaaacccttgtccgagggtgtctgggaactgcgcattgacatag

SEQ ID NO: 8226 - DNA, 198 bp, Photorhabdus luminescens
ttgtccgagggtgtctgggaactgcgcattgacatagggccagggtatcgggtctattacgccaaatctggcttaactgtagttcttctgctctgcggcggcgacaaacgtaagcaaaacccagagcgtgtgaatactggcgtgaatggaagagtagaaacagataggagaacactttcggtggagttcgtaacgtga

SEQ ID NO: 8227 - DNA, 141 bp, Photorhabdus luminescens
gtgaccaaggaagctgagttgaatccgaaccagctctatcgcaccttgtcagccgagggcaacccggaagttagaagtctaagcacgattctgcgtgtcatgggcttgcgcctggcagttcaacctatcactacccactaa

SEQ ID NO: 8228 - DNA, 1245 bp, Photorhabdus luminescens
atgagtcattcagatcataatctgtcacgacgtcgtttgttgcagggagccgcagcgatgtggttgcttagcgttagccaggtgggttacgcagcgtcagcaaaaattatcgcagtacgtatttggccggcctctagttatacccgtgtgacgcttgagtccaatattccactcaaatatcgccagtttgtgctaaaaaatccaaatagaattgtggttgatcttgaaggtatacaactgaatcatactctaagtgggatgggggagcagattcaatctcgtgatccttatcttaaactggtgagggtagggcagtttaatcctaaaacggttcgtttggtgtttgaagttaagcaatcggtcagcccacatatgtttactttgaaaccggtggcgaaatttaaacatcgtctggtgttggatatttatccggcagagagggttaatacggatgatgatccattgcttgccctacttgaagagtataataaaggtcatttagcagaagatctgccagtagaaaaaccaaagtcgggcaaagcaggtaaagacaggccaattgttatcatgctcgatcctggacatggtggtgaagatcctggtgctattggcaaatataaaactcgtgaaaaagatattgttttgcaaattgctcgtcgattgaaaacgctcattcagcgtgaaccgggtatgaaagtctatatgacccgtaatgaagatgtgtttatcccgctcaaagtccgggtggcaaaagcgcgtaagatgcgggctgatctcttcgtttctattcatgctgatgctgttactaaccgagttgcccgtggctcttcggtttttgcactctcgactaaaggtgcaaccagtaataccgcacgttttctagcccagacgcaaaacgaagctgaccaaattggcggagtgagtaaaagcggtgataagtatctggatcatacgatgtttgatttgttacaaactgcgacaatcaatgacagccttaaatttggtagcgaagtgcttaagcgtatgggcaaagtgaataaattacataaaaatcgggtggatcaagctggatttgcggtactgaaagcaccagatatcccttcgattctggtagagactgcgtttattagcaatttggaagaggagcggaaactgaaaaccgcacgtttccagcagcaaatcgcagagtcaatttttgcgggtatcaaagcttatttcaagaatgggggtaatttggcaatttga

SEQ ID NO: 8229 - DNA, 1347 bp, Photorhabdus luminescens
atgaaagaacgaagcaccgagttagttgaaggatttcgtcattctgttccgtacatcaatgcacaccgtggtaaaacttttgttatcatgcttggtggagaggctattgctcacgaaaattttaccaatattatcaacgatataggattactgcatagtttaggcatccgcctggtcgtcgtttatggtgccagacctcaaattgagcaaaaccttgcagaccatcattacgaaccggtttaccacaaacacacccgtgttaccgataataaaacattagaattagtcaaacaatctgctggcttgctgcaactggatatcactgcacgcctttctatgaatttgaataataccccgttacaaggtgccaacattaatgttgtcagtggtaacttcattattgctcaacctcttggcgttgatgatggtgtggattattgccacagcggaaaaattcgccgtatcgatgagcatgccataaatcgtcaattagacaatggcgcaatcgtgctaattggccctgtcgcagtttctgtcaccggagagagttttaatctggcatttgaagatgttgctactcaattagctatcaaactacaggctgaaaaactgattggattctgttctactcaaggtgtacaagacaaagacggaaaaattctatcggaagtttttcttaatcaagcaccggaactgattaaagagctagaagttaaaggtgactactattcaggcacagtctgttttttgcggagtgcaataaaagcttgccgtcgtggcgttcgtcgcagccatttattaagttatcaggcagatggttctctacttcaagaattattctcccgagatggtattggcactcaaatagtgatggaaagtgcggaacaaatacgccgagctaatatcaatgatattggtggtattctcgaacttattcgcccactggaacaacagggtattctggttcgccgttcaagagaacaacttgagagagaaattgataaattcatcattatcgaacgcgataacctaactatcgcctgtgccgcgctctacccttatcctgaagagaaaattggcgaaatggcttgtttagcggtgaatcctaaataccgcagctctttaagaggtgaagtattactgaatcgcattgcggaacacgccaaacagctcggactggaaaaactgtttgttctgactacccgcagcattcattggttccaagagcgaggttttgagcccgcagaactctcaatgctaccgattcagaaacaagtgttatataactatcagcgccgttctaaaattcttatgctgaatttggaaccacagcctggattcacataa

SEQ ID NO: 8230 - DNA, 6393 bp, Photorhabdus luminescens
tcagtagaggaaataataagtatggaaaagaaatatactgtaacctataaagttgctccgatgggggctaagtatgtttatcaggaagataagaacgaacataaagcgggagacgtacactcttcagccggcggtcatatgtggtatgttttgaatgacgggagcggaagtgaaataagttacggttttgagtcaaggtatgatgaaccgtggggagaggggcgagtaacgaataatgataatgccgcctatcaacagacctcttacgaaaccaccgtagaattgactgaatttcagtacaacaggttaaaagctttttcagaaggcccatcgttagttggatttgatgctaagcattacaacgtggctaaaaacagttgcgtggatttcgtatttgcatcattaaaagccgttggctataacgaaaaaggtttcgagggagaactgttccctaatcataatcctatgcatttgcgtgatatgttgcaaaataatggaagtcgaattatccgtgacaacttgagtcgttatattcgttatagtgacttttattatctggacgatgaaagtggtcgagcgtgtttatggcttaggccagaggatacgaaaatcactctaccgatgaagccattgattaacatcgatatcgtgtccacgccaaaacctctgcggcatattcagggcgaaaacaaagctcagcaggatgttgctaacgggtttatacaaaattctgcaacacataaaatatctgccgtcggggatatgctcaataaaacagactttgcctccacccagatggcaggtcttgccaccggtggcattcgtcccggtgaaatgcagctcgaccccaatgtcaagcccaacagctatctgtcggagttctacaagcctttctaccaacccggagacactagcaagctggacttcggcctgcgcaacgctgtgacgttgaacggtttatcggcgatgacaacgtttaacacttatgttgacccgctgttattggatctgagcggcaatggtgtgcacatgactgacattcgtgacggcgtgttgttcgacatggataacagtggcacgcttaagcgcagcggctgggcggatcgcaataccgggatattggtgatcgacgatggtagcggtcagataaaaaatgccggccagatgttctccgaatactacggtggtaaggccggaataaacggtgccgcgggcgaaaaaaaattcaaggagggtttcggtgccttagccagtgaagatgccaacaaagacggcgtgattgatgaacgtgatccgatctggagtaaattacgggtctgggttgatggcacccacgatgcaaaagtcgatgcgggcgaactcaaaacactggcggaatggggtattactcagataaacgtccgggcttcgaacaaaacagacgtccgtgatgggaataaggtcgttgccagtgggtcgtttactatcaatggtaaaactcaggaagtgctggccgtcgactttcttggtgaccccgtcagtaataccttgagtactcagggagctggcacacgagtgacctccactcacaacgatatcataaccacggcttacgccagccagagtgaaacagatgaaaccttaaatgcggagcaactgggagtcagcaatctgtatggtggcagcggcaatgatacgttgattgcggcaaaaaccggcagctggctggttggaggcgcagggagcaatacctatgtcggtggtgccggcgatgacgtgtttgtcatcagcgcttctgacgatacgaaaaacattcacggcaatggcgggcacgatacggcgatcattgtcggtaaccaaggcgtggagctgaacatgggtcaagccagtttaaccatcgccgaaggcggaagcggcaacgatactatcataagcggtagtgtcaacggtgtctttatcaagggcggttccggcaattcgactctgataggtggcatgggtaacgacgtcctggtcggcggcagtgggcacaacaccatcgttggtggcacgggtaagtcggttatctatgccggtcctcagggcgacacaatttacgcctccaaagacggcagcatcattcacgctggcggcggcgatgataagattttcggtggtgtgggtgacgatgtgatcgaagtgggtcacggcaatgctacgattgatggggacggaggggtcaacatcgtcagcctgcacggtaaccacggcgattatcaaattacccgtaccgacagtgggtatgtggtggccgataaggtcgccgggcgtgacggcacggttacgctgaaaaatatccaaaaactcaatttttcagatatttcggcggttgatttacaaacacccaatgcgatgcctgtcgaggatgtcctcactcacgacaaggacggcaaggtttttgatcgtactcagcctcatctgattgccgcagaaagtctgctggctaacgatcaacaccttaacagtcagggtaccctgcgcattgccaatgttggggatgcgataggcggtacggtcagcctcacagctcagggcgatgtcttgtttacgccggatgcagattacaccggtgtcattagctttaaatatggggtaactgacgcagccgggaatccgtcagcatcggtagtcgatctcagcagtggggaaaccgcgccgatgcgcgccgttgcgacattattgaccccggaagtcccgctcgatccattagctgctcaacaatggtatttgagcgatgccaacattctgccggtctggaaggactacaccggcaagggcgtacgcattggtcagttcgagccgggcggtaagtttgccaccgcgcctgaaatatttgatatcaatcaccccgaccttgcggcgaatgtcgacaaagcttggttgcagactcaacaaaccaatggcaccttgccgaacgtggtctccaaccacgcgacaatggtggcgggtgtgatggtcgcggcgaagaataatacgggtggcgtcggggttgcccatgatgcgacgttgggcggctattatctggccaatgacggtgccgatcttgcgggactggggcatatggtcagttttgatattgccaacaatagctggggatttgccaacgatttcgcgctcagcagctttcagggcggctccatcaatactgccgcgtcgctgagcctgaatgcgcagtatgcggcggctaatggtcgtggcggattgggtaccgtcatcgtggcggcgggcggcaaccatcgtgcagaaggcggcaatgctcaggggtcgctgaccaataacaaccgcttttcggtggaagtcggtgcaatcaacgcacagggcgatttgtcgacgttgcagattggctcctcacccttctccaatccgggagccagcctgttggtttcggcaccgggcagcaatgtcgtgtctaccagctatatgctgaaaaccgaacgtggctcaactttcggcaatgactacaccagcatgcaaggcaccagctttgccgctccgatagtctccggtgttgttgcgttgatgcttgaggccaacccgaacttaggctatcgggatgtgcagcagatccttgctctgtccgctcgcaagatcaatgacccctctaccgcatggagcgataatagtagccatagctggaatggcggtggcatgcatgccagcaacgattacggttttggtcaaatcgatgcgcgagccgctgttcgcctggctgagtcttggatgactcaaagcaccgctgccaacgagttcgtctatagcgcatccagcggccctctggggaaaaccttggcagcaggtgaaacgctgacgtcgtccatcgccatgaatgccggtctgaatgtcgagcatgtcgagatcgattttgacgcccaggcaggccgtcttggtgatctgacgctcaaactgatctctcccgatggcactcagagcatcttgctcaatcgtcagggtaaggttccagacggcatgccgggcgcgagtgcgaccgatctgggtagtagccagtcggggacgttcaaatacagctttatgtcgactcatgatttgggtgaacgctcggctggcaactggaccctacaggtgagcgatgcgcattccggcctgccggtcacattaaatgcctggtcgctacgtttgtacggcagcaagagcacctcggatgacacttacttttacaccgacgaatatatccaatcggtggtcgggcaggccaaccgcgcagtgttggatgatgcggtcaatggcgtggcgggagggcgtaataccctcaatgcggcggctgtttcgcgggatacctcggtcaacttgctgaccggtgttgccagcattggcggcacagcgttgacaataaagaatccgtcgggcattcagaacatcgtcaccggtgatggcaacgatacgctggtcgcgggtaatgccgatgcattgcttgatggcgggcgtggaaacaacacactggcaggtggtgcgggcaaggacttctttgtggtccaccaccgtgaggcaggcagcgatgttatcagcaacttcgaggcggctcgtggcgaaatcatcgatctggtcggatttcgtggaaaaacgtttgccgatctgttgctgacgcagcagggggcggatgttaaggtcgatctgggtaaggggcagagcattgtcctgaaaaatcagccactcgccgggatcggtgcggcgaacttcaagttccaggatacttttatcgccccggtggcttacacgaatagcgacgccgcaacgctccagccacaagaaggcttgggaaccgtgatccttaagggcggcggcaagggcgtcatgctcaccagcgatgctcaggggcagatgaaatttagcttgaatgggacgatctatagtcatgacagtgcggcgtcagacgtttttgtggtggccgcccaaccgggtgccagggactacaagaatgcattacgtgggttccgtcacggcattgataaaattgatttgcgtcaagccggcgtcactgatttcagccaactcacaattgctaagagtcatcgtggcacgatcaacggtctgtcacaaattcatggcgttgaggtggtctttaatggggtcagcggtactgattcaaacgtgaagttgctgtatctcgatactctggatacttcgcaggtcgatgcggccgacttcctttttgcggagcttacaccagatttggtcccaacggtcaagccagtggtgacgcaatctcttgataaaccgacggtgactgtaccgggttcattgacaccaattgtcgacccccttggcgttgataagcctttaccactttcccctatcgacttgaagccgattagtattcccccaaggaagccggttagcattccccttattgactggagtctgactaaaatttcttctattgatattgaccgggatatgattaaagttacccctgttgagctgaatccgaccagaattaacactggccttgtcgacctgaggtcgcgttttgaccagaatgttgaccggatgtcactgattgaccggaagccgattagcactcctcctgttgagccgcgcacaacacttaacgttccgaaaattgagccagcagtggaatctacaccggtgaccactgaccctgattccattacggtcaaaaatcccttttccgaggttacgttgggggacgagagcaagactatcaatgtgaaagctatggatagcaaaatagttgccggtaacggtgacaataaggttaatgtgatggaccgctttgccgatatcacgttaggtaatggtaaaaacgtcattgttggcaatatcgacaaactaacagttggacatggcaacaacaccattaaagcgtcgggaaccttcacgaaagtaaacgtcggggatggcaataaccatatcgtgacccgcggtgagatgtcgacggtagaagtcgggaatggtgataaccatatcatgaccagcggtattatgtcgaaagtaaaagtcggggagggtaataaccatattgtgaccagtggtactatgtcgacggtagaagtcgggcatggggacaacgatttggaatttagtggtgatatggggaacttggtgtttggaaaggacatcagccctgagcgtctgtggttccagcatgaagggcaggatctgcaaatttcggtcattggcagcaagcaggaggtaacgctgcataattggtatgccaattccaccgaacgaccacgtaacatcatggccggtgatggtcatcggttgatggaaagtgatgtcgaaaatcttgtccaggcgatggctgccttcgcgccgccgacacctgcgaccacaatgctcggcgatgtcgagcaacagcggctgcaacctgtgctggcagccaactggcactga

SEQ ID NO: 8231 - DNA, 522 bp, Photorhabdus luminescens
atgaaagtattacaggtacacgaaagattcaaaaactggcgcaacattattatttttatgagctgtgccttattaatggcctgctctaagcccattgatatatacaaaccgattgacgtatcgaagtctggtcagtcagtcaaaattgattttgaaatcagcaagaaaggaaattatcagtttgccttgctgtttgataaaggggatgactatgaggaaatgaaaaagcgacttgaattgttcgggaatgttgataaggacggggtaataatccccgtttcgcttcatttagttaaagatagcaagattttttttgacaagaaaataaatgcaggaggacgtggttggggacagtctcttgattacgaaggaagaagaataaatatggctgtgcgaaacattaaaatacttgagttaccccctggacgttactctgcggtaattaccatcctggaggatgtccctgtttttaatgacatcgagagttttgtcgaattctcctattttaatccaaaaatttga

SEQ ID NO: 8232 - DNA, 522 bp, Photorhabdus luminescens
atgaaattattacgtatatataaaaggtttaaaaattggcgaaatattattgtttttatgagttgcaccttattaatggcatgctctaagttcattgatatatacagaccaattgacgtatcgaagtctggtcaatcagtcaaaattgattttgaactcagcaaggaaggtaattatcagtttgccttactgtttgaaactggggagggttatgatgaaatggaaaggcggtttaagttgtttgggagagctgataaagatggagtaataatccctgtttcactctatatcgttaaagatggcaagattttttttgataagaaaataaacgcttcagggtccgaaggagggcgtgtcttcaattacgaagagagaagtataaatacggctgtgagagaaattaaaacatttttattacctcccggacgctactctgcggtaattaccaccctggaggatgtccctgtttttaatgatattgagagttttgttgaattcacctattacgatccaaagatttga

SEQ ID NO: 8233 - DNA, 522 bp, Photorhabdus luminescens
atgaaagtattacaggtatacgaaaggtttaaaaattggcaaaacattattatttttatgagttgcactttattaatagcatgttctgagcccattaatatatacagaccgattgaggtgtcgcattctgatcagtcagtcaagattgattttgaaatcagcaagaagggagattatcagtttgccctgctgtttgctactgggcgtggttttggtgaaatgcaaaggagggataagttgttcggaagtattgataaggacggggttgccatccccgtttcacttcgtgtggttaaagacggtaaggttttttttgacgagaaaataaacgctgtgggaagtggttgggggcgtaccttctattacgaagagagaagggtaaatacgactgtgcgagaaattaaaacactttcgttaccctccgggcattactctgcggtcattaccactctggaggatgtcccagcctttaatgacattcagagttttgtacaactcatatattttaatccgaagatttga

SEQ ID NO: 8234 - DNA, 531 bp, Photorhabdus luminescens
atgaaattgttacgtatatatgaaaggtttaaaaattggcgaaatattattatttttatgagttgtatctggttagtagcatgctctaattacattgatgctatacgcaagccgattgatgtgtcgcattcgggacaatcggttgagattaattttgaactcagcaagcgcaaggctggaaattatcaatttgctctgctgtttgctactgggggtgattataatgaaatagacaggcgatctaagatatttgggagtgttgataaggatgggattgctattcccgtttctcttcgtctggttaaagacggaaaggttttttttgacaagaaggtaaatgcggtaaggctcgatgggtggcaagccttctattacgaaaagagattaataaatacgactgtgcgcgatattaaaacacttgaattgctccccggacgttactctgcggtcattaccactctggaggatgttcctgcctttaatgacatcgagagttttgtcgagttcgcctattacaatccgaaaatttaa

SEQ ID NO: 8235 - DNA, 522 bp, Photorhabdus luminescens
atgaaaatattacgtatatatgaaaggtttaaaaattggcgaaatattattatttttatgagctgtacattattaatggcctgctctaagcccattgatatatacaaaccgattgacgtatcgaagtctggtcaatcagtcaaaattgattttgaaatcagcaagactggaaattatcagtttgtcctgctgtttgctacaggggatgatcatgatgaaatggaaaggcgatttaagttgttcgggagtatttatgatgacggagtaacaatccctgtttcactttatctggttagaaatgataaggttttttttgatgaaaaaataaactcagggggatacgacggggggcagtctttctattacgaagagagaagggtaaatacggctgtgcgagaaattaagacattttcgttatcccccggacgttactctgcggtcattaccactctggaggatgtccctgcttttaatggcattgagagttttgtcgagttcgcctattacaatccgaaaatttaa

SEQ ID NO: 8236 - DNA, 522 bp, Photorhabdus luminescens
atgaaaatattacaggtaaacgagagattcaaaaactggcgcaacattattatttttatgagctgcgccttattaatggcctgctctaagttcattgatatatacagaccaattgacgtatcgaagtctggtcaatcagtcaaaattgattttgaaatcagcaaggaaggcaattatcagtttgtcctgctgtttgctactacggatgattacgatgaaatggcaaggaggtttgagttgtttgggagagtttataaaaacggagtaataacccccgtttcactccatatcgttaaagatggcaagattttttttgacaagaaaataaacgctgcgggatccgaaggagggcgtgccgtcaattacgaagagagaaggataaatacggctgtgcgagaaattaaaacattttcattacctcccggacgctactctgcggtaattaccaccctggaggatgtccctgtttttaatagtattgagagttttgttgaattcaatcattacgatccgaagatttaa

SEQ ID NO: 8237 - DNA, 522 bp, Photorhabdus luminescens
atgaaagtattacgtatacatgaaaggtttaaaaactggcgcaatatgattattttcatgagctgtacattattaatggcctgctctaagttcattgatatatacaaaccgattgacgtatcgaagtctggtcaatcagtcaaaattgattttgaaattagcaaggaaggcaattatcagtttgtcctgctgtttgaaactggggagggtcatgatgaaatggcaaggcggtttaagttgtttgggagagctgataaagatggagtaataatccctgtttcactctatatcgttaaagatggcaagattttttttgataagaaaataaacgcttcagggtccgaaggagggcgtgtcttcaattacgaagagagaagtataaatacggctgtgagagaaattaaaacattttcattacctcccggacgctactctgcggtaattaccaccctggaggatgtccctgcttttaatggtattgagagttttgttgaattcaaccattacgatccgaagatttga

SEQ ID NO: 8238 - DNA, 1416 bp, Photorhabdus luminescens
atgagcgctaccctttccttattgcagcgttatcgtcacgcgtggcgtgagtcttggcaccaacgtaaaaacatggacgtgtcgccgcgactggctcatgaattacagtttttaccgacggctttggagttgcaggaaacaccggttcacccagcaccgagaattttcacctggaccattctgggttttgctgtattggcgttgctctgggcctacatcggcaaaatcgaggtagtggctatcgccccgggaaaggtcgttcccaatggcaagaccaagttgattcaatccagtgaaacggcggtggtcagagcgatccacgtcaatgacggccagtcggtgaaagttggcgagttgttggttgagctcgacccgacggcggcgagcgccgatgtcagccggatccagagcgagctgctggctgctcgtatcgacagtgcgcggagtgccgccatgctcgacgcgatcaatcaacaaaagtcgccggcgtcgctggtaggaacgattgacaacgccaaccctgagcaggtactcagtgcccaacgctggcttcaaggacaatatcaggaataccgcagcaacctggagttggtggatgcagaaatcctccaacgcagcgccgaaatccagtcagcccaggcccaggtggctagtctgcgaaaaacgctgccgattgcgacacgattggccgaggattaccaacggttattgaagaaacagtatgtgtcgcggcatgaatatctggaaaaagagcagacgcgactggatctgcaacgtcagttaagcgtacagcaggccagtgtcttgcagcacgccgccgctcaggacgaggcgcgacgtcggcgtgaggctgttgttgcgcaaaatcgccgcgccatgctcgacctgcaacaggaagccaacaaaaaggtagcgaccctggttcaggagctggcgaaggcccgttatcaggaaactttgaccagcctcaaagccccggtggccggcacagttcaacaactcgctatccatactgtcggtggtgtggtgacacctgctcagccgctgatggtcatcgtccccgcagaccaatcggtagaagtggaggctaggctggaaaacaaggatgtgggttttgtccatgttggtcaaccggtcaccgtcaaagtggaaacttttacttttaccaagtacggcaccgttgacggcgaagtgctcaacgtgtcgaacgacgccatcgaggacgaaaagcatgggctcatctatagcagccgcattcgtttgaagtctgatcacgtgatggtcaatggtcagcgagtcccactgtctccgggcatgtcgatcacggcagaaataaaaactgatcaacgtcgcgtgatcgattacttcttgagcccattgcagcaacatatagatgaaagtctgagagaacggtag

SEQ ID NO: 8239 - DNA, 2136 bp, Photorhabdus luminescens
atgagtactgagtcaccccactcttccccggggctggacaccggcctgatttgcctggcaatgttggccaggtttcacaacatcgctatatcgactgaacaactttcacacgaattttccactgccagccaaggttttaccctgaaagagctgctgctggctgctcgtcattcagggctgaaagccagggctgtacacacaacactggccagacttgaacatactcccttgcccgccattgccattgaccgagatgggcaattttttattttggctaaactggataaagaacaggctctgattcaggacccacgttcggcgcgccccgaagttatcagcttcgagcagcttgagcagcgttggacagggcaattggtgcttgtgcgttccagtaacggtctgcccggagagacttctcgttttgacttcacttggtttatcccggctatcgtcaaataccgcaagttgttgggtgaagttttgctggggtcttttgccttgcagttgtttgccctggtgactccgttgttctttcaggtggtcatggacaaagtactggtgcaccacggcctaaccacactggatgtggtcgcggcgggattgctgggcatcatgctgttcgagtcggccctgagcggtctgcgtagctacgtgtttgcccacacgaccagccgtattgatgtgcagttgggatcgaatctgtttcggcacttgattaatctgccgctggcttacttccaggcccggagagtcggtgattctgtggctcgtgtacgtgaactggaaaatatccgtagcttccttaccggcaacgccattaccctgatgctcgacgtgcttttttctctggtgttcatccttgtgatgttctattacagcggctggttgactctcattgtggtgttatcattgccgctttatgcactcgtctcggggttggttacacctctcttgcgtaagcgattacaggatagcttcacccgcaacgctgagaatcaggcattccttgtcgaaacggtcaatggcattgataccctaaagtcaatggcggttgaaccgcaggccatccgcaagtgggacaaccaactggcggcttatgttgccgccggtttcaaaacacagaccttatccactatcgccaatgaaagtgtttcgcttatcggcaagttagtgacggttgccacactctggctaggtgcccgcctcgtgatagacgggcagctatcggtgggggaactgatcgcattcaatatgctggccggccgtgtcagcggccctatcatgcgtttggcgcaactgtggaccagcttccagcagaccggagtctcagtgcagcgcctgggagatatcctcaattcccgtacggaattgtctcaggctacacgtagcacagtaccgccgctcaaggggcaggtagagttcgaacaggtgcattttcgttatcgggctgatggttctgaggtgctgcgcggcgtcaatctggtcattggcgcgggagaaatcattggtgtggtgggccgctccggttccggcaaaagcactctgacccgcttgttgcagcggctctatgttccggagcgcggacgggtcatggtcgatggcatggacttggcattggctgatgtgtcctcgctgcgccggcagatcggcgtggtgttgcaggacaatatgctattcaaccgcagcattcgcgaaaacattgccttgagcgatccgggtgcgccgctcgaagtggtcatgcacgccgcccgcatggctggagctcatgaattcatccttgaactgcccgaaggttacgacaccattgtgggagaacacggcgcgtcactttcaggcggtcaacggcaacgggtagccattgcccgcgccttgatcggcaatcctcgcattttgattttcgacgaagcgaccagtgcgctggactacgagtctgagcgggtggttcagcagaacatgcaaagcatttgcaaggggcgcacggtcatcattatcgctcatcggttgtccgctgtacgcgacgcgcaccgtatccttgtaatggatcgcgggcagatcgttgaacagggcgcccacgccgagttactggcacgtcaggacggccactattcacgactgcatcgaatgcagcagggatga

SEQ ID NO: 8240 - DNA, 1857 bp, Photorhabdus luminescens
ttgatgatttcgttattacaacaagcagtaaacctcaggcttttgcgttcattggacttacagtttgctcatgtattgattgaggataaagatcctgttttgttgttggtgatggcgctgttaagcgctgaaaccggtaccggccatgtttgcctgccggttaatcggataacgcctgaatatttttttgatgggcgacatcgtgaatttgccgaacagttatggcaggttgcgggaaaacctgatgagcagagtttgcggatagcactggaaaattgtgctgcggttagtgatggatttcaacccacgcctgttgtgctttcccatgatcggctttatttgcagagaatgtggcaaagtgaatgtcaggtggcggcttttttttccggcaatcaaccaatcgataatattcaggaacagcaactgaaagttgttttagatgaattattcatgctatctgaggaaatggtggactggcaaaaaatggctgcggctgtcgcggtgactagcagaatttcggttatctctggcggaccaggaaccgggaaaactaccaccgttgctaagctgttggctaccttaattaaacttgaacctgataaaaagcgggttatccaactggcggctccgaccggaaaggcggccgccagattgaccgaatctcttaatagtgcggtcagaaaattgcctctgacggaggaacaatttgcatgtatgccggatcaggcgcagacgattcatcgcttgctaggagcgcagcctgatagccagcgcttgcgctatgatcgagataatccattgaaccttgatgtgctggtggtggatgaagcttcaatggtggatttacccatgatggctaggttgattgatgcattgccaccgaaagcgaaaattgttctgcttggtgaccgagatcaattggcatcagtggaagcaggcgcggtgttgggtgatatttgccgttttgccgaactcggatatagcgtaacgagggcgcaacagctaagcagattgacgggatgccggttagttgcgggtgatcagcaaaatatcccagaggttcgtgatcgtttgtgtcttttacgtaaaagttatcgttttaatgtggattcggggattggtcaattggcgacggccgttaatcagggaaagagtcgacaagctctcgctattttgcagcaaccgttgaaggatatctgtttttacccattgtctgacgatgaagattatcagcggttgttggcagaaacggtatcgggttattacctttacttgcatctggtggcaaaacaggcaccagtcaaagagattttagatgaatttaaccgctatcgtttgttgtgtgcacttagagaagggctgtttggtgtcagtgggcttaatgagcgtatagaacagctattacatcgtcaggggcttattcgtcgtccagtcgggactttcagccgtggttatgcagggcggcccatcatgatatcgcgtaacgacagcacattgggcctatttaatggtgatattggtattatgctcagagacgaaaatcatgaactgcgtgcttattttcaactgcctgacgggcagattaagggagtccagccaagtcgtttaccacaacatgaaactgcgtatgtgatgaccgtacataaatcgcagggctcagaatttgaacataccgctttggtattgccaacgcaatttgtgccggttgtcagccgtgaactggtttatacagcgataacccgtgccagagaaaaactgactctttatgcacatgaagcggtattgcgtcaggcaatccagacaccaactcaaaggcgaagcgggttagcagagcggcttagcttacaggtggattag

SEQ ID NO: 8241 - DNA, 3609 bp, Photorhabdus luminescens
gtgatcacagagatatctgtccacaggcttaatgtattaactctgccgctgactggtcagcggctgatcgaagcatcggccgggacgggtaaaacctacaccattggcattttatatctgcgtcttctacttggactggggaaagatgccgctttttcacggcctttaagcgtggaagaaattctggtggtgacttttactgaggcagcaacaaatgagttacgtggtcgtatccgtgaaaatattcataaacttcgccttgcctgtattcgaaatgcaatagaagagacagaacctgcctatcaacagctattgaatgaaatcccggataaagggcaggcggctatttggttactcgccgcagagcggcaaatggatgaagcggcgatttataccattcatggtttttgtcagagaatgttggcacataatgcctttgaatctgggattttgtttgaacagacattaattcaggatcaacatccgttagaacggcaagggtgtgccgatttctggcggcgacactgttatccattgccgttatcaatggcgcaggtgatcagccaggagtggagtgggccggaagccctgttggctgaattatacccttatttacaaggggatatgccatatatggttgatgcgccagccagcgatgaaacgctgttaagtcgtcatgaaaaaattacccagttgatcaacgatgttaaataccaatggaatgaagctgcgggagagttgcacgatttaattgcgggttctggtgtcgataaaagaagttacagtagtaagcacttaccaaattggctgaatagtgtcatggattgggctcagacgcctacagaggattatcagttgccaaaagcgctggagaaattccggcagtcagtattggcagaaaagacaaaaaaaggtgaggtacctgaacattcactttttgttgtgatagatgatttatatcagaaaccacttactttacgtgatttgattatctccagagctattattgaggttcgccaatcaatccgtcaggaaaaattaacacgtggtcaaatggggtttgatgatttactaacccgtcttgatgatgctctgaaaggtcccggcagtgatttgcttgctgagacaatccgccgacgctatccggttgcgttgatcgacgaatttcaggataccgacccacagcaataccgaatttttcataccatttatggcactcagcctgaaaatggattgctatttattggtgatcccaaacaagctatttatgcatttcgcggcgcagatattttcacttatattcgtgcccgctctcaggtaagtgctcactatactctggaaacaaactggcgctctgcctactcgatggtacaggcagtaaacaaactgtttatgcgttcagaaaatccatttttgtttgagcagattccttttattgaagtttctgcggcagagaaaaaccgagagctctcttttagctatgacggtgaagaacaggccgcactgaatttctggttacaaccaggagaaggtgtttctatcggagattatgagcaaacgatgtcacggctctgttctgcgcaaattcgtgattggttgcaggcaggtagtgaagggcgggctttgttacataaaagtgaaggttctcggcctgtgacggcggctgatattacggttttggtgcgtagtagaaaggaagcgacactgatccgtaatgcacttaatctgttatctatcccttccgtatttctttctaaccgagaaagtgtatttgataccgtagaagccaaggatattctctggttgctgcaagcggtgttatcaccagagaaagagcgggtgttgagaagtgcgcttgccagtggtttgtttggtttgaccgctcgacagatagacaaactaaatcatgatgagaagacgtgggaccagttagttgatgagtttgatggctactttcgtctgtggcaacgccgtggcgtgttacctatgctacgagcggtaatcgccaaccatcatattgctgagaatttgcttgccagttatgacggtgaacggcgcttgacagatgtgatgcatattggtgagttgttgcaggagatatctttacaacttgacagtgaacatgcggtcactcgctggttggctcagcaaatctctcatcctgatccacaatctgaaaatcagcagatacggctagaaagcgatcgtcacttggtacaaatttgtactatccataaatctaaggggctggaatatccgctggtatggttgccatttatctgtaatttcagggagcagaagcgggcgatatatcatgatcgtacaagctttaatgcttgcctcgatatctttcctgacgacgagacgattgaactggcggaacaagagcgattggcagaggatttgcgtttactctatgtcgcattgacgcgttctgtttaccattgcagtgtcggcgtggctccgctgataaaaggcaataagaaaaaggccggggatactgatctgcatcaatgtgctctgggctacctgttgcaaaagggggtgaaaggggatgctgattttctggcaacatcgcttaaagaattaagcggagatggcattgttatatcatcaattaatgagactgatgatcacccttggcaatcgcaaagtaaaaatgatttagtcctgtcggccaggcaatttaaacgtagagttcaggatgattggcgtattaccagttattctggtttacgaaactctgtagttcatcgtggtaatgcttccgcttattttgctggagaagaatctattgacgtgattgttcagtctattgcgccaaaacttgatgttgatgctagtggtgaaagacagttagtagaacaacctgaaatgacaccacatacattcccacggggagcttccgcggggacttttttacacgctattttggaagaacttagtttcagccaattacctgatgagaaatggttggcagaacaactgcaatcagccggatttgatgaacgctggagtgggacattacagcaatggatggtcgatatttttactattccattgaatgatgaaggagtgcaattggcaaaaattccgctacatcatcaacaggatgaaatgcaattttatctgccggttgaacaacttttgcgatctcagatgttggatacactgatacgtcgttatgatccaatttctgctcgctgcccccaactggaatttcagcaggtgaaaggagtgttgaaagggtttattgatttggtcttctgttggcaaggtaaattctacctgctggattacaaatcaaactggttgggagaggagagtcagttttatactcgccaggcaatggaaatagccatgattgagcatcgttatgatctgcaatatcaactttatacactggcattgcatcgttacttgcgtcacaggctggctaattatgattaccaacaacatttcggcggcgtgatttatctgtttctgaggggaatagataaacaacagccggggaatggtattttcaattgtcggccatcggctgaatttgttgatgctttggatctgcttttcagtggtagtgaacagcttgagaaagagaaaaattga

SEQ ID NO: 8242 - DNA, 2892 bp, Photorhabdus luminescens
atgcataaacattttgttcgcatgattactgtgatgttcctgcttttttggggaacgacgagttatgcgcaaacaccacaatcatcacaactactgcaagagacaatttataaaagcgagagtgatcatcgtcagtatcagggaatcaaactggcaaacaatatgacggtcttgctggtatctgatgagaaggcaaccaaatctctggcagcggtagcaattccggttggtagtatggaaaaccctgacagccagctcgggcttgcacattatctggaacatatggttctgatgggatctgaacgttacccacagtcaggtgatttatctgaatttttgcaaaaacatggtggtagctataatgccagcaccgcttcttaccgcacagctttctaccttgaagtagaaaatgaagcgttagctcaagccacagatcgtctggctgatgcactggctgagccgttacttaatccagtgaatgcagatcgggagcgaaatgcggttaatgcagagctgacaatggcgcgttcgcgtgatgggatgcgggttgctcaaatacgggcagaaaccttgaatcctaagcatcccaatgcccgtttttctggtggtaatctagaaacattaaaagataaaccggggagtaaattacagacagaactggtggatttttatcaacgctattattcagccaacctgatgaaaggtgtcatttacggtaatcagcctatcgataaactgactcaaattgccgttgatacttttggtcggataccggatagaaaagcgagtgtgccggtgattactgtgccagcagtaacggaaaaagagaaagggattatcatccattatgttcctgcccaaccgcaaaaggcattgcaattggaattcagtattgacaataacagtgctgatttccgcagtaaaaccgatgaatatctcggttatataataggcaatcgtagcctgaatacattatcagattggctacaaactcaaggactagcagaaagtatcagtgccggtgcggagcctatggttgatcgcaacaaaggtatcttttttatttatgtgacgttgacagataaagggcttgcacaacgggatcagattgttgcggctatttttgcttatattaatttattgaaacaaaaaggcattcagaaaagttattttgatgaaatcgcgaaggttttgaacctatctttccgatatggttccgttgttcgtgatatgcattatatcgaatggttatcggatgctatgttgcgagttcctgtttccaatgtactgaatgccggttatttagctgataactatgacccgaaagcaatcgccaatcggcttgctgagttaacacctgaaaatgcaagaatctggtatatcagtccaaaagagccacacaataaacaggcttattttgttcaggcaccttatcaggttgatcgaattacattgcagcaacgagttaaatggcagcaattagaggagcagatgagcttttctctgcccgcaccaaatccttatattcctgacgatttgaagctgataaaagcagataagagtaaaaaacatccagaaatgatcgttgaacagcagaatgtccgcttgctttatatgccgagccaatattttgctgatgaacctaaagccagcattacgcttgatttgcgcaacgcagaaggtttgaatagcgctcgtgagcaggtcacttcctctttgcttgattatttggcagggctttcccttgaccagcttagttatcaggcttctgttgcaggaatgaatatttctacgggctcatctcaggggctgcaattaggagtaagtggttacactcagagtctgccagcgcttttaacctctttaatcagtaattacatggcattcacaccaactgaggagcaattggcacaggctaagtcctggtatcgtgagcagatagcggtttctaataacgctaaagcttatgacatggctatgcagccgttgaagcgcctttctgtggtgccttacattgaacaatccacccgtctggaagcgctggagactatcacggttcaggatattgttacgtatcgtcatgagatgataaaaaatgctgctttgcaaatgatgatcattgggaatttgaccgaacagcagagcaaagtgattgctgaatctgcccataaccaactggcaaatcaaggaaatgattggtggagtggggataaggtggtgattgataaaaattacccggttaatttccagcgtgttggcagcagcacagatggtgctttagcagaggtttatattccgacgggttataaccgtatagaaggttatgtttattccagtttgttgagcaacatgctccagccgtggttctatgagcagttaagaacagtagagcaactggggtatgcagtgtttgctttcaataccagtgtgggggaacagtgggggttgggtttcctactgcaaagtaatagcaagcaaccaaaatatttgaatcagcgttatcaagatttctatcagaacgtgggtaataaattgaaagccatgcctcaagctgattttgagcagtacaagagtgcgctgattaatgaaaagcagcaaccgccacaaactttctatgccgaagttgcccgtttctccggtgatttcagtcgtaataactttagttttgacagtagagataaaatgcttgagatcctaaagaaaactacacagcaacaattgattagtttctatcggaatgcggtcatcaaacatatagggttgtcattcatttcgcaagtgattggtaaatcaggaaacttggatggatatgcgaaattgaaaggttggaaaacctatcaaaatgtgactgaatttcagaaacggttacctgttgaggtaagagctcagtga

SEQ ID NO: 8243 - DNA, 3390 bp, Photorhabdus luminescens
atgtttaaggtttatcattctaatcaattagatcttcttaaggaattgatagcaatattgatcgggggtaacccactgactgatccatttgcgcaggaagtcattttggtacaaagcccaggtatgtcacagtggctgcaaatccaactggccgaaagaataggcatatcagctaatatttcatttccgcttcccgctacgtttatttgggatatgtttaccaaagtattgcctgatattcctaaagaaagtgcttttagtaaagatgctatgacatggaaattgatggcgttattgcctcaattgctgcctgaagcagagtttgttggactcaggcactaccttgatcaagattttgataaacggaagattcatcaattagctggacgggttgctgatctgtttgaccaatatctcgtttatcgcccgcaatggttggaaagttggcagcaaggtcagcttattgatggtttgagtgataatcagttgtggcagaaaagattatggctggaactgacgaaatatactcaccagttacaacaacctcaatggcatcgtgctaatttgtatcagcgttttatttcgatactggaaaataatactgaacaggaaaatagtactgatttttcagcttgtttaccgaaacgggtatttatctgtggcatttctgccttaccaccggtctatttacaagctttacaggcattggcacggcacattgatattcacctgatgtttaccaatccatgtaaatattattggggagatattcagaattatgcttttttggcaaaactgagtagccgtaaaccacgtcattataagagcgaacaggagctggaatattttaaagatcctgataatgctcaatcattgtttaacggtgacggtgaacaagatgtcagtaatcccttgttggcatcgtggggacggttgggccgtgataatctctatttattgtcgcagcttgagcagagttcggatattcacgcttttgttgaattagaacaggataatctattacatcaattgcaaagggatattctctatctggaagatcatgcccaaattggttcaacaaaagaaacatttgaaaacagtttgaaaaaaagagtacttgatccgttggatcgttctttatctttccatgtttgccatagccctcaacgtgaagtggaagttttacaggatcagctattgagattattggaagataatccatcgctgacgccaagggatattattgtgatggtcgcggatattgacagttatactccctatgttcaggcagtatttggtaatgtctctgttgaacgctatattccatttgctatttctgatcgtaaagctcgtcaggcacattcgattttacaggcatttattacactgcttgatttacctcaaagccgttttacaacagagcaggttttagcattgttggaagtacccgcgctggcgaataaatttgacatacatgaagatggtttgcgtttgttaagacgttgggttgaagaatcaggtgttcgttgggggctgaatgacgataatgtcgaagagctatctttaccggtgacaggtcagcatacctggcgttttggactgacccgaatgttattgggttatgcaatggatagccgatcgggcccttggaaagaggtattgccttatgatgaatctagtggtttagctgcggagcttgccggccaattggctgaatttttaatgcaattaagctattggcgcaaaattcttgctgagagccgggcattaacgggttggttacctgtctgccagcagttgctggaaacattttttgtctcagataatgagactgaattagtactagcaatgatagaacagcaatggcagaaagtcatagtcaatggcttgaatgcccgttatcaggaaagtgtgccattggttttattgcgagatgaattggcacttcagtttgataatgaaaaaatcagtcagcgttttctcgccggatctgtcaatttttgcactctaatgccgatgcgttctattccctttaaggtcgtctgtttattgggaatgaatgatggtatttacccccgttcaattccaccgcttggatttgatctgatggcggaaaaaggtcagaggggagacagaaaacgacgggatgatgaccgttatctattccttgaagctttgatatctgccgaacggtttctttatatcagctatattggtaagtctattcgtgatgatacggaatgtaatccttccgtgctggtgaatgaattactggattatgtttgccaaagtttttgtttaccgggaaatgaaaaactgaatgttgatgaaagtgctacccatgttagaaaacatctgttgtatcttcatgcccgcgttccatttgcaccggaaaattttataccgggcagttatcagcaaagctatgccggggagtggttaccggcggcaactgaacaaggtgcagcatacgctgaattttgccaatctattgaaatggcgcaaattcaagaaattacacttgataatttgagcagtttttaccgccatcccgttcggttttttttccaacgttgcttgaaagtaaatttcgttattgaagaaacggaattaccggaggaagaacctttcgttttagataatcttcaacgttatcagtttaatcagctattgttaagtgcactaattgaacagcaatcgcctgaaccacttttcaatcggctgcgtgctgctggaggattaccttttggtgcttttggtgaggtttattggttaagacagcaaaaagagatgcagcctttggcggataaaattcgtgaacaacaaatggaaactttatctgtcgatttacatcataatttaggcccggtgattctgacagggcgtattaataaggtgcaaccggatggcttgctacgttggcggcctgccagtttgacagccaatgatggcatgcaattgtggattgagcatctggcttattgtctgacaggtggtgagggtgaaagtcgcagctatgggcgtgatggcaacgaatggcgtttcgctcctgtaccttcagagtacgctaaagattatctgaatcaattgattgaaggctatcagcgaggaatatcagcacctttaccgctgttttgtaaaagtggttgggcgtggctttcagcatgtatgaataaagagactggtgagattgatgatagtgatgaaattcaatcaaaggctgaaagtcagttattgaaagcatggcttggcgatcagggacgcagaggcgaaggggatgatccttatatccaacgagctttcaggcaagtggataaatcatttttggcaaaatttaaacaggaagcgctcagttatttgttaccgatagcgcgatatcagaatacatag

SEQ ID NO: 8244 - DNA, 378 bp, Photorhabdus luminescens
ttgttcatgaagtcagagcttttttatgagcatcaagcaggcatgagtttgcccgaagtaatgattgctgttatggttttttcggtctctttattgggattaatgcgttatcatcaggcgttattatttgggtttcagcaacattggcagcaatcaaaggcagataaattatcttatggatatctggaacaatatgaattaattgcaggtcaaaatgctttaccagaaataacattgccaccgggatggcatgctgaatttcagacggcctatccgttgtctagctgctatcagcttacagttatagtgatgacgccttataatcagcaaagtaaagcaagccgattgatttgttcaaatgggagttccgatgtttaa

SEQ ID NO: 8245 - DNA, 486 bp, Photorhabdus luminescens
gtggctgagcattctccacatgtctgttttcaatatcagcaaggtaatgtattgctcatttcagtgctgatattattgaccgttagcctgatgatgttaaaggctttgcatcatcatctggataacgctttaatcatgatggtcgatgaacgcagatatctaaaagcttttcagcaagcagaatcttcattggcatggggaatcgctcagtcatggccacttcatagtagtcaaatagaagatagtaataaaacagaagagtggtattgccagcaacaacaagaatttcatttgaccagttgtttaaaaaggcaatcgagtcatttttttctactaaaaggtatggctgatgtggcacccgggcaatctgttggattatatcaatggatgaaattacactcatctggtggagatgattctcttattccggtagagagtggttggctggatttttgtcctgaggtagatgtgggattttgttcatga

SEQ ID NO: 8246 - DNA, 588 bp, Photorhabdus luminescens
atgaaacataaaaaccaatctggaatgacattattagaggttattgtagcaatggctattggtagtattatcttactggcgattgctaaaagttaccctattttaactaaacaaataatggagttatatcagagatatcggttaggctattttgttaaacaaacgttacatattatagaaaaggatattcgccgtgctggatattgtcagcattattgtgatggaaagccaatattcatcgataataaaagtgatgagagtgaggattcatgtctgattattgcatacgatcttaatataaataaccaatgggagccgccagaacacagtgaatcggaattctttggctatcgtcttagcaataagtcagtagagtggaaaaggggggcgggtaactgtcaggaaaatggctgggaaaggctgtttgatccaaatgagatagtggtagattcctttaaagctgaaaaattaccggcaaaagatggcttagtttttatcaaattggtacttattgcacattggtttaaacatccatcgataaactaccaatatcagtcagtaatacgtttgcgcaatatcaggggataa

SEQ ID NO: 8247 - DNA, 504 bp, Photorhabdus luminescens
gtgaatataatcggccattataatattgataatcaatcaggtttttctttattggaattaatggtcgttattgttttggtgtcaatattttccttatggggcgtacaggaatggggctatcaccaggaaagagtcaggttacaggaatcagcacagaagatattgacatttatatccaggcaacaatctttggcaaattatttgaacaaaagggtgatattgtggttgaaaactggcaaggattggtgcatagcgttctctaattcggtattagctaattgtaatttagaaaatgttgagggaataaactcaccctatcaggatgttattatcagttcagcaaccaaggatcagatagagtttcatggaataagaaacaccatgatacctgcgagttttactttggcgaattccgcaggtgaaatatccattattttttcttcacgaggtaggataagatcatgtagtaataataagtttaatcaaattccagcttgtgattag

SEQ ID NO: 8248 - DNA, 333 bp, Photorhabdus luminescens
gtgatatataaagttcaaattaccgaaacagcctaccagacactttctattattgaagactacaaggctaatactatagggttggaagcagctcagaatttggtggatgatttattaattgaatcatcggaacggataggggagaacccgttagcatacggctattgttcaatgttgctggataaaggaatgcaatttcaccaatggctttccaaagatcggcaatttcgtgttatttatgatgtagttggggatgaaattcaaatattggcatacgcaagcacaaaccaagatttaattgccctcttgtaccaactactgatcatacactga

SEQ ID NO: 8249 - DNA, 267 bp, Photorhabdus luminescens
atgaatactatttcccaaaaaaaagctagggatctgcttagtaatccaaagcatttcgagggtggtgtgtttattaccaaaaacgggatatctgaattgtttattcaaccaatggcagaacgtgagagagagttggccgaaagaggcgtagaacgacaggcgatagcattgcttaaaatcgcgatgttgtctaagaaagatactatagaaggtagaaaaatgacacttgaagaagcacttcgtaggcgcaaggaacgtcgggtgtga

SEQ ID NO: 8250 - DNA, 795 bp, Photorhabdus luminescens
atgaaacagtatctggacttaatgacaagagtgcttgcagagggcactccgaaagcagaccgcaccgggacggggacactctcgattttcgggcatcagatgcgtttcaatttacaggatggttttccactggtcacaactaaacgttgccatatccgctcaattattcatgaacttctctggttcttgaatggtgataccaatattaaatatctgcatgaaaatggggtgactatttgggatgaatgggcggatgaaaacggtgatttagggccggtatatggtaagcaatggcgcgcatggggtaccgcagatggccgccagattgaccaattgaaaactgtactggaacagcttaaaagcgatccagattcacgtagaattattgtttcggcttggaacgttggtgaattggataagatggcattagcgccatgccacgctttcttccagttttatgttgcggatggcaaactttcctgtcagctttaccagcgctcctgtgacgtattccttggcttaccgttcaatattgccagctatgcattgctagttcacatgatggcgcaacagtgtgatttggaagtaggcgattttgtctggaccggtggtgatacgcacctttatagcaaccatatggagcagacaaaattacaactcagccgtgaaccgcgttcactaccaaaactggtgataaagcgtaaaccggcatcactttttgattataaatttgatgactttgaaatagttgattatgacccacatccaggaataaaggccccggttgctatttag

SEQ ID NO: 8251 - DNA, 876 bp, Photorhabdus luminescens
atgagtaacagctacctggcatttcctaatattgacccggtcattttttcaataggtccaatagccctccattggtatggtttcatgtacttggttgggtttgtattcgccatgtggctagcgacacgcagggcagcgaaacccaatagtggttggacaaaaaacgaagtagagaacttgctttatgcaggttttgctggcgtatttgttggtggccgtctgggctacgtcctgttttataatttccctgcctttctcgacaaccccctttatttgtttaaagtttgggatggtgggatgtctttccacggtggtttagtgggggttatctgcgcaatgtggtggtttggccgcagaacgaaacgccatttcttacaagttgctgacttcattgccccgttagtcccttttggtttaggcatggggagaatcggtaattttattaacggcgagttgtggggacgtgtcacattggatacgccgtgggcgatgttattcccaagctcccgtggtgaagatattgcattggctgcaaccgatccctcactgttatcagtacttgagcaatatggtgttctgccacgtcacccttcacagctttatgaaatggcgttggaagggatcgttctgttcattattttgaatttatatatccgtaaacctcgcccaatgggcagtgtttccggtttattcttaattggctacggtattttccgagtgatagtcgagttcttccgccaaccagatgcacaactgggcttattcgacgggatcagtatggggcaaattctttctataccaatgatcctggcgggaatattaatgatgatatgggcatataaacaccaaggtaataaggtacaagaggtaaaatga

SEQ ID NO: 8252 - DNA, 2247 bp, Photorhabdus luminescens
atgctcatgcgtttacgggaaattgttgaaaaagttgctatggcaaccaatctggccgaagcgcttgagctattggtgaacgagacttgtctggcaatgaacacggatgtctgttctatctatcttgctgatcatcaacggcggtgttattacctgatggcaactagagggttgaggaaaccccgaggaagggctatcagtttggcttttggtgagggcgttgtcgggcaagttggtcaattgtctgaactgattaatctggcggatgtccgcagccatccaagtttcaaatacttgcctcaagttaaagaggatagttttcgcgcttttttgggcgttcccgtggtttaccgccgtcaattgcaaggtgttttggtcgttcagcagcaggaacaacgcttgtttaatgaaaccgaagagtcctttatggtgacgcttgcgacacaactcgcggtgatccttgctcaagctcagactaaaggcttgtttggtcgatatcggcagaccagaattaaagccttggcaatttccaatggcatcgtgatggctcagggatggcaagattgctcccagccctcacttgaccaaatttttgaagcctcaactcttgatcatgcagcagaacgttctcgtttaattcaggcactggaagatgcaatagcagaatgtcgtcggctcagtaaacgttttactgtgggttctcaaaaagagagcgccgcgatttttgatctttattcctaccttttgaatgatccccagttgaaacaagatctgttctcctgtgttgaacagggctctgttgcgcaatgggccgttaaacaagttattgagaaatacgcagaacaattttccagcttgcaggatgcttatatgcgggaaagagcatcagatttacgggcacttggacagcgattattatttcatctggatgattcacttactgccagtcatcaatggcctgaatggttcattctggttgcagatgaactgagtgctaacctattggcagaaatgccgcaggaaagattagcaggggttattgttcgtgatggcgcaactcattcacactctgccatattggttcgagcaatgggtattccggccattatgggggcggatatccagccggaactcctgaacaatcgtatgctaattcttgatggtttccgtggggaagtcttcattgaacctgagccactgatttcgcaggaatataaacagattatcgaagaagaaaaggcacttagcagattggctgagggagatgtggagcaggaagcacggttaaaaagtggcgagcgcattttggttcagcttaatgcgggtttgagcctgaaatatgagttgcagatcagtaatagtattgatggtgttggactctatcgcaccgaaataccctttatgctgcactgtggtttcccatcagaagatgaacaaaaagcgcgttatcaggagatgttacaattatttcccgataaaccggtggtactgcgtacacttgatattggtgcggataaacaactgccttatatgccgatcagcgaagagaacccttgtttgggatggcgtggtatacgagtgacgctggatcaaccggaaatttttcttatccaactgcgggcaatgctcagagctaacgctgatatgggtaacctgaaaatcctgctgccaatggtgacgagtgtagaagaaattgatgaagctaagcgattggtagacagagcgaaagaggaagttgagcaaatgctggcgcgccaaatatctatgcctcagctcggtgtcatgattgaagttccttcgatgatttttctgttgccacaactcaaaaacagagtcgattttgtgtctattggcaccaatgacctaacacaatatctattggcagtggatcggaataacactcacgtcgcttctctttatgattgcctacatccggcggtgattcgggcattaaaactagtatttgaaaatagccagcgggcaggtcttacgatcagcatttgtggtgaaatggcaagtttccctatgggagcgctgttattgattggtcttggctatcgcagtttgagtatgagtggttgtagtgtgccaagaattaaatatttattacgtcatctggagttggctcaggttgaaaaattaatggccgaaatcctacaagctgaaaccagcctaagagtgaaggagctgtcagcaacatttatggagcagcatggggtgggcggtttggtcagaggtggcatttaa

SEQ ID NO: 8253 - DNA, 531 bp, Photorhabdus luminescens
gtgatcgatgatgatggctaccgcccgaatgtaggaattgtaatttgtaatcggcaaggccaggttttgtgggcccggcgttatgggcagcattcctggcaatttcctcaagggggaattaatccgggggaatcaccagaacaggctatgtaccgggaactgtatgaagaagtggggttaggtcggaaagatgtacgcattctggcctctactcgtaattggttacgttacaaattacccaagcgtttggtgcgttgggatacacgacctgtctgtattggtcaaaagcagcgatggtttttattacaactgctctgtaatgaagaagatattaatgtgcaacacagtaataccccggagttcgatggttggcgttgggtcagctattggtatcctgttcggcaggtagtctcttttaagcgtgatgtttatcggcgcgtgatgaaagagtttgcttcggttgtaatgccaatgcaggaaagcgtatctctgccacgttcttcgtattcttaccgtcgtaaaagaagttag

SEQ ID NO: 8254 - DNA, 1014 bp, Photorhabdus luminescens
gtgtttaagacgttattttccaaattaatcgtactggcagccctatcagctcctgcgttgctattaagtcaagttgtacaggccaagccagtattaacggtctatacctatgattcttttgccactgaatggggacccgggcccgcaattaaaaaagcatttgaagctgaatgtcactgtgaactgaaactggttgctctggaagacggtgtttccttgctcaatcgcctaagaatggagggcaagcgtactgctgccgatattattcttgggttggataacaacttgattcaagcagcccaacaaacagggctgtttactgaaagtcaagtggataccagcaaactgacactgccagtgtcatggaataacaaggtattcattccttatgactatggctattttgctttcatttacaacaaaaagactttaccaaacccaccaaaaagcatggatgagctcatcaacagccacaataactggaaagtgatctatcaagatcctcgcaccagcacaccggggcaaggtttgctgttatggatgcagaaaatttacggtgatgatgccccacaagcctggcaaaagctggcaaagaaaacactcaccgttaccaagggctggagcgaagcttatggtctgttcctcaaaggagaaggcgatctggtgctgagttacaccacttcaccgggttaccacctgttatctgagaagaatgacgattacactgcggctacattcagtgaaggtcattaccttcaaatcgaagtggccgcacaactggcctccagcaagcaaccggaacttgcccagaaatttatgcagtttatgctgacgccaactttccaacaggaaattccaaccactaactggatgtatccggtcattgatatcccactcccggaagtatatttgcagctttccatacccgaaaaatcgctacaatatcgcgcggaagaagtcgcaaaataccgtaaccaatggattcgtacatggcaaagcgctgtcagccgctga

SEQ ID NO: 8255 - DNA, 1611 bp, Photorhabdus luminescens
atggcaaagcgctgtcagccgctgatagccggatggctgttaccgggggcgattgccgccggttttttactgttggtcgccttactggcattcggaacgctctggtttaattcacctgcaagtgattggtatttattgatagaagatcgctatttgtggcacgtggtacgtttcacattctggcaagcctttttatcagcactattttctgtcattccggctatttttctttccagagcactctatcgccgtcattttccaggccggaccctctttctgcgcctgtgtgctatgacgctggttttgcccgtgctagtcgctctattcggcattctggcggtttatggtagaaccggctggctggctcagttctgcaaatggatcggcatcgattaccctttcaccccttacggtttatcaggcattttgctggcacatattttctttaatatgccactggcaacacggcttttactgcaatcgctggaaaatattgcggtggaacaacggcaattagcggcgcagctaggtatgaatgaatggcaacatttccgttttgttgaatggccttatctacgccgccagatcctgcccactggtgcactgatttttatgctctgtttcgccagttttgcgactgtgctggcgttaggtggcggacctgctgcaacaactgtcgaactggcaatctatcaggcgttaagctatgactacgatctcaaccgtgccgcgttactggcgttgattcagattacctgctgccttggccttgtgctcctcagtcagaaacttaacagtgctctatctgtcggctacagcaaccaacagcaatggcgtaatccacaagatactctgttgagaaaaatctgcgacagcttgttaattatcgccgcattattactactcgtgccaccattgctggccgttgtcgtggatggccttaacagcgggttgcttaatgtattacgccaacctgcattgtggcgagcctttatcacctcagcggtgattgctttaggcgcggggttattatgcgttttattcactatgatgctgctgtggagcagccgtgagctgtacctgcgtcattccccccattggggacaagtaatggagatgagtggtttgttaatcctctctatgccaggcattgtattggcaacaggattctttctgttgctcaatgataccgtcggcttgccccgttcaccctacggtctggtgattttaaccaacgcactgatggcaattccttatgcactgaaagttctggataatccaatgaaagatctggcggctcgctataatccactgtgtcgctccctgaatatccaaggtattaaccgactgcgctggattgaactaaaagcactaaaagttccgctggcacaagcactggcctttgcttgtgtcctttccattggagattttggcgttgtcgcgctgtttggtaatgaagatttccgtaccctgcccttctacctctatcagcaaatcggggcttatcgtagtcaggatggcgcgatcactgctttattgctgttattgttatgttttacgctgtttagtttacttgaacgcttaccgagaccacgtaatgctcaaacttga

SEQ ID NO: 8256 - DNA, 708 bp, Photorhabdus luminescens
atgctcaaacttgaaaatctgacttaccgctatgaacatctgatgatgcgctttgacttacacattcaggccggagaacgtatcgcaatcctaggccctagtggggcgggtaaaagtacactcctgaacttaatcgccggctttcaaacagcagaaaaaggctccctatggctgaacggagaaaatcataccagcacatcacctgctcaacgcccggtttccatgttgtttcaagaaaataatctcttctctcatttgacaattgagcagaatatcgggctaggtttacatcccggattacgtctcaatagcacgcagaaacagacattacagcaaatagtctcacaagtttcattggaagattgtctgccccgtctgccagctcaactttctggtggacaacggcagcgggcagcattagcccgttgtctagtacgccaacagccaattttattacttgacgagcccttttctgccctagatccggcactgcgtaatgaaatgctggtattgctggaacaagtttgccatgaacgccaacttacattactgatggtttcccataatctggatgatgccgctcgtatagctgatcgcgctttattaatcgttgatggcaatatccattatgacggcttaacaaatacgctggttgccggcactgttcctgaagcagctattctaggcatgaaaaccgatgctatatag

SEQ ID NO: 8257 - DNA, 195 bp, Photorhabdus luminescens
tatcaccggtctttgccgtatcaaaatagtggcaggataagctatgtcatgacactcttcgagccagaactactggaaaatctgcatttatcaccggactatgatcacgatattaaccagcaaattcagcctatcgctgatgctatcctgccgctttacaggatgactttacaatttcgctcaccggacagatag

SEQ ID NO: 8258 - DNA, 2913 bp, Photorhabdus luminescens
atgccatttaccctcggtcaacgctggatcagcgatacagaaagcgaacttggattaggaaccgttgttgcactggacgcacgaatggtcactttgctctttcctgccagcggtgaaaaccgcctctatgcacgcaatgattctcctattacccgtgttatgtttaactcgggagatgttgtcaccagccatgaaggctggcaactcaaagtagatgaaatccaacaagaaaatggcctgctgatttatacgggcacacgacttgatactctggaagaaaatatcagtctgcgcgaagtgttccttgacagtaaacttaccttcaacaaaccacaggatcgcctgtttgctggtcagattgaccgtatggaccgctttgccttacgttttcgcgcccgtaaataccaaagcgaacaatttaaactggctgaaagtggtttgcggggtatccgcgcaagcttgatccctcatcaacttcacatcgcaaatgaagtcggcaagcgctacgcaccaagagttctgttagccgatgaagtcggtttgggtaaaaccatcgaagccgggatgatcatccaccagcaattgctggccggtcgtgctgaacgtgttctggtgattgtgccggatagtcttcaacatcaatggttggtagaaatgctgcgccgtttcaatttgcgctttgccctgtttgacgatagccgctatatcgaagcacggcacgatagcgataatccatttgaaacagaacaattggtactctgttcactggattttgcccgccgtaataaacagcgttttgagcatatgcttgaagccagctgggatttgatggtggtggacgaagctcaccatctggtctggagcgaggatgcacctagccgtgaatatcaggttgtcgaacaattagctgaacagatcccaagtgtgctgctattgactgcaacaccagagcagctaggacaggaaagtcattttgcccgtctacgcctacttgacccaaaccgtttccacgattatcagacttttattgacgaacaacaaaaatatcgtccagttgccgatgctgtcacactgctgttatcaggtgaacaacttaataataatcaattaaacctaatgggtgagttgattagtgagcagaatattgagcctctgctgaaagctgccaatagtaatagtggtgaaagtgaaactgcacggcgtgaactgatttccatgctgatggatcgccacggcaccagtcgtattctgttccgtaatacccgtaatggtgtgaaaggcttcccccatcgggaattgcaccagataaagttgcctctgccatcccaatatcagaccgccattaaagtctccgatattatgggcgctaaaaaatcgctggaagcacgcgcatgggatatgctctatccagaacaaatttatcaagagtttgaaggcgaaaacgctacctggtggaactttgatcctcgcgtagaatggctactcggttttctgatggcaaatcgccatgaaaaagtgctggtaatttgtgcgaaagcaaccaccgctctgcaattggaacaggtactacgtgagcgagaagggattcgtggtgctgttttccatgaaggtctatcactgattgaacgtgatcgcgccgcagcctattttgcttccgaagaagaaggagctcaggtattactatgctccgaaattggctcagaaggccgcaacttccagttcgccaaccaattagtgatgttcgatttaccattcaatccagatttactggaacagcgtatcggacgtctggatcgtatcggccaaagccgtgatatccaaattagtgtgccttatctggagaataccgcccaagcagtcctgattcgttggtatcacgaaggtttggatgcattcgagcatacctgcccaaccggtcgtactatttacgatcactattatgaagctctgctgaactatcttgccaaacccaataatcaggaccaagaaaaatttggtgaatttattgatcagtgccgtcagcaacatgagcaactcaaacagcaactggagcaaggccgtgaccggctgctggaaatgaactccaatggcggcgagcatggtttgcgactggcagaaaaaatttcagagtatgataatgatactgaattggtgaacttctctctcaacttatttgatatcgttggtatcaatcaggaagatcgcaatgacaatatgatagtgctgacaccatccgatcatatgctggtcccagatttccctggattaccaaaagatggttgtactatcacttttgatcgtgaacagtcactgtcccgtgaagatgcccagtttatcagttgggagcacccaattatccgtaatgggttagatctgatcctttccggtgatacgggtagctgtgcagtatcccttttgaaaaataaagcattacctgttggaaccctgctggtagagctgatctatgtcgttgaagcacaagcccctaaacgcctgcaattgacccgcttccttccaccaacgccattgcggatactgatggacctgaaaggcaataatctagctgatcaagtggagtttgaaagctttaaccgccagcttaatgcagtgaatcgtcatactgcaagtaaactggtcaatgcggtacaaaaggaagttcacgctattttgcaacaagccgaaggtttagtcgaaactcaggcaaaatcattgattgaacaagcagaacaggaagcagatgaaaatcttgctgctgaactttcccgtttggaagcattgaagacggtcaatccaaatattcgtgatgatgaattggaagccattgaagccaatcgccaacagttactgcttaacttaaatcaggcaagttggcgtctggatgctattcgccttgttgtcgttacacatcagtaa

SEQ ID NO: 8259 - DNA, 651 bp, Photorhabdus luminescens
atggaagcttataatcctcctaccgatccttggttacatgtgctctatcaggatcaatatatcattgtggtcaataaacccagtgggctactttctgttcccggtcgggcagcagagcataaagacagcattatgacgcggatacaacaacagtttccagccgcagaatctgttcaccggctggatatggcaaccagcggcgtaatggtagttgcactgaccaaagatgcagagcgtgaattgaaacgtcagttccgtgaacgagagccggaaaaaacctatattgctcgggtttggggacgtctggaaccagaaacgggtcttgtcgatttaccgctgatttgtgactggccgaatcggccaaagcagaaagtgtgttttgaaaccgggaaatcagcccagactgagtacgaagtactcgcttacgaagatgaggcaactcgaataaaactctcaccgatcactggtcgttcacatcagctcagagtacatatgctagcacttgagcacccaattttgggagaccagttttacgctcatcagcaggcaagagcaatggcacctcgcctgcaattacatgcacaagagttatatatcacacatccggtctatggaacgccaatgcattttcagtgtaaagccgatttttaa

SEQ ID NO: 8260 - DNA, 822 bp, Photorhabdus luminescens
atgcattattggggaaaattgcttgggctgatctttggtgttgtgtctggagcaggcttctggggtattgtcattggtctatttattggccatatgcttgatagggctagtgtacggggaaaccaaggtttttttgcaaataatcagtctcgccaactgctatttttcagcagtacttttcaggtgatgggccatattactaaatcaaaagggcgggtgactgaaacggatatccggcttgcgagccagttaatggaacgaatgcaacttcacgggcaagctaggattgcggcacagcaggcttttcgtgaaggtaaagagcccaattttcctttgcgtgagacactaagacaattgcgtcgagcctgttttggccggtctgacttaattcgcatgtttttggagatccagttacaggcggcattttctgatggtcaattgcatccgaacgagaggacggtgttgtttattattgctgatgaacttgggatctctcgtaaccaattcgaacaattccttgccatgatggaaggtggccgcaatttcggtgatggaggcgagtggcagcaacggcagtatggcggttatcagaaggctgcgcaggggccaacactcgcggacgcctgtaaggtgttgggggtgcgtgaaaaggatgatgcgacgacaattaagcgtgcctatcgtagattgatgagtgaacatcatccagataagctggtagcaaaaggtttaccaccggaaatgatggagattgctaaacaaaaggcccagtcaattcaggctgcctatgatctcattaaaaaagagaagggttttaaatag

SEQ ID NO: 8261 - DNA, 2325 bp, Photorhabdus luminescens
atgaagaaatgttatccaactttgctggccacaacggtatgggccgcactttatggtcagtatgcacatgctgatctcgcagcgcagtgtatgctgggtatacctgtttatgatcagccaatcattaatggcgatttaaatcaacttcctatcaatattctggcagatgattcacgcgcagattatccgcgttccgctaaatttatcggtaatgttaatattaaacagggtaataaaaccctgactgccgatcaggtacaacttgatcaaacagaagataaagttccgttaagaaccgtaactgcaacgggcaatgtccattatgatgatcccctgattattctgaaaggtccacgcgcttggtctaatttaaataataaagataccgatatgtatcaaagtgattatcagatggtcgggcgtcaaggacgcggcaccgcagacaaaatgaaactgcgtggtgaaaaccgttatgccattctggataacggtacttttacttcctgcctgccgggtaatgatagctggagcgttgtcggctccgaagtcattctcgatcgcgaagaagaagtggctgaaatatggaatgcccgtttcagggtggctaacgttcccatattttacagtccgtatcttcaattaccgatcggtaataaacgccgttccggttttcttattcctaacgccagctattccaaaaatgacggctttgaatttctgctgccttattattggaatattgcaccaaattatgatgccacaattacaccgcactatatcagtaaacgtggtttaaaactggataatgaattccgttacttaaccaaagcaggcacaggtacccttgctctcgactggctgaataacgacgaacagtatgtcaaagacaaaaagacaaacacacgtaccgccagagaaagtgataatcgctggttattttattggagacacagtggtgtgatggatagggtatggcgttttaatatcgactataccaaagtcagtgatcccgaatatttttctgatttcagctctcaatatggttccaccaccgatggctatgccacacaaaaatttagtctgggctatgctcaacaaaactggaatgccacgctatcaactaaacagttccagattttttctaaagataccagtagaaaagcttacagagcagaaccacagttagatttgaattattacaaaaacgatctgggtccatttgaccttaaagtttatggtcaggcggcaaaatttaccagtgtaggtaaaaataacccggaagcaacccgctggcatctggagccctccattaacctgccactctccaatggttgggccagtatgaataatgaagttaagctgatggcgactcactatcagcaggatattcccaaagctaccgagaatgctgaatataaagaatctgttaaccgggttctgccacagttcaaaagcgaagccaaaatggtatttgagcgttcaacgtacctgaacaacaattacacccaaacgctagaaccgcaggttcagtatctgtatgtgccatacaaagaccaagataatatcaataatttcgactcatctttactgcaaactgattacaacggcctgttccgtgaccgcttttatggtggcctggaccgtatttcatcggccaatcaagtgactaccggtctcactacccgtatttatgatgaaagtttggttgaacgttttaacctgtcattaggtcaaatctattactttgaacgtccacgcactggtaaagaaaccatcatcaacagtaaagatagtaccggcatgatgacctgggcaggtgatacttactggaaaattaatgattcttggggcttgaaaggtggtatgcagtacgatactcgcctgggcaacgtaacgatggggaatgcagtactagaatatcgccgtgatgaagaccgactggtgcagttgaactatcgttttgttgacagagattatatccaagctacagctaagagtgctccggctttccagcaagggatctctcaagtcggtctggttgcaagttggccgttaagtgagcgctggggtttagtaggtgcttactattacgataccaaagaacagcaaccggcaagtcagttagtagggctacagtacaacacttgttgctgggcaattaatgttggctatgaacgtaagattgttggttggaaagacaacaatagcgaatatgacaacaaatggtcatttaactttgaacttcgtggcttaagtaacaatcatagtctgggtagcagaaaaatgttgcagtctggcatcatgccataccaacgtgcattctga

SEQ ID NO: 8262 - DNA, 1302 bp, Photorhabdus luminescens
atgaagaactggagaactctcatttttggattgatgttttcagtgagtactgccttcgctgcacctcagcaaatggataaaattgctgcggttgttaataacggggtggtactggagagcgacatcaataaccgcttacaatctgtcaaacgggatgcgcaacatgccggccagcaaataccggatgagcaaacgctacgtcatcagatccttgagcgtctgattatagataatatcctgctacaaatggcaaaacagatggggatcaccattcctgatcaagcattggattctacaattgccaatattgcagcccagaaccacatcactgtggatcaaatgaaacatcgcattgctgctgacggaatgaatttcgatacttaccgtgatcaaatccgtaaagagatgctgatagcagaagtgcgcaataatgaagtccgccgtcgtgtcaccattttgcctcaagagatcgacgccttagttaaacaaattagcaaccagaatactaacgatactgaactgaatatcagccacattctgatcccattgccagaaaatcctgatcaggcgcagatggaaaaagccatgacggtagtgcagaaaattatgtctgaacttaaacatggtgttgatttcggtaaattggctatcgcctattctgccgatccacaagcgctgaaaggcggtaatatgggttggagtaggcttcaggagttaccaactctgtttgctgaacaactgcaattagctcagaaaggtgccgttgttggcccaatccgttctggtgttggtttccatattctcaaagttaatgatatccgtggcggtaatccaaccatcgccgtcactgaagttcatgcccgccatattctattgagaacttctcctgtcatgaccgatgatcaagcgcgcaccaagttgcagcaaatcgccagtgacattcgcagtggaaaaactgattttgccgatgccgccaaagagttttcagacgatccaggctccgccctgcgtggtggtgatctcggctggacggctcctgatatctacgatcctgctttccgtgacgcattaatgcgactgaacaaaggtgaaatcagtcagccagttcactcatcttttggttggcatctgatccaactactggacactcgcaaagttgataaaacagatgtcgctcagaaagatcgtgcttaccgtatgttgttcaaccgtaaattcaccgaagaagcacaaagctggatgcaggaacaacgcgcctcagcttatgtgaaaattttagatggcaacgatgcacaacaataa

SEQ ID NO: 8263 - DNA, 1020 bp, Photorhabdus luminescens
atggcaacgatgcacaacaataaaccgattattatcaataaaccaattgttattacccccggcgagcctgccggggttgggcctgatttaacagtggctcttgctcaacaaagttggccaatgcaattggtcgcttgcgcagaccccaacctgcttctcgacagagccagacaacttaatttacctttgcaactacaagaatattctgctgacaaaacccccgagccacaggctgccgggacattgacaatactgccagttcctcttcatgtgcccgcaatcgctggcgaattgaatcaagaaaacggtagatatgtcaccgaaacactggcacaagcttgtgacggttgtttaaacggggaattttcagcattagtcacagggccagttcataaagggaatatcaatgatgccggcgtgccttttatcggccataccgaattctttgccgatcgcagtggatgccagcgagtcgtcatgatgcttgcgacagaagaacttcgggttgccctagcaacgacgcatctacccattgttgatgtaccaaagtccatcactttcgatagtctgcgggaagtgattactattcttaaccatgatttaaaaacaaagtttggcctggcaaaaccccgtatttatgtttgcggtctgaatccccatgcaggagaaggcggccatatgggacgggaagagatcgatgtcattattcctgcgttagccagtctgagagcagaaggtatcgtgctggaaggccctttaccagcagataccctgtttcaacctaaatatcttcaacatgcggacgccgtgctctcaatgtatcacgaccagggattacccgtgttaaaataccaaggttttggcagagcagtgaatattacattgggcctgccgttcatccgtacttcggtcgatcatggcacagcattggaactagcagggacaggtcaagctgatgtgggaagctttatcaccgcattgaatttagcaattaaaatgatacaaaacagtaatgaataa

SEQ ID NO: 8264 - DNA, 819 bp, Photorhabdus luminescens
atgaataatagagtccaccaagggcactttgcccgtaaacgtttcggtcagaacttcttaaccgatcaatttgtcattgatagtattgctgccgctatcaatccacaacccggccaagcagtgttggaaattggccccggtcttggtgcattgacagaaccggtcggcgaacgtatggataaaatgaccgtggttgaactcgaccgcgatttagccgcacgtctacaagttcatccacaattaaaagataaacttaccatcatccagcaagacgccatgacggttaattttggcgaattgtctcagcaaagagggaagccgctacgcgtctttggtaatttaccttataatatttccacgccgttaatgttccaccttttcagctatactgatgctattgctgatatgcattttatgttacaaaaagaggtggtgaaccgtctggtagctggccccggaagtaaaactttcgggcgtttaagtgtcatggcccaatattattgtcaggttatccctgtgctggaagtaccgccaaccgcgtttactcctgcacctaaagtcgattcagccgttgtacgtctggtaccgcacaaaagcataccgcatcccgtcaagaatattcgtatgctgagccggatcacgactcaagctttcaaccaacggcgtaaaactatccgtaacagcctcggtgatctttttactgtagaacagctcacagaacttggtatcgatccaagtactcgtgcagagaatatttctgttgaacagtactgtaaaatggcaaactggctatcagaacaacctgaaatgcagtcataa

SEQ ID NO: 8265 - DNA, 378 bp, Photorhabdus luminescens
atgattaatacgcccagggtttctattcaggtacaaagtgtttatgtagaaagccaatcgtgtcccgatcaacggcgtttcgtttttgcctatacaattactattcgaaatcttgggcgcgaacgggtccaattaattaatcgttactggctgattaccaacagcgacagccatcaaacggaagttcaaggggaaggtgttgttggtgagcaacccataatccagccaggtaccgaataccgttacaccagcggggcgatattggaaacgcccttgggtactatggaaggccattatgaaatgattgatcacaatggtgaaccatttcgcgttgctattccggttttccgtctggctatcccaacgctgattaattga

SEQ ID NO: 8266 - DNA, 828 bp, Photorhabdus luminescens
atgtctacatatctcattggtgatattcatggctgctaccgtgaattgcgtgctttattaactaaggctaattttgatcctacaaaggatacattatggttaacgggggatttagttgcccgaggcccagactctcttaaagttctccgatatgttaaacagttaggttcagccgcaagaatggtattaggcaatcacgatctccatttattgggcgtttatgccgggatcagccgtaataaacctaaagataaaattgatacgttactgtctgcaccagatgccgatgaactaattaattggctacgcaaacaaccgttactacagttcgatgatgatttaaaactgctcatgacacatgccggtattacgcctcaatgggatttggaaacagccaaaatgtgcgccagcgaagttgaaactatgttcaacagtagctgttaccctctgtttctcaattccatgtatggggatatgccaaacaactggtcaccagaactctctgggctggcacgtttacgtttcagtactaatgcattgacacgtatgcgttactgttttccaaatggtcagttagacatgttgtgcaaagataaacccgaaaatgcgcctgcaccgttaaaaccttggtttgaactagaacggcaaatcccaccagagtatgccatcgtttttggtcactgggcatcattggaaggccagggaacacccgatagcttttatgcattggatacaggctgttgttggggaggacaactgacgatgttgcgttgggaagataagcaatattttacacaatcatcgttaccggcagtaaaacagcattaa

SEQ ID NO: 8267 - DNA, 486 bp, Photorhabdus luminescens
atgaatatcagcttgatcgctgctttagctatggatcgggttatcggcatggagaataaaatgccgtggaatctaccgggggatctagcctggtttaaacgtaatacattgaataaacccgttattatggggagagtgacttatgaatctataggtcacccgttgccgggaagactcaatattgtattgagtaatcagccgggtaatgacgagcgtgtaacttgggtcagttcagttgatgaagcactggctgtagcaggtgatgcagaagaggttatggtcatgggtggtggtaaagtttatgaccaatttatttcacgagcgagtcgtatgtacctgactcacatcgatgcagaagtgataggtgatacgcattttcctgactatgaaccggatgaatgggattctgaatttactgagtaccatgatgccgatgaattaaattctcacagctactgttttgagattttacaacgtcgtctctaa

SEQ ID NO: 8268 - DNA, 615 bp, Photorhabdus luminescens
atgctggaaacatcactagtcgtcatcattatctcaacgttgggtatgctctctcccggccccgatttctttctggtagtcaaaaatgccatacgttatcagcgttctgctgccatgatgacagttgcgggcttaatcgccgctatcacttgtcatatggcttactgtgtcgccgggttagctattgttatcaccacaacgccgtggctatttaatctgatgaaatatgccggagcggcttatcttatttggatcgggatcaatagcttgctttctcgcggaggcaacagcattctcccagacaatcagccacgacagattatcactttcaaaaaagcgtttatgcaggggttcttatgtaatttgctcaaccccaaagcaacgttgttcttcctggcaatatttactcagttgctaaatgtcaattctggtgttggtgaaaaattatggtatgcctctattatctggggattgtcagtcatctattggccaatattagtcatattgattcaaagtgcaccggtacgccgcggattagctaaggctcagaagattatcgataaattactaggcattgttttgattggattaggtgtcaaagtagcactgggataa

SEQ ID NO: 8269 - DNA, 3225 bp, Photorhabdus luminescens
atggcaaaacgtactgatattaaaagtatcctgatcctgggagcgggtccaattgttattggtcaggcttgtgaattcgactactcaggagcacaagcttgtaaagcgttacgggaagaaggttatcgtgtcgttctggtgaactcgaaccctgctaccattatgactgatccagaaatggccgatgccacttatattgagccgatccattgggaagtggtacgtaaaatcattgaaaaagagcgtcccgatgcgattctgccaaccatgggcggacaaactgcactcaactgtgcgctagaactggagcgtcagggagtactggaagagtttggtgttaccatgattggtgctaccgcagatgcgattgataaagcggaagatcgttgtcgtttcgatatagcaatgaaaaagatcggtttggaaactccgcgttctggtatcgcccattcaatggaagaagcgttggcagttgctgatcaagtcggttttccttgtattatccgcccttcctttactatgggaggaagcggtggtggcatcgcctataaccgtgaagaattcgaggaaatttgtgagcgtggcctggatctttcaccaaccaacgaacttttgattgatgaatcgctgattggttggaaagagtatgaaatggaagttgtgcgggataaaaacgataactgcattattgtctgctctattgaaaactttgatgcgatggggattcacaccggtgattccatcacggtcgctccggcgcaaacgctgacggataaagagtatcaaatcatgcgtaacgcttcgatggcggtattgcgtgaaatcggtgtagaaactgggggatctaacgtacagtttgcggtgaacccaaaaaatggccgtttagttatcatcgaaatgaatccacgcgtttctcgctcttctgcgctggcttcgaaagcgacaggtttcccgatcgctaagattgccgctaaattggctgtgggctatacccttgatgaattgatgaatgatatcacgggtggtcgcacgccagcgtcctttgaaccttctatcgattacgtagtgactaaaattcctcgttttaatttcgagaaatttgctggagccaatgatcgtctgacaacccagatgaaatctgttggtgaggtgatggcgattggccgcactcagcaagaatctctgcaaaaagcattgcgtggtttggaagtgggggcaaccggttttgacccgaaagtcagtttagatgatccagaagcattgactaaaattcgtcgcgaattaaaagatgcaggtgctgagcgtatctggtatatcgcggatgctttccgtgcgggtatgtctgttgatggtgtttttaacctgactgatattgatcgctggttcttagtgcaaattgaagaactcgtgcgattggaagagcaagtagcagagcagggcattaacagcttgacggctgacttcctgcgctatttgaagcgtaaaggttttgctgatgcacgtctggcgaaactggtcggtgtggccgaaaaagagatccgcaaactacgccacaaatataatctgtatccggtttacaagcgcgttgatacctgtgcggcagaatttgcgactgatactgcatacatgtattccacttatgaagatgagtgtgaggctaatccgaatagtgacaagccaaaaatcatggtattgggtggtggccctaatcgtattggtcaggggattgaattcgactattgttgtgttcatgcggccttggcactgcgtgaagatgggtatgaaaccatcatggtgaactgtaacccggaaaccgtttcaacagattacgatacttcggaccgtctctatttcgaaccggtgactttggaagatgttcttgagattgtgcgtgttgagcagccaaaaggggtgattgttcaatatggtgggcagactccgctgaaattagctcgtgaactggaaatcgccggtgttcccattattggtaccagcccggatgcgattgatcgtgcggaagaccgtgaacgttttaaacaggcggtaaatcgccttggtctgaaacaacccgaaaatgccaccgtgaccacgatagaacgggcagttgagaaggcaaatattctgggttatccgctagtggttcgtccatcttatgttttgggtggccgtgcgatggaaatcgtatacgacgaagttgacctacgtcgttacttccagacggcagtcaatgtctctaatgatgccccagtattgcttgattgtttccttgatgatgccgtggaagtggacgttgacgctatctgtgacggtgagcgtgtattgatcggcggcattatggaacatattgaacaggccggtgtgcattccggcgactcagcttgttcactgcctgcttacaccctaagccaggaaatccaagatgtcatgcgccagcaggtagaaaagctggcatttgaattgggtgtacggggcttgatgaatgtccagtttgccgtcaaggatgacgaagtttatctgattgaagtcaacccgcgtgcggctcgtactgtgccatttgtttctaaagcgaccggtttaccactggcaaaagttgcggctcgtgtgatggttggtcaatctctggttgagcaagatgcaactcaggagatcattccaccatactattcggtgaaagaagttgtattacctttcaacaaatttccaggtgtagatccgattcttgggcctgaaatgcggtcaaccggagaagtgatgggggttgggcgtacattcgccgaagctttctcaaaggcactattgggatgtaacgccagaatgccgcaaaatggtagagcacttttgtccgtgcgtgaaggtgataaaggccgggttgtggatttggccgctaaattgctgaaacagggctttgaactggatgcgactcacggtactgcggttgtgctaggtgaagcggggattaaccctcgtctggtgaataaagttcacgaagggcgtccgcatattcaggatagaaccaaaaatggtgaatatagctatattgtaaacacgactgcgggtcgtcaggcgattgaggattccaaacttattcgccgtagtgcactgcaatataaagtgcattatgacaccacattaaatggtggatttgctaccacaatggcactgagtgccgatccaactgagcaggtgatttctgtacaggaaatgcatgcgatgattaatagttag

SEQ ID NO: 8270 - DNA, 1164 bp, Photorhabdus luminescens
ttgattaagtcagctatattggttctggaagatggaacccaattccacggtcgtgccataggtgcggaaggggcggcagttggggaagtggttttcaatacctcgatgaccggatatcaagaaattctcacagacccttcctattcccgccaaattgtcactcttacttatccccatatcggtaatgtcggtgttaactcagtcgataaagaatcactaaaagtacaggcccaagggctagtgattcgtgatctaccactgttgaccagtaatttccgctgcgaagaaacgctttctgattaccttaaacgtcataatattgttgcgatagcagatatcgatacccgtaagctgacgcgtttgttaagagaaaagggttcacagaatggttgtattatagcaggtaaacagattgacgctcaggttgcactggaaaaagcgcaagcgtttccggggctggaggggatggatttagcaaaagaggtgacaactaaacagatttatccgtggttacaggggagctggaagctggcggggggattaccggaagataagcaagagcaggatttgccttatcatgttgttgcttatgactttggtgcaaaacgtaatatcttgcgaatgctggtggatcgtggctgccgcctgacagttgttcctgctcagacatcggcggaagatgtactgaaactgaatccggatggtattttcttgtccaatggtccgggagatccggcaccttgtggttatgcaatcgatgcagtcaaaaccctgcttgagacagagattccgatctttggtatctgccttggacaccaattgttggcattagccagtggcgctgaaactatgaaaatgaaattcggccatcatggtggtaaccatccggtgaaagatcttgaatgtaatgttgtcatgattactgcacaaaaccacggctttgctgtggatgaaaaatcactgccgtcaaatttgcgcgttactcataaatctctgtttgacggcacgttgcaagggattcatcgtaccgataaacctgcattcagtttccaggggcacccagaagctagccccggtccacatgagactgcatcgttatttgatcactttattgaactcattgagcagtattgtcagaaaaataatcgtcataacaccaagtaa

SEQ ID NO: 8271 - DNA, 822 bp, Photorhabdus luminescens
atggctgatacagatattcgtgttgctattgttggcgctggtgggcgtatgggacgtcagttgattcaggccatatatcaattagatggtgttgctcttggtgcagctttggagcgctccggttcttctctgattggcgcagatgccggagagttggcgggtattggtcataacggtgtgactgtttgtgatgacctgacaagtatcgttgatgattttgatatccttattgattttacccgtccagaaggaacgttgactcatcttgaaatttgtcgccagaacggtaaagcgatagtgatcggtacaactggctttgatgaggcgggtaaacaggcaattaaacaggcttctgctgatatcccgattgtatttgccgcgaatttcagtgttggtgtgaatctggtgcttaaattattggaaaaagcagcgaaagtgatgggcgagtatagtgatattgaaattatcgaagcgcatcaccgccataaagtagatgcaccatcaggaacagctttagcaatgggggaatctattgctcatgctttggggcgggatcttaaagcgtgtgctgtctatgcccgtgaaggttataccggtgaacgtgatccgaaaagtattggttttgcgactatccgtgccggggatatcgtgggtgagcataccgctatgtttgccgatattggggagagagtagagataactcataaggcttccagtcggatgacgtttgcaaatggcgcggtaaaggctgctctatggttaagtggtaaaaatagtggtctttttgatatgaaagatgtgctaaatctcgatttactttaa

SEQ ID NO: 8272 - DNA, 162 bp, Photorhabdus luminescens
gtgaatgctctatctgagaaatattctttaactgatcatttgatggtttatatgatgaaacgctttgataacatcaccgtatcccacactgagagcgcttttgccttcatgtgcgctgacgatttccttccccaataccctgttgtttctaggatggaatga

SEQ ID NO: 8273 - DNA, 1140 bp, Photorhabdus luminescens
gtgaatgtagtgccgcttcgccgtcaacacgattggacagctttagagttttttgctggtatcggcctggcaagggcaggtttggaactcgctggtataaaaactctttgggctaatgactacgacattaataaaaaggctatgtacgaaggccagtggggaggcaacgagcttttgctggctgatgtgcattcgctttgtggcgatgatctaccaactgtagatgttgcatggtcctcttcaccgtgtacagatctcagccttgcaggaaaaagggctggtttacgtggtggacgtgaatcatctgctttttttgggtttactcgtctgatagcagagatgaaagagcgaaaacctaaagttatagccctggagaatgtgactggccttgcttcatctcataatcgtgaagatttgcgtgcggcagccaaggagttcaattcactaggttatgctgtagatgccattactctagatgctcgccgctttatcccgcaatcacgcccacgtttattcctaattggcgctcagtatcctattgacggcggggagcaagatacttgcttacgccctgattggcttgcctggcttcatgaagacgctgaaattcgtactttcatgatgccgctaccaaaagcgccagatttactcagcgaaggtttaacccgtgaaatagaacaaatgccgcataatgaccccagatggtggggaggcgatcgggttaaacgatttgtagactcaatggctccagtccaacgagaacggttggaagcatttatcgaattaccaaacatgactgcccgaacagcttatcgtcgtacccggaacggaattcctgtatgggaaatgcgagccgaagatgtctctggttgtttacgtaccgcgcgtggtggttcatcaaagcaagcggtagtaattatgggcggcggcagtgtgaaaatcaggtggatgactggactagaatatgcacgtctgatgggggccggttggtattctcttgataatatgcgcgattcacaagttcattatgggtttggtgatgccgttgctgtacctgttgtcggatggatcgccaagcacatgctcattccacacctggttagtattcagatgttcgatggaaaaataataaatgggtga

SEQ ID NO: 8274 - DNA, 996 bp, Photorhabdus luminescens
atgggtgagaaagatactcttattgagcagtatttgaatgcagctaaagcgtggtatgaaagccagcgggcacaaaatggctccataaataccaatgtcatgaacgtggggcttgtggtttcacgcatgatcgctgatggttttcccatcgatgatggccgactttacagcgagggtaggagccaggttcgtggtttgagtggcaacactatcgccaagattcttgaacagcatggcgagacccgcctatttacacgagagggtgggagaacatcgagaggaacgatccacttagcggtttcatttcgcgacgctatgaatggcatcaatcgctcttctggagctacgttgaacactaatcatctctctttgttgcttgaagatttcttcacaaactgtgttcgcattgattatttcgataaacaaagaattacggtcgatattgaaaccaccaaaccagtatcatcgatcatttctgatattctggatgcagcggctgaacgttctgataagcctaccggggttgttctccaacatctaattggtgcgaaattacaattgcgttttccagaaattaagatcggcctcgaccgagctaatgcagcagatatgcaaaccgatcgggaaggtgattttcaagttggaacgacagcatttcatgtcactacagcccctatggaaaagcttgtttctcgctgcgttgaaaacaagagagctggttaccgacctgtaatactgacgctggaaagtaaggtattggctgctcgtcaaatggctgaaaacgttggcatgtctgaccaaatctccgttcaagcagcagaaattttcattggtactaatattgaagaaattgctatctatgaaagtgatagaatacgcaagggagttgctcatttgatacgtacatataacgaacgtatctcaaatattgagatcgataaatcccttatgatcgatgagccaaagtggattgtgaaacttctttcaagagattga

SEQ ID NO: 8275 - DNA, 1569 bp, Photorhabdus luminescens
gtggcaataatacgcagattggttctgaaaaacttcaaacgatttaaaaatcttgaattagaattcgatcctgaattaaatattctggttggcggcaatgaagctggcaaaagttcggtgctccaggcaattgatatcgcgctcaacgccagtcgaagtaaggtagaatcgctcggtcttgaaacccttttcaatatggaatgtatctcggaattcctgaaaggtgagagaaaaatcgtcgaactacctgagctgctgatagaggtatacctagatgggattgaaggtcaccacgaactagatggccgtaataacagcaagagcatagatcacttaggcatcaagttggtatgcaagcctgttgataaatacacacaagaaattcagacgattttagctgagaggcacgataactttccttttgagtactatagcatccgttttctaaccttcacggacgagactatccttccatataaaaagccgctccagcacttactcatagatagttctcagatcaatagcgagtatgccactcgtgagtatacccgcaccatgtataccactcatgcgtctgttgtagagcgtaatcatcacagttttgagtaccgtaaagctaagtctgagtttaagagagtagttttcaaaacgatgaatgatgcattggacatctacaaattcgatgttcggacaagcccaaaagcgagtgtcgaaacggatattattattactgaaggcgatatcccgatcgatagtaaggggaaaggtcgccaatgctttatcaagacggaatttgccttgcgcaatcgcgaacacgtacttgatatcctccttctcgaagagccggagaatcatcttagccatgtccatatgcataagcttattgatcgcatccggggttcggtcaaaaagcagcttttcatcgctactcatagtagtttgattgcaactcggttgaacctcaagaaagtactaatattgagcgaagaaaacttgtcccaaccaacttctctcaaagatctcagtcagagcacagccaatttcttcatgaaggctcccgacaacaatgtgctggaacttgcgttgtgtaagaaggctatccttgtggagggagatgctgagtttatcctcatggatgccctctataaaaactgcactggaggtgcaagtactgataccgatggtatctatgtaatctctgtcgatggaacaagtttcaagcgttatcttgagctagccaagttgcttggcatcaaggttgcggctatccgtgacaatgacggggactacaaaagcaattgtgttactaactatgctgacctcatttcagattctgtgcagattttcgcagacgctgacgatgctcggtacactttcgaggtttgcatataccaagataatacgaccatttgtgaaggtcagttcgcagcaggtcgaaaaaagcttaccgtagaagaatatatgttaaaaaacaagacggaagctgcattcgaattgctcgaacaaaagggaaccgaacttgtcgcgccaaattacattcagcaggcaatcacatggataagagagtag

SEQ ID NO: 8276 - DNA, 1032 bp, Photorhabdus luminescens
atggataagagagtagtatttgccgttgccggatcgggtaagacatcccgtcttgttgccagccttgatgaggagaagcgctttcttatcgttacttatacagagtctaactacagcaatttgcgtggaaaaattataaatcgattcggttactttccagcaaatattactctctacacgtatttcaaatttttacacggtttttgctaccggccatttctacgatcggataagaataccataggtatcacattcaaacttcccttggcatacccacggtatgcattgactgacgaccggcgttacgtgtcaaccaatcgtcaggtttacgccaaccgtcttgccaaattcatcgagcaatctcatctggttggtgcgatcatagcgcgtatggagaagtattttgatgctttcttcgtggatgaggttcaggactttgctgggcatgattttaaccttctgctagccataagtgccgctgagttaaatgtctcctttgttggcgattttttccaacacacattcgacacaagccgagatggtaatgtgaacgctagtcttcacaaagattacacggtctacgaggctaaatttaaaaaggctaaattgctcgtcgataccgacagtctcaaaaagagccgcagatgtagcaaaagtgtttgcgattttattacggaaaagattggtatcgaaatcgaagcttatgatcgccgggaaagtgtcattagatacgaggataacccggaagctgtacttgctctctaccgggatccggaaacggtgaagctgttttacagggaacaccacaagtattcctgccactcccaaaattggggagcatcgaagggagtagaccactatcatgatgtatgtgtagtccttaatcccgctaatgtaagagcttggaaaaagggaagttttcgggatatcaatgcggagacacgcaataaactatatgtggcctgctcaagggcaagaggcaatctgacgtttattccggaatctttgctcaaagcttacaagcaatcttga

SEQ ID NO: 8277 - DNA, 114 bp, Photorhabdus luminescens
ctgacagttgtcaacaaactaggtatcgctcgctcgaccatttacgattggatcaacccgaagtcactgcgttatgacaatacattccctaagcagcgccagctaggaaagtaa

SEQ ID NO: 8278 - DNA, 264 bp, Photorhabdus luminescens
ttggacgatttacttgatgggagcggtatgagtcgagagactcacgtaccgttctgcgagagactgtgggagcagttcctacggtctgctcaaccgattaatgggcaattaaaaacccttcctcagatagagcattcgcgtcaccgaagtataaaaggatttctgttgaccgtgttagatggggtgattgcatactgcctcaaatggaagaagccatcactgaaagttttctactcagaagaagatttcccagtgacggcttaa

SEQ ID NO: 8279 - DNA, 954 bp, Photorhabdus luminescens
atgcagatattgctggctaacccccgcggtttttgtgctggtgttgaccgtgctatcagtattgtagaacgcgcactggaattatatggtgcgccgatctacgttcgtcatgaagtggtgcataaccgttatgttgtagataacctgcgcaagcggggggctatctttattgaagaaatttcagaagtaccggatgatgcgattctgattttttcggcgcacggtgtttcacaggctattcgtgctgaagcgcgttctcgcaatttgacaatgttgttcgatgcgacttgccctctagtgactaaagtccatatggaggtagcaagagctagccgcaagggcaaagaagctattctgattggtcacgctggacatcccgaagttgaaggtacaatgggtcagtacaacaatgcggaaggtggaatgtatctggttgaatctccggcagatgtatggaacttgaaagtcaaagatgaagacaatttgtgttttatgactcaaaccacattatctgttgatgatacttcagaagtgattgatgcacttaatgcacgattcccaaacatcgttggtccccgtaaagatgatatctgctatgcgacgactaaccgccaggaagcggtacgggatctggcgtctgacgccgatgttgtcttggttgtaggttcgaagaattcatctaactctaatcgccttgctgagttagctcagcgggttggtaaacctgcttacctgatagattctgctgaggatattaaagaagagtggattactggcatctctttggttggcgtaaccgcgggcgcttcggcaccggatattttagttcagcaagttattgaacgcctgaaatctcttggtgctgattccgtccaagaattacatggtagagaagaaaatattgtatttgaagtgccaaaagagttacgtgttgaagttaaagaaattagctaa

SEQ ID NO: 8280 - DNA, 471 bp, Photorhabdus luminescens
atgtcaaaccaggtgcaggcggatagtgcagttttactgcacttcattttaaaactgcaagatggctctattgccgactccacttacactcagggcaaacctgcattatttcgtttaggtgatggaaccctttcttcacctttggaacagcagctcactgggctaaaagacggagataaacatacctttactctggcgggtgagaatgtatttggtaaaccaaatcctgatctgatccaatattttactccgcgtgattttgccgcaacgggtattcctgaaattggcactataatgttatttacggcaatgaatggcagtgaaatgccgggcatagtcaaagcggtaacagaggaatctgtgactgttgatttcaatcacccgttagctgatcagaacgtcacgtttgaaattgaagtggtggaaattgatccacaattggaggaaaaccatgcagatattgctggctaa

SEQ ID NO: 8281 - DNA, 504 bp, Photorhabdus luminescens
atgaataaacccatttgctccaccggccttcgctggctttggttagttgttgtggtattgattttggatctggggagtaagcagttagtgttgcaacactttcatctgtatgaatccgttccattgataccttattttaatctgacttatgcccagaattttggggcggctttcagtttccttgcagagaaagatggttggcagcgttggttctttgcattcattgccgttgctatttcagttgtcctgatggtgatgatgtatcgtgccagcgcaaagaagaaactgagtaatatcgcttatgccctgattattggtggagcactgggtaatctgtttgaccggttggttcatggctttgtcatcgattttattgatttttatgtcggtgattggcactttccaacttttaatatcgccgatatggcgatatgtatcggggcgggattggttatcattgatagctttctaagcccggatgaaaagaccatcaaagtgggataa

SEQ ID NO: 8282 - DNA, 2814 bp, Photorhabdus luminescens
atgagtgactataaaaacaccctgaatctgccagaaacagggtttccaatgcgcggagatttagcaaagcgcgaaccaaatatgttaaaacgttggtacaaagatgagttgtatcaggtaattcgtaaagcaaaagccggtaaaaaaacatttattctgcatgacggccctccttacgcgaatggcagtattcatattggtcactcagtcaataagattctcaaagatattattattaaatccaaaggaatggcgggatatgattcgccgtatattcctggttgggattgccacggtttgcctattgagcttaaggttgagcagattattggtaaaccgggggaaaaattttccgccgctgaatttcgtgccgagtgccgcaaatatgccaaagagcaaattgaaggtcagaagaaagactttatccgtttgggcatattaggtgactgggaacggccatatttgacgatggactttaagacagaagccgacattattcgtgcattgagccgtattatcgctaatggtcatttgttgaaaggtgccaagcctgttcattggtgtactgattgtcgttcatcactggccgaagcagaagttgagtattacgacaaaacttcgccatcaattgacgtgcgttttaatgcggttgatgcagttgccgtttgtgagaaatttggtgtgcaggcaccagaacaaccggtctctctggttatctggacaaccacgccgtggacgttgccggctaaccgggcgatcgctttgcatgctgaatttaactatcaattagtacagattgagggtgaatgcctgatcctggctgctgatttggtagaaagtgtgatgcagcgtgcaggtataacttcgtggacagtgctagggcattgtgcgggttccgcgttggagctattgcgctttaaacatccatttatgggttttgattcaccggtagtactgggtgatcacgtgactttggatgcgggtaccggtgctgtgcatacggccccaggtcacggcccggacgactttgttctcggtcagaaatatggtttggaagttgcaaatccggttggccctaatggttgttatctacccggaacttatccttctctggatggcatgtttgtctttaaggcgaatgatgttgtgctgaatatcctgagtgaaaacaatgcattgttgcatttggaaaaattacagcatagttatccctgctgctggcgtcacaagacgcctatcattttccgcgccacgccgcagtggtttgtcagcatggatcaaaatggtctgcgtaaacaatcgttgcaagagatcaaaggggttcagtggataccgggttggggtcaggcccgtattgaggcaatggttgaaaaccgtcctgactggtgtatttcacgtcaacgcacttggggcacgccgatgtctctttttgtccataaagagacggaagagcttcatccacgtactatcgaattgatggaagaagttgcaaaacgtgttgaagttgacggtattcaggcgtggtgggatctggagccagccgaactgttaggtgatgatgcggctaactatgtcaaaatttttgatacgttggatgtttggttcgattcgggatcaactcacgcatcggtggttgatgcccgccctgaattccagggtaatgctgcggatatctatcttgaaggttcagatcagcaccgtggctggtttatgtcttccctgatgatctcaacggcaataaaaggtaaagcaccttatcgtcaggtgttaacgcatggtttcactgtcgatggtcagggccgtaagatgtctaaatctatcggtaataccatcagtccgcaggatgtcatggataaattaggggcagatattctgcgtctatgggttgcttctaccgattataccggcgaaattgcggtatccgatgagatcttgaaacgctctgctgatgcatatcgtcgtatccgtaacacggcgcgtttcttgttggcaaacctgaatggtttcgatcctgaacaacatagcgttaaaccagaagagatggcggtgctggatcgttgggctgtggggtgtgctcaagcggcacaggcggacattgccaaatgttacgataaatatgatttccacactgttgttcaacgtatgatgcaattctgttccgtggagatgggatcgttctatctcgatatcattaaagaccgtcaatacactgctaagagcgatagtttggctcgtcgcagttgtcagactgcgctgtatcatattgcggaagcattggttcgctggatggcacctatcctctcctttactgctgatgaagtttggaatgagttgcctggcaaacgtgctcaatatgtatttaccgaagagtggtacggcggtttgtttggtctggcggcaggcgaactaatgaacgatgctttctgggctgatttgttggctgtgcgtggtgaggttaacaaagtgctggagcaggcacgcgcagacaaacatatccgtagttcactggaagccgcggtgacgctgtacgccgataatgaattggcggacaaactgaatagcctcggagatgaattgcgttttgttctgctaacatctcaggttgttgttgcagattatgagcaggctggtgaagatgcgcaacaaagcgaaatcggtagtctgaaaattgctttccgcaaggcggatggcgaaaaatgtcctcgttgctggcattacgctaaagatgtgggattggtggcggaacatgcagaactttgtggccgctgtgtaactaatgttgccggtaacggcgaagagcgtaagtttgcctga

SEQ ID NO: 8283 - DNA, 945 bp, Photorhabdus luminescens
atggagctaattcgcggtatacgtaatatccggacatgtcaccgcggttgcgtgttgacgattggtaattttgatggtgtccacagaggtcatcaggcactactgaaacacttaaaacacgaagggcagcgtctgggattaccagtaatggtcatgatttttgagccacaacctttggagttttttgctaagggtcatgcgcctgcgcgtctgacgagattgagggataaagccaaatatctcgcccaatgtggagtggattatttattatgtgtgaaatttgatagaaattttgcggcaaatacgccagaagcctttgtttcacggttgctggtggaaaaattgggtgttaagtttctcgctgtaggagacgactttcgttttggtcaatctcgcagtggtgattttgcctttttgcagcgagccggtgagtcatacggctttgatgtgaccagcagtgaaagtttttgtgatgatggtttacggattagcagtacagctatccgtcaagcactgcaaaatgatgatttggtattagccgaaacattattgggacatccatacagcatttgtggtcgggtcgttcatggtaagcgactagggagcactattggttttccaacagcaaatttgccgttaaaacgattagtggttccggtacacggcgtttatgttgttgaagtttatggtttaggagaccagcctttaccgggtgttgccaatattggtacacgtccaacagtctctggtcagggtcaacaacttgaagtacatctaattgatacccaaatggatctctatgggcgttatattgatgtggtgttacgtaaaaaattgcgtaatgaacagcggtttgcttcccttgatgcactcaagcagcaaattgcgaatgatttggttgctgcgaaggaattttttaagcagctacctgtgtcatgtatctag

SEQ ID NO: 8284 - DNA, 264 bp, Photorhabdus luminescens
ttggctaatatcaaatcagctaagaaacgcgccatacagtctgaaaaacgtcgtaagcataacgctagtcgtcgttctatggtgcgtacctttatcaagaaggtatatgctgctatcgctaccggcgataaagaagctgcgcagaaagcatttcatgacatgcaacctattgttgatcgtcacgcctgtaagggtctgatccacaaaaacaaagcagcacgtcataaatctaatctgacggcgcaaatcaacgcaatgcaataa

SEQ ID NO: 8285 - DNA, 915 bp, Photorhabdus luminescens
atgcgggtgtcacatctgaattttaatcatctctattatttctggcatgtttgcaaggaaggatctgtggttggggcggcagaagcgctttatctaacacctcaaacgatcacaggacagataaaagcgctggaggagcgtctgggagggaaactgttcaaacgtcagggcaggggattagtgccatcagagctagggcagcttattttccgctatgcggataagatgtttatgctgagccaggagatgttggatattgttaactacagccgtgaatctaatcttttatttgatgttggtgttgctgatgcactgtccaaacgtctggttagccaggtattgaaaacggcggttgtggaacatgaacagattcatctacgttgttttgaatcaacccatgaattgttgctggaacaactcagccagcacaaactcgatatgatattgtctgattgcccggtggattcttcccaacaggaagggctgttctcggtaaaactgggtgaatgtgatgtgagtttcttctgccgacaacctatcccggaaaaacctttcccggagtgtttggaggaacgtcgcttattggttccagggcgtcgctctatgttggggcgtaagttgttgacttggatacgtaataaaaatcttcaggttgaagtactaggtgagtttgatgatgctgcgttaatgaaagcgtttggtatgtatcataatgcgattttcgtggcgccatctttgtataccaatgatatttttatagataatgatattgccgagattggtcggttagatgctgtgcaggaagagtattatgtgatttttgctgaacgaatgattcaacacccggctgttcaaagggtatgtaataaagatttttctgcgttgtttaatgtgctatctaagaagcgtacttaa

SEQ ID NO: 8286 - DNA, 1167 bp, Photorhabdus luminescens
gtgacagcaattattcgtcaattcctgaaattagaagcggctggagggcttcttcttatcatcactgccattattgcgttgataatggcaaactcgccattacagggtatttatcagcaatttcttaatatttcggtggcagtacaattcgctgcactggagatcaataagcctttgttgttgtggattaatgacggcttgatggcggtcttctttttgattgttggtttggaagtaaaacgggaactgttggaaggctctttggcagggcgtgataaggcactatttccggtgatagcggcgataggtggtatggtcgctccggcactaatatatctactctttaatggcaatgatgagtttacccgtcagggttgggctattcctgcggcaaccgatattgcttttgccttgggtgtgatggcgctattgtctaagcgagtaccaacagaactcaaggttttcttgttggcacttgcgattattgatgatctgggcgttatcgtgattatcgctctgttttataccaaaacggtttctcttgtggcgcttggattgtcagcggcaatgattgctttgctggtttggatgaattggcgcggtgtcgaaaaaacatcggcttatttggctgttggcgctatcctttgggtttgcatcttgaaatcgggtgttcatgcaacactcgccggcgtcattgttggttttctgattcctctgcgtggccagaatggtcattcaccatctgaattacttgagcacggtttgcatccttgggtggcgtatcttattttgccattatttgcatttgccaatgcaggtgtagccctgaatggcgttacgttaaatggtttgaccgatatattgccgttaggtattgctgtggctctgtttcttggtaaaccattgggcatttttctttttagctatatttctattcagatcggatttgctaaattgccacagcagattaatcttaaacagatatttgcggtttctgttctttgtggaattggctttactatgtctatctttatttcaggattggcttttgaaggggtggatgaatctttcagtgtctattcccgtcttggcattctgatgggttcaaccatcgctgcgtttatggggtatggcttgttacgaatggtcttaccaaagaaaaagtga

SEQ ID NO: 8287 - DNA, 426 bp, Photorhabdus luminescens
atggtatccgattgttgttgcttctactcttattggtgcagtagcgactatcacaactctattgctcaaattcatttaattaattggccccgtaaggggctttgttctggaatacttatgcgactgatcggcaattattctcctcctactacagaagatctcattaaactcaaagaagaattaggtttcacgggagaacaaatggccgatttagcgggagtttccggtaacaatcaatggagaaaatacacgggtgggaaaataccacgtgttatttctctgcacattctattctataccctatggatttcaagatgcatcgcgacggcaagggagcgaatccccgggagcataggtaactatgtgaccggggtgagtgagcgcagccaacaaagaggcaacttgaaagataacaggtatatatag

SEQ ID NO: 8288 - DNA, 1848 bp, Photorhabdus luminescens
atgagagatgaagattttgcaaaagagatcattatatttactggcggacaagaaaatataaataaaagttggcattgtgttaccagattgcgttttaatattatagatgatagtaaagtagatattgttgcgatcagaaaaatgcagggggttattggggcacattttcacagcgggcaattacaaataattattggtaatagagttgttgaaatatttagtgaaataattaagcagttaaaagaaaatgaaggaaatcattatggtctaaaaaagggtttcattagtcatattcttgacgtcatttcaggcatatttgttcccgtattgccggcaattgtaggggcgggtttacttaaaggcgggttaatttttttctatatgatggattgggtttcagagcagagtaatgagtataagttattatatattctttctgatacacctctctattttttgcctgttcttttggctttttcagcagcaagaaaatttaaaacaaatgaatttattgcagccacattagcgtgtattttaatttatccaacattatctcatcttgtgagcagttctggtggcggatattttagtgtatttggtattactattcccgctaatcattatagttatactgccattccaattattttaggggtttggttgctcagttatattcatcgatgggtagataggtttattccaacggtattgaaaataatacttacaccattattggtcttattaatttccgcacctattttattgattattgctgcaccgttgggaaatacaattggtttgtatcttgaaaagtggcttttaatattattttccgtggctggaccgtttgcgggattattgttaggtggattgatacctattttagttattactgggatgcattatgcctttttgccaagtgtttttgctaactttaagtctcttggatacgattttatgttattacctatcagttttgcgagtaatattgcacaagctggtgcgacattagccgtcgcaattaaaattaaagataggcaaatgaaatcattagcttattcatcttcattctctgcttttttaggtgtaactgaacctgcaatgtatggcgttacgcttaaattaagaaaacctttttatgctgcattaatgagtggagccgttggtggcgctattataggtattttctctgtgaaaatatttgcttttagtgtaccgggcttggtgtcattacctttttatatacaaaaagatagcaataactttatttttattttgcttggcatttttagtagtttcttagtggcatttatatccactttattaatgaaattagaatctaatgttgattctatagtattaataaagccacgcttttcaaaaaagaagaaaatcatattacgttctccgatgaccggcacaacagaatctctctcaagagtacctgatgatactttttctgaaaaaattattggtgatggtattgctattattcctaccgaaggtgtggttaaatcgccttttaatggcaaggtttcaatgattactccgactggacatgctattggtttaatttccgatcaaggagtagagttattaattcatattggtattgaaacggtaggtttgcaaggtgcaggatttaatttacaaattatagaagggcagagagtggttgccggtgaggtattagttaattttgatctggaatttcttcaagagaataaaattcagattatatcgccaattatcgtcactaatagtgaggaatatcactcaataatgccgactaaaagaagaagagttattggatgtaaagatgatttgttggttattaatcgatgttga

SEQ ID NO: 8289 - DNA, 855 bp, Photorhabdus luminescens
ttgttaacgatagtaaaactcataaataataatgttgttcttgccattgatgagaataataatgaagttattctaatggataagggcataggttttaatagaaaaaaaggcgataggctgaatgttcaagatgttgcgaaagttttcactgttgaaaagaacgatagaattaatcaaattattgcgactattccagtctcagttatagagctaaccgagaaaattatcgcattagggaaagatcttcttggcaaatctctcaacgattcattactcattactttgtcagagcatttaaactttgcatttgagcgtgtgagtaaaggatatcagattggtaatgtcttacaatgggagatccctcatctttacccgttggaatatgaagtcggtaaacaggcacttatctatattaatggccagattgaaaaaccattaccgccgatagaagcctcattgattgccttgcattttgtcaatgctcaatatgaagggcaaacgatgggagatacattaaaattaacgaatttgattaataaaacggttaagctcattcactactattttcatgttaaccttgatacaacctcggtaaattactctcgttttattacccatttgcgctatttcctgattagacaaaataaaaatgagcattcttctgcgattgagatggatttttctctgcaagagttgatagaagaaaagtatttcaaaagctacaactgtgcagttaagctaattaaatatctgagggagaaatatcaatggaaagtgcccgatgatgaattgatttatttagtcattcatatagaacgggtggttaatgatagttataagagcagggaattataa

SEQ ID NO: 8290 - DNA, 1443 bp, Photorhabdus luminescens
atgagatacgaaagtctggcaaagaaaatagtcagcgcaataggtgggaaagagaatatatctagcctggtccattgcgctactcgtttacgatttaaacttaaagatagcagtctggccaatagcgaattactcaaacagactaagggaattattaccgtagtagagagtggtgggcaatatcaggtcgtcatcggtagtcacgtaggggatgtttacgacgatattaatagatacttacaagataatacagaaaaaaccgaagttaaacaaagtgtaacgtcaccgcaagggataaaacaagataatgcaaaaggtttaaaacgtattcttgatgtcaccattgatatcatttccagtatttttaccccgctattaggtgtattggtcgccgccggattaattaaaggtattctcgctttatccgacgtgttcaattggatgagcatagacagcgggacctataaaattttatacgctaccggcgatgccatgctctatttcatgcctattttattaggatataccgcaggtaaacggttcggaggcaacccttttattactatggtgatcggagccgccttaacctatcccaccatgaccgaggcatttaaactttcgcaaacgactcctgctgttcacctcaatttccttggcattcctatctctttcattaattatagctcaaccgttattcccattatcttatcagcatggtttagctgcttgctggaaaagaagtttaatagctggtttcattcctccgtcaaactgtttgccacacctttcctgtgcctgttaattaccgttcctttaacttttctagttattggccctgtagcaacagagcttagtaatggcctggctgccggatatctcttcttctatcaattaaacccggtcattgccggactcctgatgggcgcattgtggcaagtttgtgttattttcggtctgcattggggacttatcccaataatgatcaataacatgatgacccagaaaaaagatatgctctccccactgctccagccagcaatatttggtcaagcaggtgcaactctgggggtatttttacgtacacgtgataagaatatgaaaacattatcaggtactgcactgatatcaagtctctttggcatcactgaacctgctatttacggtgtgacattaccactaaaacgcccatttattatcggttgtattggtggggcgcttggcggagcaattgtcggcttctattcaggaacagcatataacgttggcggcatgggtatctttgcgttcacctcatttatttctcccaccggcatagatagtgctttctggagtgtcatattaggttcgttaggttcatttatcttttcttgtatcgcaacctatttattcggtttaccatcagaagtaaaagtttcaccaataacatccggtacaaaaaattaa

SEQ ID NO: 8291 - DNA, 1422 bp, Photorhabdus luminescens
atgaaaaaacaatttccaaataacttcctttggggaggagcgctggcggcaaatcaggttgaaggagcccatcaaatagatggaaaagggttatcaacctcagatatgcaaccccacggcgtcattggtcacagcatagaacgcaatttaggtgattttcatattaaggatattggtatcgatttttatcatcgttatcctgaggatattgcgctatttgctgaaatgggatttaaatgcctgagaacctccatcgcctggacacgtatattccctgagggagatgaagaaataccgaacgaaaacggcctggctttttatgatcgcctgtttgacgaaatgataaaatataatattcaaccactcattacgctttctcattttgaaatgccttatggcttagtaaaaaaatatggtggttggggaaatcggaaaacaattgcattttttgaccattatgccagaactgtttttgaacgttaccagcataaagtaaaatattggctgacattcaatgaaattaatatgtctttattctcctgttttacaggtgcaggattaccagaaaacagtaaaattcaagatatttatcaggcactacattatcaattagttgccagtgccaacgcagttaaagcctgccatgaaattattcctgatgcaaaaataggtaatatggtggcagcggccccttattacccattaacttgtcatcccgatgatatattagaatcattgaaaaagaatcgtgaatggctattcttctttgatgtacaagctcgtggatattatccatcttatatgccccgtctatttaaagaaaaaaatatcacacttgatatcacagatgaagataaaatagcactcaaagaaacggttgatttcctctctttcagttactacatgagtagctgcgcaacaacaaaccttgagattatcaagacctcggggaatatcattaatccggtgaaaaatccttatctgtccagctcagaatggggatggcaaatcgatcctaaaggcattcgctatcttctcaatatgctatatgaccgttaccaaaaacccctgtttattgtagaaaacggtttgggcgccagagatgttattcaaaacgatggctctattattgatgattatcgtattaaatatcttaacgatcatttatttcagatacgggaagccattgaagatggagttcagttattaggatatacctcatgggggccaatagatttggtcagcgcttctaccgcagaaatgtcaaaacggtatgggtttatttatgttgatcgtgatgaccaaggcaatggaacattagaacggcggcgtaaaaaaagttttaattggtataaagcggtgatcagcagtcacggtaatacccttcaagccccggaggtagaaaatgaaaataaccaataa

SEQ ID NO: 8292 - DNA, 1260 bp, Photorhabdus luminescens
ttgctttataacaatgtcactgtagcagcggaaaataactgccactcgtatgatacccttttaccaagaggaccagaaacaccttcggtttcatctgcatgcgatacggtatttcctgaatggggcggccttagaaaagagatggcagatcgtggcttttatgcaaattttcaactacttactaatctaacctacgatatatcaagaagctggaaaaatacgcctagtcccaattatatgggacagcacttaactaccggtaatatcgccgcgacagaactcacttatgatttatcacggattggtttcactgataaagcacaactgcgtttaggtttaacctatgcttataataacttcaaaaataatggtcaagatggacatccttttgtctcagccttttccattaatcaacccttattgaatgatcgagtcatattaaattatggctatacgacactactctcccatttttatggcttatttttgggtagcagtacagcatcatcagcgctagggccaaccagtgtgatgttgtcccaagctggactaaccattagcaaaccaagcccatcaatagatattcggtttttatcggaaaataaacgttggtatgaccacattggcgttgccagaagtcaaagctcagaaggtttaaaaaccgattcaaaatataatacctatggtctgcgctggaaacttcccagtgcaggaaccttagtcatcaacgaattaggttatcgtgttaatgccaatgaaacggaaaatatgatctggcttcggggtggatcggtgttcaataaaaccccttattttaactataacaattcagagtatgaaaattacacttactctcattatatcgccgctacccaccaaataaccaagccggatacgtcaatgcctttccgtggctggtatattgacggtaaagccaactatgcgccaaaggatcgtaacctgtttaatgccgacatttcattatcactgttcagcattggtccatttgattcgcgtccaaacgatatggttacttttggtctggcctataataagttcagcgacgatgcaaaaaattattttgctcgcaatggtcaacttgctgaaagttatagtgcaaccgcttctgtagcgtatagctatcgtgtttacaacggcatctattggactaatagcttatcgtatactcatcacccatcagtgacaccaaaagaggatgatgcctataatttgctcacacaaattacgtttagtttataa

SEQ ID NO: 8293 - DNA, 1119 bp, Photorhabdus luminescens
atggcgaaaagagattattacgaggttttgggggtttccaaaacagcgagcgaaaaagagattaaaaaagcctataagcggctggcgatgaaatatcatcctgatcgtaatcagggcgataaagaggcagaaagccaattcaaagaagttaaagaagcttatgaaattctgacggatgaccagaaacgggctgcttatgatcaatatggtcatgctgcttttgaacaaggcggcatgggcggcggcggagctgattttagcgatatctttggtgacgttttcggtgatattttcggtggtggtcgtcgtcaacagcgtccaagccgcggtgctgatttgcgttacagcatggagttgacgctggaagaagcggttcgtggtgtgaccaaagagatccgtatcccgacactggaaacttgtgatatctgtcatggtagcggcgctaaagcaggaaccagccctgtaacctgttcaacctgtcaaggtgctggtcaggttcatatgcgtcagggatttttcaccgttcagcaaccttgcccacactgtcatggccgtggtcagattatcaaagattcttgccataaatgtcatggtcatgggcgagttgaaagatacaaaaccctgtctgtcaaaatcccggcgggtgtggataccggtgaccgtgttcgtttgagtggtgagggtgaagcgggggctaaaggcgcacccgcaggtgatttgtatgttcaggtacaggtgaaatcacaccatatttttgagcgtcaagaaagtaatctctattgtgaagtgccggttaactttgcaatggcggcactgggtggagaaatcgaagttccaactctcgatggccgtgtgaaactgaaaatacctgcggaaacccagacaggtaaaatgttccgcatgaaaggcaaaggtgttaaatctgtccgcggtggtgttcagggtgatttattgtgccgggtagtggtagaaacgccggttaaattaaatgaaagacagaaagaattactgcgcgaattgggtgaatctttcggtggggccggcgaagaaacgaatagcccacgttctaaaagtttcttcgatggcgtaaagaaattttttgatgatttgaccaagtaa

SEQ ID NO: 8294 - DNA, 1911 bp, Photorhabdus luminescens
atgggtaaaattattggtatcgacctgggaactaccaactcttgtgtagctattatggatggcacgacagctcgtgtgctggaaaacagcgaaggtgatcgcacaacgccttccatcattgcttatacccaggatggagagactctggttggtcaaccggctaaacgtcaggctgttactaacccgcaaaatacattgtttgctattaagcgtctgatcggccgtcgtttccaagacgaagaagcgcaacgcgatgtcgctatcatgccatacaaaattattgcggcagataatggcgacgcatggctggaagtgaaagaccagaagatggctcctcctcaggtttctgctgaagttttgaagaagatgaagaaaacggcagaagattatctgggtgagccagtgactgaagcggtaatcaccgtacctgcctattttaacgatgctcagcgtcaagcaaccaaagatgctggccgtatcgcaggtctggaagtaaaacgtattatcaacgagccaaccgctgctgcactggcttatggcttggacagagaagtaggtaaccgtactatcgcggtttatgaccttggtggtggtactttcgatatttctattatcgaaattgatgaagttgacggcgaaaaaacctatgaagtgctggcaaccaacggtgatactcacttgggcggtgaagacttcgacagccgtatgatcaactatctggttgacgaatttaagaaagatcagggcattgatctgcgtaatgacccactggcaatgcaacgtctgaaagaagccgcggaaaaagcaaaaattgagctctcttctgcacaacagaccgatgttaacctgccatatatcaccgcagatgcaactggtcctaagcacatgaacatcaaagtgacccgtgcgaaactggaatcactggtagaagatctggttaaacgttctatggagcctgtacgagtcgcattgcaagatgccggcctgtcagtttctgatgtgaacgatgtcattctggtgggcggtcagacccgtatgccaatggtacagaaagtggttgctgacttcttcggtaaagagccacgtaaagatgtgaaccctgacgaagcggtagcaatgggtgctgcggtacagggcggtgttctggccggtgatgtgaaagatgtcttgttgctggatgttacaccactgtctctgggtatcgaaacaatgggtggcgttatgacttccctcattgtgaaaaacaccacgatcccaaccaaacacagccaggtgttctctacggcggaagacaatcagtctgcggtaactatccatgtgttgcagggtgagcgtaaacgtgccggtgataacaaatctttgggccagttcaatttggatggtattcaggcagcacctcgtggtatgcctcagattgacgtgacttttgacatcgatgctgacggtattctgcatgtgtccgctaaagacaaaaatagtggccgcgaacagcagatcactatcaaggcttcttccggtctgaatgaggaagaaattcaacggatggttcgtgatgcagaagcgaacgcggaatctgatcgtaagtttgaagagttggtacaagttcgtaaccaggcagatcaactggttcacggcacgcgtaagcaagtggaagaagcgggtgacaagctgccagcagaagataaaaccgcgattgaaagcgctgtagctgagttggaaaaagttgctaaaggcgaagataaagcggatatcgaagcgaaaattcaggctttggttcaggcttccgctaagctgttggaaattgctcagcagcaggctcaggctggtgcaaccgcagatgctggtgacagtgcgaagaaagatgacgatgttgtagacgctgaattcgaagaagttaaagataaaaaataa

SEQ ID NO: 8295 - DNA, 570 bp, Photorhabdus luminescens
atgaacgcgaatcaattggctaaccccggccccttaggtttaatgggcttcggcatgacaaccattcttctgaatctgcataacgcaggtttctttccactagcatccgttatcctgagtatgggcattttctacggcggcctggctcaagtattggcagggctttttgaatataagaaaggcaatacctttgccgcaacggctttcacctcttatgggttgttttggctcagtctggttgggttattatttctgcccaaaatgggactggcagaagccaccagcagccaatatttagcggtatatcttggcctgtggggggtgtttactctgtttatgttctttggcaccttcaaggctaaccgcgtactacagtttatctttggtggcctgacactgttgttcgctctgttagcgattggcaactttactggcaataccactcttctgacgattgccggctatgaagggataatttgtggtgccagcgcattttatctggcaatggcggaagtgctgaatgagcagtatggccgcactattctgcccattggcgagataaaaccgtaa

SEQ ID NO: 8296 - DNA, 1062 bp, Photorhabdus luminescens
ttgaacgcttcaatgacacaagatattgctagggatggaaaaaaagcaaatcttgtctgcctttccaatgcctcgggtttttctattgtgttgatggacattggtgcatcttggttaagttgccgtgtgcccttaagtggagagaaaagagaggttttactgggtattgccaccttaaaagatttttataaacagaccagttacttaggtgctaccgtaggacgatacgccaatcggattgcaaatggatgttttaatcttgatggtaaaacttatcaattacaggtaaatcaggcaggaaattgtttgcacggtgggattgagggttttgataagcggcgttggacaatcactgcaagagatgcttattcagtgagttttacattacagtcaccggatggtgatcaaggttttcctggtaatgtcgttgtgaccgttcgttacgtattaaccaatgataatcacgtaatcgtggattatttagcccatacagatgctgcgacgcccattaatttgactaatcacgcttattttaatttattgggggcggatgctgggaaaacatgtttatcgcatcatctagaagtgaaaagtgacggctatttaccgattgatgaaaatggtattccattgggccaactggctttggttgataatacgggttttgattttcgaacacctaaagcaattaacagtcactttatgctggataaacagcagcaaattgtaaatggatatgatcattcattctggttgcaagcaacccgtttggacacggattatgcaatctcagtcacctcccctgatgaagcaatcacaatgaaaatattcaccacaaaaccggctgtgcagttttactcgggaaattggctaggtggaacgcctaaccgtgatggtgggcgatatgagaactatgcgggaatggcatttgagccacaatttttgccggattctcccaaccatcctgaatgggagcaagagagctgtatacttcgtcctaaccaacgctataagcaccgtacttgctatcaattcgaaatccataatgcttatacacattga

SEQ ID NO: 8297 - DNA, 1191 bp, Photorhabdus luminescens
gtggctgatactatatttgagagtaatgtgatgaagactttaattaatcgcgttgaaaatgtttttgatttagtatttcattatatgccgacacatattattcaagcgccgggtcgggttaatttgattggagagcatacggattacaatgatggctttgtattgccctgtgctattaattaccaaattgtggttgcggcggcgaaacgagagggtaatattatccgcgttgtttcggttgactacggcaatcaattagatgaatttgatattagccaacctattacatttcacgaaagtaaaatgtgggccaattatattcgcggtgttgtaaagtgtctgctcagtcgtggctatatatttaacggggcagatattgtggtagcgggtaatgtgccacaaggggcgggattaagttcatcggcggcactggaaacagttattggtcaaacaattaaaaacctttaccacctagtcattagccaaacagaaattgccttaaatgggcagcaagctgaaaatgaatttgtcggttgtcattgtggcattatggatcaattaatttccgcgcaaggtaagaaagagcatgcattattaattgattgtcgtcatttaaccgcgcaagctgtatctatgccgaaagatattgcagtcatgattattaattcaaataaaaaacgggaattggttggcagtgaatataatatccgtcgggctcaatgcgaacaagcagcggcattatttggggttaaggctttgcgagatgtggcattagatgaatttgaaaaacgtaatgttgagcttgatagcatagtggctagacgtgcacgtcatgtaatcacagaaaatgaacgtacacttctggcagcaaaagcgttggcagagagtgatatgccattaatcgcggaacttatggcgcaatcacatcagtcaatgcgcgatgattttgaaattaccgtgcctgaaatcgataccttggttgatattgtgcagcaagccattggtaaacaaggaggagtgagaatgaccggcggtgggtttggtggttgtgtggtggctttagtgccacaaactttggttgatgtggttaaggcagcggtagagcaacactattttgcgttgacaggtctgaaagagactatttatgtatgtcaggcttcggaaggtgcagatttggttgaaacatggtag

SEQ ID NO: 8298 - DNA, 1074 bp, Photorhabdus luminescens
atgccccaaattgcattcaatcctattgaacatccccatcgtcgttataatccgttaaccgggcaatgggttttggtctctcctcatcgggtgaaacggccgtggcatgggcaggatgagcagccattgatagacaatattccgaactatgatgagcaatgttttctttgcccatcaaatacacgtatttccggtgataaaaatcctgcttatcaaggagcctttgtttttaataatgatttttcggctttaatgctcgattcacctgatttaccaccatcatgtcatccactatttaaagcgcagggggttagaggattaagtcgcgtgatctgtttttctcccgatcacagtaagacattgccggaattgccggttaaacacattcgtcaattgattgatacctggaatgagcacattgaaatactgggtaaggaatatctttgggttcaagtttttgaaaataagggtgaagcaatgggatgttctcagcctcatccacatgggcaaatctgggcgaatagttttctgccaaacgaaattgaacgtaaagataaacaactgcgtgcttattaccaagaacagagttctaatttattgatggattatattcaggctgaattagctgatggtgagcgggttgtggtcgatacaacccattggttggcggttgtgccttattgggcagcatggccctatgaaaccatgttgttacctaaagttcatgtgcgtcgaatgaatgaattaacggatcagcaacgcgatgatttggcggtcgcgcttaaaaagcttaccagccgttatgataatttatttcatagcgcttttccctattcgatgggttggcattttgcaccgttttttgaacaaggcgctgatattgaacattggcaactacatgcacttttctatccgccattattgcgatcggctactgtgcgaaaatttatggtgggttatgaaatgtttgctgaaaaacaacgtgatttaacggcagagcaagccgctcagcttttgcgtgctgtgagcgatatacattataaagagcaacaatgttcattatcgagtggctga

SEQ ID NO: 8299 - DNA, 1479 bp, Photorhabdus luminescens
attgaagaagccatcactgaaagttttctactcagaagacgatttttcaatgacggattaagcagaattcgggttaatttatctaacttgaaaaatatcccaacagtagtaattgttgatggcggttgctctgctgtttcttatttaccttttaacgtaatgagtattactccattagtagatcaacatgatgcagatttaaggcatggtaataaggttacttcagtaatttgccaaggatctgcgtggaataataatctcgctttacctgagttggagtgcaagtttattagcgttcaagcaattaataaaaaaggagtctctattcaaccaacgaccgaacaatttattaactatcttagagatgttgctaatgagacaaaaggggtatctcaggtatggaatctttcatttaatgagagtgagccatattattcgaatgaggaaattagttatttagggcatgaagttaatcgaatttcccgtgaatttaacatattaccaattatttcaatcggtaatgtaagcagatcaaataatataagattgtgtcctcctgccgactgtgaatctgctttaactatagcgggacgatgtgcggatgaaaatggcatggcaactacaccttgctcgatgagcttgcgagggcctgctccggcagggatgaaaaagccggaactatcttggttttcaacgttacgaatgattggtggggtaatagatactggaactagttatagtacacctcttatttcatcaatagcagcacatgcgtttaaaagtctaaaagaacctactcctgatttagttagagcgttgttaataaataaagctgagaggtgtgcacatgatttgcgtctaggttggggatcaccttggaaagaaggtaataaccttccttggtattgtgatgaagggacagtgactctcgcttggaatagtaaaattcgtgcagggtttgcatattattggaatgatattcctctacctactgaaatgttggaagatggaaaaattaaaggagaaataatattaacagcaatattaaaacccttggtttctgaactgggcggcgaaaattattttgctactagactacagtgttctttgcagagcattagtaacgacggtaaagtaaaaaatcttcttggtactatgaaggaatctaaagaaaaagaacttcagtctcgccaagagttagctaaatggagtccgataagacatcatggaaaatctttttcaggagtgtccgttgataatacgaagttaagactctatgctcgaatttttacccgtgatttatatcagtttgatatgtcatcacaccatgaactctctgaacaagaggtatcatttgtcttaacttttaaaagtcacgataaagattctggtatttataactcaatgaaacaacgtttaggaccaaaagttgaagttgggataattgagaaaaatattgatattgataatacaatataa

SEQ ID NO: 8300 - DNA, 885 bp, Photorhabdus luminescens; identical to SEQ ID NO: 7045

SEQ ID NO: 8301 - DNA, 942 bp, Photorhabdus luminescens
atggctgagggtgttagaagtcctttattaaatcctgtactatcttttttagataagccagttcccaatacagtgagtggtggtgggaaaaattctaaaggtataatttgggcgcgattagatactcaaaaagagaagctatcgaaagagcttagatgtattagcgaagatgatggtattgtttcccattcaggtaaaattcatctattagctaaaatgtttgatgattctcttgcaccatcttggactcctgatgatttatttgaaccagatgatttaacaagaatagttgctccggcttttgatggatacctagtcgaaatttcaggttctagaatctctagtttgattgagaaaatagaaagagcgaaaaatggtcgaattaaagtcgatatttctcgtcttgaaagcattattggttttgataaaaaccaagtattacgaggaagaaaggaaaaagctgtttttgaagcgttcgatgatgtagaaaaacagttcaacgtttgggttttaccattccatgataaaaaagcaagagtatctgttaagaaagaacttgaagagtttgctaatcagaagattattggttttggtcattctaaatttgataatgtttttaaaaatgaagaaatacaaaaaaatggaaatagatattttccaagaaaattggatgaatatttaatcgacggaatattatcatttaccacagtaataaataatttagagaattttaataagttaattagctctggtattgtttatagaattgagccggtacatcatgtttcagcaaaatcagtgccaccaggtagcggtaaagaaccaatacctaatttaacccgaattctggataagaaattgacgagaagcctgttccaggagcaaagttttggtgtgcaccaaaaacagctccgaggggggaacaggctatggacaacttag

SEQ ID NO: 8302 - DNA, 1107 bp, Photorhabdus luminescens
atgaatatcgttgctgaggacattgttgccctcatagaagcgtctttggatgctaattatacagaagttagaagtgtcagtaatagaatagctaaatccatcagtgctgatgatatggatgttgccaaaaaaattaaatccatagtaagacgtaagggagttccacttcgtagttcgggatatagtgatagtttacctgttgaccctaaatcaagaatgcctttaattgaggaacaccagtggtcagtgacccctatttttttgggcgagtctgaaaatattacttttaatgcttttattgaaagtgttaaacatcaaaaaaagctaattgaaaatgggttatcaggaagattgggattactattatcgggtccaccgggtaccggtaagacattgattgctggtcatattgcttctcaactaaataggccgttattcgttgtcagattagattcagtaatatcatcattattgggtgatacagctaagaatttaaggcaaatttttgattatgtaccttctagaaacggcatattgttattagatgaggttgatgcggttgctaagatacgtgatgatcggtacgaaataggtgagcttaaacgtgttgtgaatactttgatacaaggtttagattcactggatgatagcgcagtagtcattgcggcaactaaccacgcagatcttttagaccccgcgatttggcgacgttttccatataaaattcgctttggtatgccaaaccttgaagttagggagtctctttggaatcatttccttttccaagacaagggtatatcaaaggagttaaaagcactatctataatatcagacggattaagtggagcagatattgaaactatagcaatagcagcgagaagacaggcaattttgactaattcgaatattgatattgtagcggtcattcaagcaataattgagggtgactcacataactcgattataccttacagagaagggttaagttcggataataaaaaaagcatcgttaatttgctttctgaaactaaattgtttactcaggctgaaataggtagttttttgaaactaagtagacagacaatttcaagctatctcaaggaatag

SEQ ID NO: 8303 - DNA, 561 bp, Photorhabdus luminescens
atggaacggctaaaaaaagtaaagattggttttattgctggtttggcattggttatgagcgcaatggcaccaacggtggcgttagcaatggagtcaaagaccacggtagctcagttgattaatcagcgtctctcttacatgaaagatgtggcaggatacaagtctgaaaatcatttacctgttgaagttttggctcaagaagagaaggttcttgctaaatcaataagtgaggctgaatctttcgggttaaatggggaatcagttagaccattcgttataatccaaatgaatgcggcaaaggcgattcaatatcgctatcgagctgattggttgtcagttcctgaaaatggttggcaactgaagccgctagatgatgttcggattaaaattagcgggttgagtacggaaatcctccaacaaattgcaaccttgctcaaagccggagaaaaaataagcgcttctgacaaagaaatgtttatgaagaatattcaacaacacaatttaaaggattcggataaacagcaaattttcgcggcgcttgaaaaggtgaaattaaaataa

SEQ ID NO: 8304 - DNA, 576 bp, Photorhabdus luminescens
atgaatgaattgcgcattggcttggtatccgtctctgatcgtgcatcaagcggtgtttatcaggacaaagggattccggcattagaagagtggctgaaaagtgcgattaccaccccttttcagatagaggctcgtctgatcccggatgagcagatcatcattgaacaaaccttgtgtgagctagtggatgaaatcggctgtcatctggttttgaccactggtggaaccggccccgcacgccgagatgtgacgcctgatgctacattagcggttgcagaccgtgaaatgccgggttatggcgaacagatgcgtcagattagtttgcaatttgttccaacggcaattttatcccgtcaggttggtgttatccgcaagcaggcgctgattttgaatttgccggggcaaccaaaagcaatcgcagaaacgttggaaggcttgaaagacgaaaatggcaaagttctggtatccggcatttttgccagtgtgccgtattgtatccaattgctagatggcccgtatgtggaaaccgatgataaggtagtcgcggcttttagaccgaaaagtgctcgtcgttga

SEQ ID NO: 8305 - DNA, 954 bp, Photorhabdus luminescens
atgaccgataaactaacctccctgcgtaaactgacaacagtagtagcagataccggggatattgcggcgatgaagctttatcagccacaagatgcgacaactaacccatctctgatccttaacgctgcacagattcctgaataccgtaaactaattgatgaagcaattgcgtgggcgcgcgaacagagcgattcccgcgagcagcagattgtggatgctagtgataaactggcggtaaatattggcttggaaattctcaaactgatcccaggccgtatttcgacagaagttgatgcccgtttgtcttatgactccgaacgcagtgttgccaaagctaagcgcttgattaagctatataacgaggctggtatcagcaatgatcggattctgatcaaattggcttcaacttggcagggtatccgtgcggctgaacagctagaaaaagaagggattaactgtaacctgacactactgttttcctttgctcaggcgcgtgcttgtgcggaagccggggtttatctgatttcgccatttgttggccgtatccttgactggtataaagcgaacagcgatcagaaagagttcgctccacacgaagatccgggcgttatttctgtaactgaaatctaccaatactataaacaacatggctatgacaccgtggttatgggagcaagtttccgtaattccggtgagatcttggaattggcgggttgcgaccgtttgactattgcgcctgcgctgttgaaagagttgtctgaagctcagggtgaagttgaacgtaaactgggttatgccggtgaaattaaagcgcgtccagagccattgaatgaagctcagttctattgggaacatcatcaggatgcaatggcaacagaaaaactggcggatggtatccgtaaatttgctattgatcagggcaaacttgagaagatgatctctgatctgctgtaa

SEQ ID NO: 8306 - DNA, 1212 bp, Photorhabdus luminescens
atggagaataaaaataggctattatcctctgatataatatctatctttggtacaggaataagtgaaatagcgcttctttcgcttgtatattcaattaccaagtcggagatagatacgtctttaatggtatctgtaaggttaacagcgagtatattagtttttgtggttattggcgggctaactgctcggtttagtatgcgggctatttgtatttcttcggatttcttccgggcagtaacaatatttcttgctgtatttgtcaataatatatatttattatttttcatatcttttcttctatcatttttttcaggtttgaatatatcgataaggtcagtggcataccaggcatttgtcagctcagaagaaagagtggcttttatatcaaagcaacaattctattatgggttgctctctatatcttctccattgatagcaggttttttgataaatataacatcgatacgttttttatttattattgaatcaatgtgttttattttatcaattatatttctcttttttattggtgaatggggaaataaaataaagaaaaatgatgctgttatgaaatatggaggattagaatatatcatcaataatgatactcagagaaatatattattgttcaggataagtattttaactgctatggtgtcatatcaagtgatttcaacctatataatgacttctagctatacaacaattatctctttatttaatggattatattcattttctttttctgatttaattgcttatttttcctttttagcttctgtttcaatattatttggatcttatttttctagctactattttaatataagtaaattaaaaaaatctttctttcttggctctctattgattgcaattgggagtattctttgggctatgcctttgtcaagaattgttttgttattttatactttgggaactatgcttatttttatcggactttcttttttaaggatatctctctatacatcagggcaagagctgacaccagaaaaatactttgcgagaataatatcgtcttcggatgcaattgcaaggagttatcaatcagtctttggtattataataatatggttaatccctttgctaggaagtagtgtgttgtttgtcttttttgcaatgtgttctttgagttcagtttttgttgcaaagaaaataagcgctgatgttgagaataaactcacattgaagtaa

SEQ ID NO: 8307 - DNA, 777 bp, Photorhabdus luminescens
atgcttattactatttcacctgcaaaaactcttgattatgaaagcccgcttgccacggaggaatatagccaaccagaattactcgaccaatcaaagcggttaatccgtatttgtcgcgaactgacgcctgcccaaattgcgagtttgatgggtatcagcgataaacttgccggcttgaatgccgcccgttttggcgaatggcatgctgatttcacacctttaaatgcccgtcaggctatcctggcatttaaaggtgatgtttataccggtatgcaggctgaatctttctccaataaggattttgattttgctcagaatcatctgcgtatcttatctggcctttatggtgtactccgtccgttagatctgatgcaaccttaccggttggaaatggggatcaaactggaaaataaacgcggtaaagatctctacgctttttggggagacctgatcacagaaaaactcaatgaggcgctggaacaacaaggtgataatgtgttggttaatttggcttccgatgaatatttcaaatccgtgaatacgaaaaagttagccggtaaaattattaaaccggtatttctcgatgagaaaaacggtaaatataagattattagcttctacgcgaaaaaagcccgtgggctaatgagccagtttattattcagaatcagttaacgcaaattgaccgtctggtggagtttaatttggatggctacgcctttgatgaatcgttatccaaaggaaatgagctggtatttaagcgccctgaacaacattaa

SEQ ID NO: 8308 - DNA, 1299 bp, Photorhabdus luminescens
atgaaactgtataacttgaaagacaacagcgagcaggtgagttttgcacaagcagtcaaacagggattaggcaaacagcaagggcttttctttccgcaagatttacccgaattcagtcgtgaagaaattgaccacctattgaaactggattttgtcacccgcagcggttgcattctctccgcgtttattggcgatgaaattccgccagaacaactggcaacacgaattaagaacgcttttacttttccggcacctgttaccaacgtggaaaatgatgttgcaacattggaattattccacggcccgactctggcatttaaggattttggtggccgttttatggcgcaaatattggcacaagttgctggtgaacagccagtaactatcctgactgcgacttccggcgatacaggagcagcagtagcgcacgccttttatgggctaaataatgtacaggtggtgatcctctatccacagggcaaaatcagcccgttacaggagaaattgttctgtacattgggtggtaatattcacacggtggcgattgatggcgatttcgatgattgccaggcgttggttaaacaggcgtttgatgatcaggagttgaaacaggctctgtatctcaattcagctaactcaattaacatcagccgcttgttggcacaaatttgctattactttgaagcggttgctcagctaccggaagatcagcgtgaacaactggttatttctgtaccgagtgggaattttggtgatttaaccgcgggtttattggcaaaatcgatgggattgccggtaaaacgctttatcgctgccacgaatgttaacgatacagttcctcgttatctagaggatggaaaatggttgcctcatcagaccgttgccacgctttccaacgcaatggatgtgagccagccaaacaactggccacgtattgaagaactgttccaccgtaaatcctggccattgagcgaattgggatatggtgtagtcaatgatgacgtgactaaagaaacgattaaggaactggctaaacacggttatatctctgaacctcatgccgcggtggcttatcgtgtcttgcgtgatcaattacaagaaggtgaatacggattatttcttggtacggcgcatccagcgaaatttaaagagagtgtggagcagattctgggtgaggaattacccttgcccaaagctttggctgaacgggctgatctggagttgctatcccattacttaccggcagattttgctaagttgcgagctttcttgatggaaagagcacccaagtcattatga

SEQ ID NO: 8309 - DNA, 930 bp, Photorhabdus luminescens
gtgattaaagtctatgcgcctgcatctattggtaatgtcagtgttgggtttgatgtactgggagcggcggtctctccagttaatggtgctttattaggtgactgcgttactgttcgggcagcgaagagtttcagtttgcgtaatgaagggcagtttgtggggaagttacctgagaagctggagcacaacattgtttatcaatgctggcaattattctgccagcatttgggcaaacaattaccagtggaaatgacgctggaaaaaaatatgccaattggttctggccttggctccagcgcttgttctgttgttgcaggtttgatggcactgaacgagtttgcaggtctcccatttaatgaaagccaattactggcaatgatgggggaactggaaggacgtatttccggcagtattcactatgataatgtcgctccatgctatctcggcggtttgcaactgattatggaacaaggagatattatctgtcagccagtaccttcgtttgatgagtggttatgggtgatggcctatccgggcatcaaagtttctaccgcagaagccagagcaattttacctgtaaaatattcgaagcaggatgttatcgatcatggacgttttcttgccgggtttattcatgcctgtcatacacggcaaccggcgctggccgccagattgatgaaagatgtggttgctgaaccgtatcgtacccaactgttaccgggttttgccaatgcgcgtgaaacagcaaaacgggtaggggcattggcgtgtggtatttctggttctggcccgacattgttttccatttgtaatgatatagcgaccgcagaggaaatagctgagtggctgcaacagcattatgttcagaatgatgaaggttttgtacacatttgccgtctggatctcgcaggcgcacgacaaatagggtaa

SEQ ID NO: 8310 - DNA, 2460 bp, Photorhabdus luminescens
atgcgagtacttaaatttggaggaacttcggtcgctaattaccagcgggtgttgagcgttgccgacattgcagagaaaaaattttctcaaggcggggtcgcgttggtgctttctgctccggcaaaaattaccaatcatttagtggctatgattgaaaaaacggtcgccgggcaagagatcattacccatatgcacgatgctgagcagatctttgttgatttattacaggggatggcacgggcgcaacccggttttgcttatgaacggttaaaaatgatggttgagcaagaatttgctcaattgaaacaggttctgcatggtatttcgttactgggccaatgcccggacagcattaacgcttccctgatttgtcgtggggaaaaactctctatcgctatcatggagtctgtattgcaggcacgtggtcacaaggtcacggtgattgatccggtagaaaatttgttggcacaaggtcattaccttgaatctacggtagatatcaacgagtctactaagcgcattgcttctctgaatattccagatgaccatattgtcctgatggctggatttacggctggaaatgataaaggggagctcgttgtcttggggcgtaatggttctgactattctgctgcggttttggcggcttgcttgcgggcgacatgttgtgaaatctggactgatgtggatggtgtttatacttgtgatcccagagttgtgccggatgcacggttattaaaaggcatgtcctatcaggaagcgatggagctctcttattttggtgccaaggtattgcatccacggaccattgcgccaattgctcaatttcagatcccttgcttgattaaaaataccgccaatccagatgcgccgggaacactgatcggcgatgggcaaaaagatgaaagtacgccggtaaaagggataaccaacctgagcaatatggcaatgattaacgtatcaggtccaggtatgaaagggatggtggggatggcggcaagggtatttgctgtcatgtcccgcaaagggatctctgttgtgctgattactcagtcatcttcagaatacagtatcagcttctgtgtccctcaacgtgaattggaacgcgcgcgtcaggcgctgagtgaagaattctatcttgagctgaaagagggggtgcttgatcctttggatgtgatggaaaatctttccattatctcggttgttggcgatggtatgcgtaccctgcgtggcatctctgcccgtttcttctctgcattggcgcgcggtaatatcaatattgttgccatcgcacagggatcttctgaacgttctatctctgcggttatcgataatgaagtggcaacaacagccgttcgtttgtgccatcagatgttatttaataccgatcaagtgatcgaagtttttgttgtcggcgttggtggcgtaggcagtgttttgattgagcagatccgtcgtcaacaaacatggttgaagcaaaagcacattgatttacgggtatgtggtattgctaattcacgggccatgttgacggacatgagaggtatttgccttgataattggccgcagtgtttatcagaggccaaagaaccttttagtttgagccgcctgatccgtttggagaaagagtaccatttgctgaacccggtgatagtggattgtacctctaatcagcaaattgctgatcaatacgctagtttcctgagagatggtttcaatgtggttacgccgaataaaaaagccaatacttcgtcgatggcttattatcatcagatccgtaaggcggcagagaaatctaaacgtaaatttctgtatgacactaacgtaggcgctggtctgcctgttattgagaacttacaaaacttgctaaatgcgggtgatgaattggttcagttcaatggcattctttccggttctctctcctttattttcggtatgctggatgaaggaatgtcactatctcaggcgacgttactggcaaaagagaagggttataccgaacccgatccgcgtgatgatctatctggtgtggatgttgctcgtaagctgttgatcctcgcccgagaatcaggttatgaacttgaattggatgatattgatgtggagcctgtactgccagcttcctttgataaccgaggggatgtggatgctttccttgaacgtttacccgctcttgatcaggttttcagccagcgtgtggcagaagcgaaagaacaagagaaagtgttgcgctatattggcgtgattgaagatggctgttgtagagtgaaaatcgcggcagtagacagcaatgatccgctttataaagtcaaaaatggcgaaaatgcattggcattctacacgcgttactatcagccgataccgctggtactgcggggatacggagcaggtaatgatgtcactgccgcaggtgttttcgccgatatgctgcgtactttgtcctggaaacagggagtttaa

SEQ ID NO: 8311 - DNA, 717 bp, Photorhabdus luminescens
atgcaaaccccgcacattttgattgttgaagacgaaattgtcactcgcaataccctaaaaagcattttcgaagctgaagggtacatagtttatgaagccactgatggttcagaaatgcaccatattctgtcaaacaacgacattaacctggtgattatggatattaaccttccaggcaaaaatggcttgttacttgcccgcgaactgcgagagcaagcaaatgttgctttgatgttcctgactggccgtgataacgaagtagacaaaatccttggcttggaaatcggtgcagatgattacatcaccaaaccatttaatccgcgtgaattgactattcgcgcccgcaacctgctttctcgtaccatgaatctgagtaatgtcagcgaggaacgtcgccaagttgagagttataaattcaacggttgggaattagatatcaatagccgttctctgataagcccggctggtgagccgtataaattgccacgcagcgagttccgcgccatgcttcatttctgtgaaaatccaggcaaaatccaaacacgcgcagatttactgaaaaagatgacaggtcgtgaattgaaacctcacgaccgtactgttgatgtaacgattcgtcgtatccgtaaacattttgaatcgacgccagatacgatggaaattatcgccaccattcacggtgaaggctatcgtttctgtggtgatttggaagcataa

SEQ ID NO: 8312 - DNA, 486 bp, Photorhabdus luminescens
atgttaaaaatcataaagatactcgtaacaacgacattgttgtgtttacctgtggcggctctggctgaagagattggctcggtagacactgtttttaaatttatcgggcctgatcacaaaattgtcgtggaagcgtttgatgatcctgatgttaaaaatgtgacttgctacctgagtagggcaaaaacaggcggaataaaagggggtttaggacttgcggaagatacttctgatgcggctatttcttgtcagcaggttggagagattgaactaacagacaagattaaaaagagcagcaaaaaaggtcaggtagttttccagaagcgaacctcattggtgtttaaaaaacttcaagtcgttcgcttctatgatgcaaaccgtaatgcattagtctatttgacatattccgataagatgatcgatggttcaccgaagaatgcgatcagtgctgtacccattatgccgtggaagccggtggaaaattga

SEQ ID NO: 8313 - DNA, 876 bp, Photorhabdus luminescens
atggatcaaaccggcatcattcgtgatttattacgttggctagataatcatttagatcaaccgttatcactcaataatgttgcagctaaagcaggttattctaaatggcacctgcaacgtatgtttaaagacattaccggccaggctattggctcctatatccgtgccagaaggttatcacgggcagccgttgctttacgtttaaccagccgccctattctggatattgctttacagtaccagtttgactcccaacaaactttcactcgcgcatttaaaaaacaatttaataaaacacctgcactttatcgtctcagtgaggagtggtgcgccacgggtatttgcccccccatattgctggataagaggtatattcccgaagcaacctatctcacactaaaggaacaatcactggtgggtatagaacaaacctgctcttatacgctggaacaatggtccagtttttgtactgaaatgcgccacaatttctggacatactatctgaaaaatgcggaagtgttacctcctgtactttatggccttcatcatgcgactcccaatccagaaaaagaagatgaacaaaccgtattgtacacaacagcggtagaaccccaatatgcccagtttgatgtggcaggcagccaacctgttacattaccggctggagaatacgtttcatttagttactacggtaccaaagatggcttacaagatttcctgtttaccgtctatggcatttgcctgccaatgctaaacctgacacgtaggaaaggatacgacatcgagcgatattatcttaccaataccaatgatagagacaaggaagcggcgaatcatatcatcgaatttcagtatctcattcctatccaacattaa

SEQ ID NO: 8314 - DNA, 648 bp, Photorhabdus luminescens
atgttacaggtatatcttgttcgtcatggggagtctgaatggaacgcagcacgtcgtattcagggacaatctgacagccctttgactgaaacaggcgaacatcaagccagattagtggcacaaagagtaaaatctgaaagtattacccatattattaccagtgaccttggacggacacgccgaacggcggaaatcattgctaaggtttgtggttgtgaaattattctggagccacgtttgcgtgaattgcacatgggggttcttgaacgcagaaatattgattcattaacatcggaagaagagaaatggcgtaagaaagtccttgatggcacacctgggggacgtatccccaaaggcgaatctatggatgaactggctgtgcgtatgagggctgcgctggagaactgtcgtaatctgcctgttggtagccgaccgctgttagtcagtcatggcatcgctttgggatgtttggttggcacaatactgggattgcccgcacatgctgaacgtcgtcttcgcttgcgaaattgctctctgtccagagtggattatcagcacagtccgtggctagcgtcgggctggattgtagaaacggcaggcgatatcacacatctggatacgcccgcactggatgaattacaacgttaa

SEQ ID NO: 8315 - DNA, 531 bp, Photorhabdus luminescens
atgtatcacgttattgctgcaaccaccaaccctgcaaaaattaaagccattagtctcgcctttgatgatgtttttgggccaggtacttatcgaatcgaagatatcaatgtagacagtagcgtcccacaacaacctattggtaacacagaaacccgcactggtgcccgccagcgtgtcatggctgccagacaagttcgcccagaagcagacttctgggtcggtgtggaagcaggtattgaagacgatatgacatttgcctggatggttgtggaatatcagcaaattcgcggagaatctcgttcagccagtctgatgctaccagagaaaattcttgatggtatccgcgaaggtcgggaattaggccatgaaatggcttatcttacaggcattgataacatcaatcagaaagagggtgcaattggctttttcactgatggcatcctgactcgtaccagcgtgtaccaccaagctctgatattggctttagtgcccgtacatcatgaaatttataaagagctgaacgcccgttaa

SEQ ID NO: 8316 - DNA, 321 bp, Photorhabdus luminescens
atgacgacaaatcatctgacagacccggcactttcgccgcaagatcatgaagattggcaatgttttgtgacattactccaacaggcttttgccgaaaatctacagcatccgattttgcagttattattgacaccagatgaacggacagcactggctaccagggtacgcattatcaaggagttgatgagtggaaaaatgagccagcgtgagctgaaaaatgaacttggagtgggtattgcgacgattacgcgcggctctaatagcctgaaatttgcttcaaacgatgttaaggcttggttggaacagcaattactgaaatag

SEQ ID NO: 8317 - DNA, 1941 bp, Photorhabdus luminescens
ttgatctccgggaggagcgtgataatggctaaatggcaatgccttacgatggctatagggttgatttttatctctgtagccgtaaatgctgattctctggaaaatcagcgacagagatatcagcagattaagcaagcgtggaatgtcagcgatagggctgaagttgcgagactgatgcccacattgaaaaactatcctctttatccttatctgcaataccgggaactggctcaggatctgtcacttgccaccccgacgcggattcgtgattttattgatcgtcaccccaatctgcctcccgcacgttctttatcatcccgttttatcaatgaacttgcacgccgcgaagagtggcgcgagctactggcgttcacctctactgcaccaaaatcgattaccgcccgctgtcattactattttgctaaatgggctacaggtgaggagcagattgcctggcagggagcgaaagaagtttggttgaatgggcgttctttaccagacagttgcgataaattatttgatgtttggcagcaaacaggccatttatcagtaaaactgatattacagcgtattagtctcgcgttaaaagcgggcaatacatcattagtcagttacctcgctaaacagttaccacagggatacaaaagtatcagtgaaggtctgattaagttgcagaatgatccggttaccgtaacagactttgctgatcataccgggccgactgattttagccgtgtagccactttagcggctttttcgcgtttcgcacgtcaagatccggagcaggcaagagtgatcatcccatcaattgtcagagtgcaaaagatgactgcaagtgaacgtcagcgattaaaagatattgttgcctggcagttaatgggtgatgtgagtgatgaacaggaaaagtggcgtgatgatgtgatccgcgatagccaatctgttgcattgcttgagcgtcgtgttcgtttggcgttgggtcatgcagatgagcgtggtgtggctcaatggataaaattgctaccgttagagaaccaagacaaagaggaatggcgttattggcgagctaacattctattggcgcagggtaataaaagtgaaggtgaggcaatattgcgtcagctaacagaaggccgtggtttttatccaatggttgctgcgcagaaactgaatgtcagctatccgctgatgatgaatagcgcaaaaaagccagatgctgctattgcttcaatacccgaagtacagagagtaagagagttgctatattggcaaatggatagccttgctcgcatagagtggagttacttggtcgccagccaagataaattaaaacaacagcaactggcgcgttatgctttcgatcaaaaatgggcggcgcttagtgtacaggcgacaataaccggaaaaatgtgggactaccttgaagagcgttttccattggcatggcggcgggaatttagtcacttcacggcaaataaagggatttctcaaagttatgcaatggcgatagcccgtcaggaaagtgcctggaatccgcaagctaattcgccagttggggcaattgggttgatgcaagtgatgccagaaacggcgcaagatacggttaagcaaaatggaatccaaggatatataaacagtagccaacttataaacccgctgacgaatatcgaaatcggtactgcttatctcgaatcggtttatcagcgctttggtaataatcggatactggccagcgctgcttataatgccggaccgactcgtgtagatcgctggttatctaacagtggtgggcgattagatgcgatagcttttattgaaagtattccattttctgaaacccgcaattatgtcaaaaatattttggtttatgatgtcttctacacttatttcatgggtaagtcatcaaatgtattgactgacgctgaatggcaaaggcgttattga

SEQ ID NO: 8318 - DNA, 1668 bp, Photorhabdus luminescens
gtggctcaatatgtctacaccatgcatcgggttggtaaaattgttcccccgaagcgccatattctgaaaaatatctccttgagtttctttccgggagcaaaaattggggttcttggtcttaatggcgccggtaagtctaccttattgcgcattatggccggcatcgataacgatatcgaaggagaagcccgaccacaaccaggaattaaaattggctatctaccgcaggagcctaaattaaaccttgaatatactgtccgcgaagcagtggaagaagccgttagtgaggtaaaacacgcgctgacccgtttggatgaagtttacgcagcctatgctgatcctgatgctgattttgacaaactggctaaagagcaaggtgagctggaagcgattattcaatcccacgatggtcataaccttgataaccagcttgaacgtgccgctgatgccctgcgtctgccgccgtgggatgcaaaaatcgagcatctctctggaggggaacgccgccgtgtggcaatctgccgcttactgctggaaaaacccgacatgctgctactggacgaacccactaaccatcttgacgccgaatctgtcgcttggctagaacgcttcctgcacaattacgaaggtaccgtggttgcaattacccacgaccgttacttccttgataacgttgctggctggattctggaacttgatcgtggtgaaggcattccgtgggaaggtaactactcttcatggctggaacagaaagatgctcgtctggctcaagaagccgcaacagaagctgcacgccgtaaatccattgagaaagagctggaatgggttcgccaaaatccgaaaggccgtcaggcaaaaggtaaagcacgtctggcccgttttgaagaattaaatagcgttgaataccagaaacgtaacgaaaccagcgagctgttcattccacctgggccacgcctgggcgacaaaattctggaagtggaaaatctaaccaaatcctatggcgaccgggttctgattgataatctgaacttctctctgcctaaaggagcgattgtcgggattatcgggcctaacggtgcaggtaaatctaccctgttccgtatgatctccaaccaggaacaacccgattccggcaccatcacattaggtgaaaccgtcaaactcgcttctgtcgatcagttccgtgacaacatggatgataagaaaaccgtttgggaagagatctccggcggccaagatatcatgcgtatcggtaattttgagctaccaagtcgtgcctatgttggccgttttaacttcaaaggtattgatcaaggtaaacgtgtcggtgaattgtctggtggtgaaagaggacgactgcatttggctaaactgctgcaagtcggcggtaacatgctgttgctcgatgaaccaaccaacgacctggacattgaaactttgcgcgcactggaaaacgccttgctggagttcccaggttgtgcaatggttatttcccatgatcgttggttccttgatcgtatcgcaacccacatcattgattatcaagatgaaggtaaagtcactttctttgaaggtaactttagtgaatacgaagactataagaagcggactctcggagcagaagcactggaaccgcatcgcattaaatataagagaatcagcaaataa

SEQ ID NO: 8319 - DNA, 741 bp, Photorhabdus luminescens
ttgaatcaaatcgctacgattgaagccattgatatttcatatggtttttcgaacagtaaagctaaccagaaaacgatttcagacatcactctttctatttttccaggtgaatttactttgattaatggggatctctgttcaggaaaaagtactttactggcaatgatttctgggttattgcctctcgatggaggaaaaatattaattgctgataacgagttggggaggctgaataacttcgagttagatagattccatttgatgaattgtggttttatctttcaaagaattaatttatctaatgaacttacggtcttggataatttgctattatctctctcttgtggaatcacgacttctcatcaggaagcaatagtcagagcaactaaggcactcaatattgttggcctgaaacacaagaaagatatatatcccaaggaattgcgtgataatgaaaaacaacggctggcaatagccagtgccattgtgaaaagccctcggtatttgtttgctgacgagccaacccgtcatcttaataattatgactgtcaaacagctattgatatcttaggttttattgctcataaccaaagaggtacggttgttgtggcttcacaggataataggcttatcaaacatgccgatcgtattattactttgaaaggaggaaagattatccatgatacgtatcttacacataacataatgaataagactatgagtttatatctaaataattga

SEQ ID NO: 8320 - DNA, 1257 bp, Photorhabdus luminescens
ttgattaaacagggaggagatatggggcaatttgactaccttaaagaagcgattaaacagacaggttatacgttgcaacaggttgccgatgcaagtggtatgaccaaaggttatcttagccaattaattaatgacaaaattaaaagtcctagtgcccaaaaactggcggcgctccatcactatctgaggttgcaatatcctgtgcaaaataaaactgttggagtggtattcggcaaattctatccattgcatactgggcatatctatctgattcaacgggcctgtagtcaggtggatgagttgcatattatcctttgccatgatgagcctagagatcgggagctatttatgagtagttccatgtctcagcaacccacggtgagtgatcgcttgcgctggttgcttcaaacatttaagtatcagaaaaatattcatattcactcttttgatgaacagggaattgaaccctatccacatggttgggatgtgtggagtgatggcatgaaagcctttatgtcaaagaaaggcattcatcccacttatatatattccagcgaaactcaggattctccccgatataaagagcatttaggaattgagacaattcttatcgatccacaacgttcgtttatgaaaatcagtggtcggcatattcgccaagatccattccgtcattgggaatatattcctaccgaagtgaaacctttctttgttcgtaccgtagcgattcttggtggagaatctagtggtaaatctacattagttaacaaattggcaaatatttttaatacgacaagtgcttgggaatatggtcgtgattatgttttttctcatctggggggagatgagatggcgctacaatattcggactatgacaagattgcattgggacaagcccaatatattgattttgccgtaaaatatgcgaataaggttacatttatcgataccgattttgtcactacccaagcattctgtaagcgatatgaaggacgtgaacacccgtttgttcaggcattaattgatgaataccgatttgatttggtcattctactggaaaacaacactccttgggttgctgacggtttgcgtagccttggcagcgagcaggatcgtaaagcgtttcagcaactgctggaggatatgctgaaaagtaataatattgaatatgtcaatgtggattcacccgattatgatcagcgtttcctacgttgtattgagctcattcagcaacttttagcggctaatcctaaatga

SEQ ID NO: 8321 - DNA, 1383 bp, Photorhabdus luminescens
gtggctaaagcagtaaagcgggcatttgtctgtaatgagtgtggggcggattatccgcgctggcaggggcaatgtagtgcgtgtcatgcttggaataccattacggaggtgcgcttagccgcagcaccttcctcccgtaatgagcggctcagtggttatgcgggagatgctggtgtcagtagggttcagaaattatcagagatcagtctggaagaacttcctcgtttttctaccgggtttaaagagttcgatcgggtgcttggcggtggtgttgttcccggtagtgcgattctgattggtggtaatccgggagcagggaaaagtaccttattgttgcagacgatgtgtcagttgtctgcacagatgaaaactttatatgtcactggggaagagtcgttacagcaggtggcaatgcgtgcgcaccggttgggattgccggctgataatctgaatatgttgtcagaaaccagtattgaacaaatttgtctgattgcggagcaggaacagccaaagttgatggtgattgactccattcaagtgatgcatatggcagatattcaatcttcgccggggagtgttgctcaggtcagagagacggccgcttatcttactcggtttgctaagactcgtggtgttgccattgttatggttggtcatgtgaccaaagatggctcgttggcgggtccgaaggtgttggaacactgtattgactgctctgtgatgcttgatggtgaagcggattcccgctttcgcactttacgcagtcataaaaatcggtttggggccgttaatgagcttggcgtattcgctatgacagaacaaggattgcgtgaggttagtaacccatcagcgattttcctgagccgtggtgatgaagttaccgctggcagttctgtcatggtggtgtgggaagggactcgtcctctgttggtcgagattcaagcgctggtggatcattctatgatgaccaatccacggcgggtggctgtgggtttggagcaaaaccggttggctattttgttggctgtccttcatcgtcatggtggtttgcaaatgtccgatcaggatgtgtttgtgaatgttgtggggggagttaaagttgcggaaaccagcgcggatctcgctttactgctctctttagtctccagttttcgggatcggccgttaccccgtgatttggttgtatttggagaggtgggactggcaggggaaatccgtcctgtgcccagtggacaggagcgtatatccgaagccgctaaacatggttttaaacgggcgatagtcccttatgccaatatgccgaaaaaagcgctgccagggatggaagtttttggtgtgaaaaagttggcggatgcgttatctgttatggatgattttgattaa

SEQ ID NO: 8322 - DNA, 978 bp, Photorhabdus luminescens
atgtctaataacctggcttatcactatttgccggaagaggtccataagtggccgggattaccactttcgttaagtggtgaagaagtgatgccgttggattaccgagcgggtgacagtggttggttgatatatggccgtggcctggataaacaacgtattagtaattttcaacatcggcttggcgctgctattgtcatcgtttcttcatggcgtattgatgattatcaggtagtacgtattgccggaaatttgactgctcgtattaaacggctagctgatgagtgtcggttagatgtggttcccttggggcagatcccacggttgcggtcaccaggtttgctggtgatggatatggattcaacagcaattcaaattgaatgtattgatgaaattgcccgtttggctggcgtaggtgacaaagtggccgaaattactgagcgggcaatgcaaggagagttggatttttctgatagtctgcgagagcgagttgctcagttggcaggggctgatgctgatattctgcgacaggttgtagaaaatttaccacttatgccggggctgaccagtctggtgcgtaagttacaatcctttgattggcatgtggccatcgcatcgggtggttttacctattttgctgaccatttacgccagaatttacgtttggtggctgcggtagctaatcagttagaagtcaaaaatagtcagttgacaggtaaggttatagggcccgttgttgatgctaaatataaggctgctacattggtgaaattggcgaaaaaactggatatcccattggagcaaactgtcgcgattggtgacggcgctaatgacttgaagatgatccgcaaagcagggttaggtatcgcttaccatgccaagccgaaagtgtatgcacagtcgaaagtgaccattcgtcatgctgatctcatgggagtattgtgtgtgttaagtggtggtctcaaacacgaagaacgttaa

SEQ ID NO: 8323 - DNA, 645 bp, Photorhabdus luminescens
atgatcaaagctaaattaaaattccgactgcataaaacagctattatcttgatttgcattgctttattagtatttctaatgcagggcgtttcttatttcagccgttctcaccaacaagcccagatggatcaatttgaggaattggcaaaaaccttggcaaaacaagtcgcattcagcttatctgattatatggagagtggcagcaaagatcttaataatgagcggatactggctaatttgcatcatctgacgacaaacagccgcatacttgatgccagtgtttatcttaacaatgggacacaggttgcccatagcggagaaaacgtctcggtgcgggatcgtctatctttggatggtaaaaaagcgggcagctattttaactaccagatagtcgtccccatcccaggaaaagatgagccaaaaggctttctgcgcctgacgctggatacccacaaattggcaactgagtccaagcaggtggataacacaactaacttactccggatcatgatcttactcgctttagcaattggttttattctggcacataacctattgcaattaacaccaagtcgatggcaacaatcgccttatttactgacagccaacagtaaatcaagtgcaaatggagaagaagagaaataa

SEQ ID NO: 8324 - DNA, 1692 bp, Photorhabdus luminescens
atgacgcgtgcgggatgccaaagaataatgaaaaaaaaggttattatttttactagctttcttattgttactaccgatgttaaagccgccgaaatatcagatcagcaactcattcatcaacaagaacggcagaaagcactggaagcccaattagcgccgccaccggcggatattcgtctgtctgttcctgaaacagcagtaccttctacatttcccgtcgatacgccctgctttcccattacgcgagtcgttcttgaaggcacggaacattttcctcactggttacctttaaagcgtttagcccaacagggagaaaaccaatgtctgggcacccaggggattaatatattaatgactcggatacaaaaccggttaattaatcatggctatgtcactagccgagtattagcacccagtcagaatcttaattccaagacattaaaactcatgatcataccgggcaaaattgggcatattcgctataccgctgaaagtggcaattatattcaacgaataaccacatttcctccccgcgaaggagaactgcttgacttacgggatattgagcaaggattagaaaatttacaacgttttcctactgttcaagccgacatggaaattgtaccgaatgaacagttaggcgaaagcgatatcgtgctgaactggcgtcagtcacgacattggcgactcgctagctatctggacgattcgggttctaaaagtaccgggcgttaccaaggcggattaactttatatctggataatcctcttgcgttgagtgatctattttatatctccggtgggcgcgatattcgctctccttctggtcgcagcagcaaaaactacaccatccattactccctaccagtgggatactggatggcaggcatcactgccagtaattacgattacaaccaaaaggtagccaggccaactaaagacgacaaatacagcggcgaaagcaaaaatctgaatgtccaactcagccggatcttgcatcgtaacgccggtcaaaaaacctcggttaacggcgagatttatcgtcgaacatccaaaagcttcattaatgacctggaaatcggcgtacagcgccgggaaacagctggctggaaattaggattatctcatcgtcactacatcggtagtgccaccttggatgccggagtgacttaccagcggggaactcgctggtttggggcacaacccgcaccagaagaggtccgcggtgaagcaactgccttacttaaaacaacccagttttctgcggcactttctgcgccatttaccctattttctcagccattcatctacaaaacccagtacctgcgccaaataagcgccagaacgttgacgccacaggatcaattttcaattggcaatcgctggaccgtacgcggatttgacggcgaacgcacactaaatggagatcatggttggtacagccgtaacgaactggaatggcaaacgccactgaatggtcaatccctatatatgggcatggattatggcgaaatcggcgggccggggaatgagcaacgactgggaaaacatctggcgggcggcgttctaggttgtcgcggcagtcttaaaggcgtgagctatgacctgtttgccggtatcccactatccaaaccggatggctttcaaacctcatcagttacaaccggattcagtttgtactggcagtactaa

SEQ ID NO: 8325 - DNA, 13749 bp, Photorhabdus luminescens
atgaacaagcatctgtatcgtattatctttaacaaagcacgaaacatgctgatggtcgtggccgatattgcaacttccgggcaaggtagtacggtacgccgccgcagtcgtcggcaatcaccacaatgcctttgccggttaacagcgttacgactgagtttgttattggcaaccggctgcatctccctaacagcacaagccaatattgtggccgacggacaagcaccgggtaatcagcaaccgactatcctgaacagtgcaaacggtacgccacaaatcgatattcaaacccctaacgccgcaggtatctcgcgtaatacctacagccaatttgatatcgataaacgaggcgtcatccttaacaacagtcacaatgctgtccaaactcaactgggcggtatggtggcaggcaatccttggcttgccaaagcagaagccaaaatcattctcaatgaagtgaacagtattaacgccagtaaacttaatggctggatagaagtcgccggacaaaaagccaacgttattattgccaacccggcgggcatcacttgcaacggctgcggattcattaacgcccatcgcgcaacactcaccacaggacaggccatgatggaacaaggccgactgaaaggctttgatattgaccggggagaagtccgcatagaagggctgggactggacagctcacaacaaaattacaccgaaattattgcccgctcggtggtcatcaacggcaaactgcacgcgaaagatctaaaaatcacaaccggacgtaatatcgttgatgcagctcaccagaacattgagaaaaaatctgctgacggcagcgagaatccctcatttacgctggacgtagcagctttgggtggcatgtacgccaataaaattatgctggtgggtaccgaatttggcgtaggggtacgtaacgccggccacatcggagcaaccgccggtgaagtccgtctcacggttgatggactgattgagaacagtggcacaattgccgcacgaagcaataccataatcaaagcggagtcgatacaaagcgccagcggcagcaccctatccgccggtattgataataaaggaaaagccacactgcccggatcgctgacactgaccgccaaacagcacattcaggccaatggaaaaaatctggcaaccaatactctggaagcacagagtaaaaagattgatctcagcggcagccaaacttctgctaacaacattcagctcactgccagtcagcaagagattagtaccgccaacgctacagtcaccgcggaccgctttacagctaaagcaccaggccaatttaacaacgacggcggcacactggtagcacgagaaatcaacttaacgactccagacttatccaacaatcagggaaaaattaatcaaaccggcaacggcgagctggtactgaacacccaaacactgaataaccaaagcgggacccttctcaatgaagggaaacgactggctatcaccacaagaaatctggacaaccgtcatggaaaaatcgccaataacgggaatgacctgaacctaaccgtccacgagaaagcggacaacacagaaggagggacaattcaactcgccggtaaaggtaaactgtcactcaacacccatcagtggataggtgacggaggcgaactgctctccaatggtgaactggatatacaagcccacaacctgcaactgaacaaaaaagcagtcactaccgccgacaagattacaataaaaacagacacattaagccatcagagtggagtaatgcagcagaatggcaaagataagatgtccctcactgccaagacactgaataaccaaaatggcgagattaaaggtaatggcaacctgaaaatcaatgccaccaccttggataacagcaaaggcaaaatcgttgcaaccggtggcagcacagaactgatcattgagaaaaacattgaaaacgttgacggacgaatcgaaaccaaaacagagctcaccacaaaaagtcaggcgttgaataaccatcaaggatcattactggctcagcgaatagatagccaaaccaaaggacataaattcaccaacaccgcaggacaagttattgctcaagaaaaactcaccctaaacagcggtgaactggataacacgtctggtctgttacaatccgacagtgacatgatagtcaatactcatggacagaaattgactaatactaaagacactaaaaatggtgacgaaaaagagatcaaaaaaggcaccatattaagcaaaggtaatctggaactccgtacaggagatatcaacaacaccgctggtattatttccgctaaaggaaaaaccacccttaacgccggtaacgttgacaataccgacggccaactcttatcacaacagatggcggaactgaccacacaagcattagataacactcgtggacagatccaatcagagtcaagcctgttgttggatacccaaaaccaagccctgaccaataccgacagtggcaaaactggcggtatcattgccaaagactcattacgcatttccagcggtaacctgactaataatgcgggcgttatccttggtcatggcattcacatcgatacccatgaacaacggctaagcaaccaaaaaggcaccatagcgagcaagaaaaatctgcaacttgacagtggagagctcgacagtaccagtggacaaataaaatctgatggcgacatgacattagacacccacgggaaaaagctcaccaccgctaaaagtagtgacacgggtggcgtgaccagtaagggagcgctcaccttaaaaacaggcgagatagacaaccacgatggcaccatcacgggtacaggaacgacaacgataacgggtggagaactccacaaccaacgaggaaaacttgtcagcaaaaccggtcccctgacattaacggtaaacaacactgacaacagcggtggactactgcaatccgcgggtgatctgacactggatacgaaaagtgggctgctaaccaacaccaacagcggcaaagaccggggcatcatcagcataggcaacatgaagctgacgacccaaggcgttaacaacgatgcgggcctaatccatgcgggtaaaaatctgatccttgacgggcagaagggaaccataaccaatagcaacagccagcctaatcaaggtattcgtagctcaggagacttgacgctgacggcaagtgctattgataaccatcaaggatctgtagaagctgataaacaactcaccgtaacatccgggatagttgacaacaccggtggtctactgaaatccggcacaaccctgtcgctcaacacccaaggccagaaactgactaacgcacagagcggagaaaaacgcggtatccgcagcggcagtgatctgaagctggaagccggtgaaattgataacaccgctggcctgatagatgcgcaaggtgaaacctcgctaactagccaaaacctcaataacaccagcggtaaaatcctctcgcggaaaaaagccgatctgacaacacaaacggtcaacaaccaaagcggactgatacaatccgcaaccagtttgaaattagatacacaacagcacgaactgactagcaccgacggcgggatcatcgcagaagaggctttagaactggctaccggtaaactgatcaacgaccgcggatctatccgtggtgatcaaatcctcattaacacccatcagcaagcgctaaacaatgtggctggcaccatattcagtaagaaaaatctaaaacttgatagcggagaacttaacagtaccggcgggagaatagagtctaccggcgatatgacgctgaccactggcgatattgacaaccaagacggtgtgattatcggtacaggaacaaccaccgttaccggcggtgagctgaaaaaccaaggcggaaccctcgccagtgaaaccggctcactcacattgaccgtgaaaaaaaccgataacagcagcggcctgttgaaatccgcgggtgatctgacactcgatacacaaggtgagctactgactaacctcaacagtggcaagaccggaggcataatcagtgcaggcaatgtcaagctgactgctcaaggcatcaataatgacgcgggctggatccatgcggataaaaacctgactctagatgggcaacaaggcaaaataaccaaccgcaacagccagcctaaacaggggatctcaagccagggagagttgacaataaccgcgggcgctatcgataaccaacagggaagaatcatcgccgataagcagctcaacgtgacatcaacaggagccgttgataataccagcggtaaaatggtcagccagcatcaacaactcaccatgaataccggtgaattgaataacaccagtggtttgctgcaatccaaaacaaccctttatcttaacacccacggccaaaagctgactaatacacaaagcggggatgacctcggcatacgcagcgacagtgacctgactctggaagccggtgaaattgataacaccgctggcaagatagattcacaaggcaaaaccacgctaactagccaaaacctcaacaacactgacggtaaaatcctctcgaaaggaaaagccgatctgacaacacaagccgtcaacaaccaacgtgggctgatacaatcctcagccagtctgaaattagatacacaacagcatgaactcaccaacaccgatagcggtaaaaacgggatcgtcgcagaagatgccttggaactgactaccggtaaactgatcaatgaccgcggcgatattcgtggtaacgaaacccacattaacactcatcagcaagcactaaacaacttggctggcaccatattcagtaagaaaaacctacagctcgacagtggagaacttaatagtaccggaggacgaatagagtctaccggcgatatgatactggacacgcacgggaaaaaactgaccaccgccaaaagcgacaaaaccagtggcgttattagcaatggaacactgacgctgaccactggtgaaattgacaaccaagatggttttatcaaaggtacaggaacaaccaccgttactggtggtgatctgaaaaaccaaggcggaacccttgccagtgaaaccggctcgctcacattgaccgtgaaaaaaaccgataacagcggcggcctgttgaaatccgcgggtgatttgactcttgatacacaaggtgaactactgactaacctcaacagcggcaaaaccgggggcataatcggtacaggcaatgtcaaactgactactcaaggcatcaataacgaagctggctggatccatgcggataaaaacctgactctagatgggaaacaaggcaaaataaccaaccgcaacagccaacctgaacaggggataacaagccagggagagttgacaataactgcgggcgctatcgataaccaacagggaagagtcatcgccgataagcagctcaacgtgacatcaacaggagccgttgataataccagcggtaaaatagtcagccagcatcaacaactcaccatgaataccggtgaactgaataacaccagtggtttgctgcaatccaaaacaaccctttatcttaacacccacggccaaaagctgactaatacgcaaagcggggatgacctcggcatacgcagcgacagtgacctgacactggaagccggtgaaattgataacaccgctggcaagatagattcacaaggcgaaaccaaattaactagccaaaacctcaacaacaccgacggtaaaatcctctcgaaaggaaaagcagatctgaccacacaagcaatcaacaaccaacgtggactgatacaatcctcagccagtctgaaactggatacccaacagcagaaactgacgaataccgatagcggaaaacttaacggaatactcgcactggatagcctaaaactgattacaggtgaactcatcaatgatttcggatatatccgtggcgatgaaacgcacatcaattctcatcaacagacattaagcaacctaactggcactatagtcagtaagaaaaatctaaaactcgatagcggcgagttagacagtaccggtggactaataaagtctgacggcaacatgacgatagatactcacggaaaaaaactgaccaccgccaaaagcggcgataccagaggcgttatcagtgaaggaacgatgaccctgactgccgacgaaatcgacaatcaagatggttttatcaaaggtacaggaacaacgatcgttaccggcggtgaactgaaaaaccaaggtggaaccctcatcagcgaaaaaggttctctaacattatcagtgaaccaaactgacaacagcggcggcctgttgcaatccgcaggtaaacttactctcgatacacacggtcattcactgactaataaaaacagtggtgatcggggcggtatccgcagccaggacgatatgttaattaccagcggtgatttacataatcaggctggtacaattaccaatcgcaaaatcgcaaccgtaaataatctccaaaacaccattgttggtacccaacagataaagctgattacccaagcatttaataaccaacaaggcaaggtccattctgatggcaacctgaacctcaacacgcaaggccaacgcctgaataacacgggtgacaaagacaaatcaggcgaattctctgctcagggcgatttaacactggatatcggagaattaaacaacgacgctagctttatcgccgcggatggcaaaactaagattaccagtacaaccctcaccaataaaaaaggactgattgctggtaacagtggactggagattcatagccaaacgcttaccaacagcaatggctcattgaagtcagcaaacaccgtcaatattgacacaaacgggcagctactggacaaccagcatggccgtattattggcgatgacaacaccaccgtgaccagtggcaaactgaataaccaacacggacatattcagggtaaaaaactcaccatcaacaccggacaagccgatacggataaccaagacggtaaactgttgtcagcagacaccatgaacttgaataccctacagctcgacaaccgtcgcggacaggtcaaagccataggtgacgcgacgattaacgcgccgaaacaaacgaacaataccggcggccttatccacagtgaccaacaactgacactaaaaacagcagaactcattaaccgggagactaatcatcctgaccagggtaccgaagcccaagacctgataattgaagctcaacagatagataacacccagggaacattacagggagccaaccgcctgcaagctatcattaaccagtcgctgaaaaacgaacaaggactaatctccggtggaaaacaactcaccatcgaagataaaacccagaaactgacggtgaataaccagcaaggcacactgacgggaagtgaaaaggtcaaaattaaagccaacgccttgagcggtgacggtcaaatcttatcgcagggcgatatagaggtgaaattaaagcaagacttccacaacaccggtaacatcgccgccgatggcaagctgtctttggaaaccgacggcaacattatcaatgacagcacaatgaaagccgaacaggcgtacctggaagcccaaaatctcaccaacacccaaactgcggaaatcagagccaagcaaaccgaagtcaacgtccgaaacacgctgaccaacaccgggttaattgacggcgaactgacccatctcaccgccaacaaagtactggacaacaccggaaccggacgtatttacggtgaccaaatagccctcaagagtggcactctcaataacacagcaaaagatggcaaagccgccgtcattgccgctagagatcgactagatatcggcaccggaaccctcaacaaccgtaaccatgcccagatttacagcgtgggtgacatgcgcattggtggacaactggatgaaaacctggctgcgacgagtcaagctggccgactcagcaaccacgcggcaaccattgaggccgggggtagcctaaagattgatgccgctattatcaaaaataccaacaacggtttggtcaccgatatcgtcgaaacagaaaaatcccagcgtcatgaagccgtattgagcggccgcactgcccgctatgactggtcacaggtgaatacttcccgtcgcaacaaatacggcgtgcacagagccgtcatgccggatggcagcggaagtgaagaattttacgagtaccgatatacccgtaccatcaatgaaacccagataaaagagagtgatccgggtaaaattttatccgggggtaatatgaccatcaatagtgcgatgctgaccaatgacgacagtcagatcgtagcgggtggaatactcgggggtgatattgacgaactgcacaataacgccaccaaaggcgaacgtatcatcacggatgaaggtagcgaaatccgttggtatgccaaaaagaaaaaacgtcgattcagaggaaccaaaacctcccaaggaaaagactgggaccactataacccagcaccgataaccgaaaccattgacctgaaagccctagcctggcagggcaacactcgtccaaactctaccggcataacaatagatgacaggcagacaagccgtgttcaaagtacaccaaccgggattaatctgacctcaagaatggcggaagctggtgaagttacattcaccaatgccacgatcaacgccatcacactaccgaacagggacataccgactgatcgcccattactttcacctacaggtcaacagactgagcagctattatcgtctggcgcagtggcactaccaagccgagatgcactcactgaacacccaacactttcacctacaggtcaacagactgagcaggtattatcgtccagcgcagtagtactaccaaacagagatgcactcactgaacacccggtacttccacccgttcaacaaactgaacgggtactccccccggtgacggtcactctacccaacagtggtccattagatgagcgcccgctggtgttaccaacaggccaacaatttgaattgacgctaccgtctgataccgtccaaggtcaaagcgtcgaacctcttatccgtatcgttgctccagatacccgcctaccggccaacagcctgtttgtcgtacagccgggcagtgacagccattatttagtggagaccgaccctaaattcacccaatataaaaagtggctaggcacggattacatgcaacaacagttaacccacgacccggtactggcacacaaacgcctgggagatgggttctacgaacagcgcctggtgcgtgatcaaatcacccaactgactggtcagcgttacctggcgggccacaacaacgatgaaactcagttcaaagcgttaatggaagccggtgttgccttcagcaaacagcaacagctcacccccggcatcgccttgagtccatcgcagatggcgctactcacttctgacattatctggctgaccaaccggaccgtgactctggcagatggcacaaaacagaccgtgaccgtgccacaggtctacgctcgcgtgaataaaggcgatctgaccagtgacggtgctctactctccggtaaaaacgtgacaataaatagccgaagagatattaccaacagcggcaccatcagcggacgtgaagtcacccaactggccgccagcaatctgaccaacagcggctttatccaaagcggcaaagtggatttaaccgcccggcaggacatcaccaacctcggcggacaaattcggggccgtgaccgcgtttccgcacaggcagatcgggatatcaccagtgcctctaccctgcgcggagcaggtgctgaccgttggcaagatcggcctgcgggcatttatgtccagaacgacaacggcaccttgtcgctgaaagccctcaacaacatccatctcacggccagtgacgtggaaaatgcgggcaaagacggtcagacagagataaccgcgggccttgacctgactctggataccctgcgcacccatcgcacagaaaacagtgactgggggagcgacaactatcgccatctgacacaacaacatgacgtcggtagccagataaccaccgccggtaacctggcgctgagagcgggcaataacctcaatgctaccgcggctaacgtaaacgccggtcaacaacttaccgctcaggccgggaacaatatcaccctgaataccggtaccgcttcctcagacctgatagaacacagcaaacagactagtaaaggcttactctccaaatcctccgtcgaaacccacgacgaagtgcatgaacgccgggcacaaagcaccacgctcagcggcgaccgcgtaaccttacaaaccggaaatgacctcaacatcatcggcagtaacgtggctggcactcaggatgttcatctggccgcaggcaatcagctcaccatcactaccgcggatgaagcccgtcatgaaacgcacttcaaacaagagaaaaaatccggtctgatggggaccggcggcatcggcttctccgtcggcaaagccagtcaaaaatcgactaccgatatcgacagcaacctcaacaaaggcagcacggtcggcagcagccagggcaatgtaacattcagcgccggaaaacagctcaacattcacggcagtgatgtcgtggcgggccgcgatacgcaactttccggccaaaacattcacatcaccagtgcggaaaacagtcacaccgctatcaccaaaaccgaacagaaacaaagcggcctgaccgtggcactatccggcaccgcaggcggagccctgaattccgccgttcaaacggttcaaaccgctaacaatgaaagtgacagccgtatcaaagccttacagggcaccaaagccgcccttagcggggtacaggcagtccaggcagcccgtctggccgatgctaaaggtggtgacgacaaagctaacaacaatctggtgggagtcagcctctcctacggccgccagtcctcccggtcagagcagaaacagcaccagaccactcaacagggcagcagcctgatgaccggggataatctcaccctcaccgcttccggcacaccaaaccagcacggcgatatccgcattcagggcggccagttgcaggcgggcaaagacctgcaactcaatgccagccgggatatccagctctcatccagccagaacaccgaacagaccaccggcaaaaacagcagtcgcggtggctcactgggcgtcggtttcactgccggaccggggggcacgggaatcaatctctccgccagcaccaaccacggcaaaggccgtgaaagcggtaacggcgtcagccataatgaaactacgctggatgcggggcaaactgtcaccctcaacgccggccgggatgcctcgctcaaaggcgctcaggtcagcggcgaacagattactgccgacgtcaaacgccacctgacgctcagcagcgagcaggacagcaaccgctacgatatgaagcagcagaacgtcagtgccggcgtcagtgttactctcggtccacaaccgggcggctcattgaacctcagcgccagccgcgacaaaatccacagcaactttgactccgtacaagaacaaaccggactgtttgccggcaaaggcggctatcaggtaaaagtgggtgaacatactcagcttgatggcgcagtcattgccagtaccgcagacaaagacaaaaacaccctcgataccggcacgctgggctttggcgatatcaaaaacaaagcggattttaaaaccgaacaccatagtgcgagtatcagcacagggggttcagccggcggcatgttcctcagtaatctggcggccaacaccctgggcggcgctaaccgggaaggccacgcccaaagcaccactcacgccgcggtcagtgacggcaccctgattatccgggataaagaccaccagcaacaggatgtcaccgccctcagccgggataccgaccatgctaacaatgctctcagtcctatctttgacaaagagaaagagcagcaacggctgaaacaggcccaactgattggcgaaatcagtgcgcaggtgattgatatcgccagtaccgaaggggccattatcgccaccaaagcagcccacgccaaactggagaacatcagtgacccggatagagaagcggctataaaagtactgaaggataaaggtaaaaccgacatcaccccggcgcttattaaagaccagatttacaagactgcctataacgcggcattgaatgagtctggtctgggcaccggtggaaaataccactctgctttacaggcggctaccgcggccattcaggggctcgcgggcggaaatatcggtcaggcactggcaggcggcgcttctccttatctggccggggtgattaaagacctgaccaccgacccgaaaactcatcaagtcgatgtcgtcaccaatactctggcccatgccattctgggggcagtagccgccgaagtcagtggcaacaatgcgctggcgggtgcggcaggcgcggcgggcggtgaactggctgcccgagaactgatgaagcatattcacggcgaaaatgctaaagtcagtgacttaagtgaagaggaaaaacagaccatcagcactctttctactttggcggccgggctggccggcggcattgccggtgactccaccggaagcgccgttaccggagcccaggccgggaagaatgcggtggagaataatgcgctggcctcgcgaaatctgggtgattgccgcacgctgtcaccggaagcgtgcggcaaggctaaggagctgagccagcgcattctggataaaggcttgccgtcagtggaggacatgcgcggtaaactggcatcatgtcaggatgacagctgccgtaaaggagtctggacagagtaccggcaggccagtgatgcgaccatcaacagcctgaaacagatggcgttgaatggtgagttgagtcgtgaagaactggcattcatcaaccatgaactgggcaaggagctggccgtctcaggttaccgtgccaatgacaagatagggcgttcagagcagagcagctggttaaatggcggcagcggacccctctccgggttttttaacacggaactgcgtcaaaaagagctggaaaaatcgggcttgtccaaagcggatgcggcgcagtacgtgaaggaagagcagcgcaacctgttgttgctggagactgcggtcggggctattgggggagcagccagtaataagatacaggcgaagccatcatctgtatcatcaaaaaataatgttgataaaagcgttccggcggaagctactcaagtacagcctaaccaaacggctaataaatcaagtacaacaacacagacagatgtcgcaaaatactttggccaggacagaaaatattggtcggctgagccagttccctttaagggaaataaggtttatcaacgaaatgacttgtttgatccaagccgtattgatcctaaatcaggtaagacaaacgtagagcttatgagagctggtagagcacctatcggtaatgatggaaaacctgtcaatttacatcatatgttacaaaagcaggatggacctatagctgaggtaacgcagagttttcataaggataatcataaggtcatacatataaatgataacagtatcccctcaggtattaaccgctcggagtttaataagtggcgttctgattattggaaacaacgagctaacgattttaaatag

SEQ ID NO: 8326 - DNA, 420 bp, Photorhabdus luminescens; identical to SEQ ID NO: 7724

SEQ ID NO: 8327 - DNA, 243 bp, Photorhabdus luminescens; identical to SEQ ID NO: 5836

SEQ ID NO: 8328 - DNA, 135 bp, Photorhabdus luminescens; identical to SEQ ID NO: 5835

SEQ ID NO: 8329 - DNA, 336 bp, Photorhabdus luminescens; identical to SEQ ID NO: 7726

SEQ ID NO: 8330 - DNA, 3315 bp, Photorhabdus luminescens; identical to SEQ ID NO: 7727

SEQ ID NO: 8331 - DNA, 1131 bp, Photorhabdus luminescens; identical to SEQ ID NO: 7728

SEQ ID NO: 8332 - DNA, 342 bp, Photorhabdus luminescens
atgttcaataggcgttgggcggcctggaccggcttaacggggacgctcgtggttgagccgcctgacgactatttacccccgcgtgcgccgatgccgacgggcagtccggccacggtctgcccccacaccgaacccgcccaactcaacgggggcgtgcggacgctcagcggctatcggcggttgaggtcggctctgaactgtccggcggcgtgtccgtgtcggcgttatcgtcggcgtacaggtcggccagtaaacccacctcatcggcgtcgcggactttttcgtcggccatttgctccgccggatgggtgctggcgtgcaccgcctgcaaggcccggatag

SEQ ID NO: 8333 - DNA, 132 bp, Photorhabdus luminescens; identical to SEQ ID NO: 7729

SEQ ID NO: 8334 - DNA, 330 bp, Photorhabdus luminescens
atgaccacgcggttttgttttgttcagggaagcccccgggggctgcacggggcggcgatggcgagcacgggaatgagcaaggagcctgcgactgcgaaccgggcgcagccagtgcagcggggttggggcggggggaagtcaatgagcggaggccgcaggccgatctgccttcagggttgttggccggacgttggcacggcagctaaagaagaactcagagttgccgatgtccggctcagtcggttagagcataaggcgcagccttgtgcgccacacccgccaatgctgacccgcgggggcgcaagacataatgccaattatacgcattaa

SEQ ID NO: 8335 - DNA, 267 bp, Photorhabdus luminescens
gtggtcatgcaaggtcatacgcaaaccgaagccacagtgcctcagagcatcgcaggggcgccgcttgcgggctctgtgccgcccgcgcccgcagaacgggcacccgccgcccaagcgagttgggcgacgttcgcccgttgccgaaaaaggcgctacactgaccagagcgcggcgggaaaaaccggccttcgggggcgaaaagcgcgtcagggggttttggggccggcggtgaacgcccattggaaaaaacgggtggtaactggctga

SEQ ID NO: 8336 - DNA, 1026 bp, Photorhabdus luminescens
ctgacggccaaagatgtccacgaactgaaagaggaactgctggaagcagaaaagactggcgcaaacaagcagacgatttacgacaagtttaaggagcgtagcgagaaaaatcgtcaggaaggtgtcgcggataactgctcccataatccgggctgtgtggtatccgtctgggaaatgatgaactcgggaacagacgtcgccagtggcctgaaccggacttctttcttctccagtctcagtagtgaggagatggcacagttaaaccgctttgtgcaggcggagaatgcggaaagtgcccaggcgatttaccagtcgctgccagatgtggtaaagaaggttgttgaaggcaaggagttcgcagaacagtttggtgtaatgccgaaagtgggcggcagtagcgggataattggactagggatagccgggaagaagcctgcgacaaaagacacaggcaatacgggtacaaaaggcactaatgctgctcataatcagcaagttaataaatcaaatttagctaccgcagagaaagacattgtacttattgaacaaggtaagaaaggtggttggagtaaggtactgaataagcctgaacccaataaaatttatcatgtaagacatgcaagcggggagaaaatttatcatacagatggattaagcaggccagtccatatcgaaacttcactacatttatccaagaatgaccgtaatacttatcagcaatgtaaagcaggtaaatgtggtaatccgggagatgaaggcgggcatttaatcgctagtatttttggtggcccaggcgagcgattaaatgttgttcctatggatggaaacttaaataaaggtgcctggaagcagatggagaattcttgggctaaagaactaaaggcaggtaagaaggttgatgtgaaaatacaacctatatatagtgataatagtaaccgccctgtcagttttaatgttacctataaggtagataatgaaaggccaataagattaaacatagataatgttcctgggggcaagaaatga

SEQ ID NO: 8337 - DNA, 297 bp, Photorhabdus luminescens
ttgttatataacgcagctcctgataatgcgaaaaaaattattatggatacggagttatctcctgaaggtgattgttgtcaatttaaatatgattacatcgattccaacgatgaaatgcgctggtttttacctgaagacgggataatagatcatagattgagggaactattagtcacattaagacaattttttatagaaaatgttcattcagagagaaaacctcattggtcgggttgtatagtcactattgatgtagaacaaatgaagctcaatatagacttcaaatacgaaaactaa

SEQ ID NO: 8338 - DNA, 1800 bp, Photorhabdus luminescens
gtgagtatcagcaccggcggttcagccggcggcatgttcctcagtaatctggcggccaacaccctgggcggcgctaaccgggaaggccatgcccaaagcaccactcacgccgcggtcagtgacggcaccctgattatccgggataaagaccaccagcaacaggatgtcaccaccctcagccgggataccgaccatgctaacaatgccctcagccctatctttgacaaagagaaagaacagcaacggctgaaacaggcccaactgattggcgaaatcagtgcgcaggtgattgatatcgccagtaccgaaggggccattatcgccaccaaagcagccaacgccaaactggagaacatcagtgacccggatagagaagcggctataaaagtactgaaggataaaggtaaaaccgacatcaccccggcgcttattaaagaccagatttacaagactgcctataacgcggcattgaatgagtctggtctgggcaccggtggaaaataccactctgctttacaggcggctaccgcggccattcaggggctcgcgggcggaaatatcggtcaggcactggcaggcggcgcttctccttatctggccggggtgattaaagacctgaccaccgacccgaaaactcatcaagtcgatgtcgtcaccaatactctggcccatgccattctgggggcagtggccgccgaagtcagtggtaacaatgcgctggcgggtgcggcaggcggtgaactggccgcccgagaactgatgaagcatattcacggcgaaaatgctaaagtcagcgacttaagtgaagaggaaaaacagaccatcagcactctttctactttggcggccgggctggccggcggcattgccggtgactccaccggaagcgccgttaccggggcccaggccgggaagaatgcggttgagaacaacttcctgaaggcaggtcagatcacctcatggttggaaaaatataaagcatcatctactgatgaagaaaagaatcgtttaattgaggttgctagtaaagctgatcaagatcagcaacaaaaagctattgaaactaagatttcaaaagattatctgatgaaacaacaggaagagttgataaagcttattcaatcaccaaattgtgacgctgactgtacaaaattaacagaatatagccttaaccagattagcccagtaattgataattacgatacattgcagaaaagcaataatatcccacgggcagtaattgcaacaatttctctagccttaccgacattagctaaaacggctacacctgctgttactaattggattggaagtacgactattgcaaacagagctataggtgtaggtactacaggcttagccaacctaggaatgcaaggttacaacatctacaacaatcctcaagaaaactttagctataccagtttcgggacatctttgattacaggcggtgcaacggcaggaatggggtattggggtactgctgcgactaatacattaggagcaggtgtttctagcgtaattgatggaaattctccgtggttaccaatgggaggcgcgtttgtaggatcatcagtaggttatggagtgacaaagggaactactaactatttggataataaaatgaatccttggtcaaatggatttaaagaaagattcaatttaatcaatccttcgatatctgcaccaccgttagtatcccctgctcctggcattgttggtagtgcagtaggagctgttggttctgaaactgcaaataaagtaatcatggatgagttaagctctaaggataaaaaatga

SEQ ID NO: 8339 - DNA, 231 bp, Photorhabdus luminescens
atgaaatttataatctattttttatattggtctttagttcagagcataggtgtgttcatcacggtcatggcggtaaaactgttagttaaatttgttctttattttgaaactggcgtgtttttcatcggttataaagatattgttgaggctattggaataggtgttgttatggggatattcctaggtggtgttatttgtttgataaattatcttcaacataaaagattttag

SEQ ID NO: 8340 - DNA, 2823 bp, Photorhabdus luminescens
ctggccgcaggcaatcagctcaccatcactaccgcggatgaagcccgtcatgaaacgcacttcaaacaagagaaaaaatcgggtctgatggggaccggcggtatcggcttctccgtcggcaaagccagccaaaaatcgactaccgatatcgacagcaacctcaacaaaggcagcacggtaggcagcagccagggcagtgtgacattcagcgccggaaaacagctcagcattcacggcagtgatgtcgtggcgggccgcgatacgcaactttccggccaaaacattcacatcaccagtgcggaaaacagtcacaccgctatcaccaaaaccgaacagaaacaaagcggcctgaccgtggcactatccggcaccgcaggcggagccctgaattccgccgttcaaacagttcaaaccgctaacaatgaaagtgacagccgtatcaaagccttacagggcaccaaggccgcccttagcggggtacaggcagtccaggcagcccgtctggccgacgctaaaggcggtgacgacaaagccaacaacaatctggtgggtgtcagcctctcctacggccgccagtcctcccggtcagaactgaaacaacaccagaccactcaacaccagcacggcgatatccgcattcagggcggccagttgcaggcgggcaaagacctgcaactcaatgccagccgggatatccagctctcatccagccagaacaccgaacagaccaccggcaaaaacagcagtcgcggcagctcactgggcgtcggtttcactgccggaccggggggcacgggaatcaatctctccgccagcaccaaccacggcaaaggccgtgaaagcggtaacggcgtcagccataatgaaactacgctggatgcggggcaaactgtcaccctcaacgccggccgggatgcctcgctcaaaggcgctcaggtcagcggcgaacagattactgccgacgtcaaacgccacctgacgctcagcagcgagcaggacagcaaccgctacgatatgaagcagcagaacgtcagtgccggtgtcagtgttactctcggtccacaaccgggcggctcattgaacctcagcgccagccgcgacaaaatccacagcaactttgactccgtacaggagcagaccggactgtttgccggcaaaggcggctatcaggtcaaagtgggggaacatactcagcttgatggcgcagtcattgccagtaccgcagacaaagacaaaaacaccctcgataccggcacactgggctttggcgatatcaaaaacaaagcggattttaaaaccgaacaccatagcgtgagtatcagcaccggcggttcagccggcggcatgttcctcagtaatctggcggccaataccctgggcggcgctaaccgggaaggccacgcccaaagcaccactcacgccgcggtcagcgacggtgccctgattatccgggataaagacaagcagcaacaggatgtcaccaccctgagccgggataccgaccatgctaacaatgccctcagccctatctttgacaaagagaaagagcagcaacggctgaaacaggcccaactgattggcgaaatcagtgcgcaggtgattgatatcgccagcaccgaaggggccattatcgccaccaaagcagccaacgccaaactggagaacatcagtgacccggatagagaagcggccataaaagtactgaaggataacggtaaaaccgacatcaccccggcgcttattaaagaccagatttacaagaccgcctataacgcggcattgaatgagtctggtctgggcaccggtgggaaataccacactgctttacaggcggctaccgcggccattcagggactcgcgggcggaaatatcggtcaggcactggcaggcggcgcttctccttatctggccggggtgattaaagacctgactaccgacccgaaaacccatgaagtcgatatcgtcaccaatactctggcccatgccattctgggggcagtagccgccgaagtcagtggcaacaatgcgctggcgggtgcggcaggcgcggcgggcggtgaactggctgcccgggaactgatgaagcatattcacggcgaaaatgctaaagtcagcgacttaagtgaagaggaaaaacagaccatcagcactctttctactttggcggccgggctggccggcggcattgccggtgactccaccgaaagcgccgttaccggggcccaagccgggaagaatgcggtggagaataatgccttaagcttgccaaaagggatgtcggattacggtcgggcacagagttcactggcaatgaagatgtacaaggaaggggcaacaccggatcagatatccgaagagctggcgaggcaagcacggggcacccatcccgaaggccaagatccagccagagggctgattgtagcgtgggggaacttcttcggtgttccgttggatgtggttatgtccaatgagaaaatgacgccggagaaagccgctgaaattgtgaccagcggcatcccgaccagtgaagcgaaggtgatgcagtatgtggcggctaaggcattcttggcactggctaaaaatcctgtttcgggtagcaaagcagaaggttcatcaccgcaatggaaagtaggagaagggaaatttagtccgaaggataagggcacagtgacgaatgttgagcatccggttggtaagtttgatggaaagtcactacctaatggaaaagaaaacattgcaagtgacaagacaatcaaaaatgacgtattagagcatcaaagggttggaagtggcgagaaaggaactgtagtggaaataaagtag

SEQ ID NO: 8341 - DNA, 153 bp, Photorhabdus luminescens
ttgaaaaatggagccactctttatcaattgccaggaaaattaaatggggttgaaggacgatttgagtggatagtagatccaaaattaggtggtgtaagccatagaatgtttgttactggcggaacagtgaatggagtgccatcaaaaccatga

SEQ ID NO: 8342 - DNA, 516 bp, Photorhabdus luminescens
atgatgaatgatatgtacttgttagctaaaaaaatggaattacttgattggggaatgatttttcttggagccaagggaaaccctgttggtcgtttatctgctcctaatataagtgagtttgcatgtaatgaattaacaaaacttgatctgtctgattcaattctggtcgaggtgtctgaagctgcattttgcacagaaatcaatcgtgaagtgatcgatagcttagaagtcatatgtgataaaaaaaatataaatatacagttatcagaaaggaaatggagatatgtcgctttatatatcctattactcaatgaattgcctgatgattatgtatatggtcttctcaaattaaacgagttttggaacctttggggagatagtgttgattcaccgaatatagtccaaggtgttggtaataatctttcaccgacagaatactattcggaagagaattaccacctattgatagaaaagcatcgtaactggttagatagagagattaagcaattgcaatag

SEQ ID NO: 8343 - DNA, 360 bp, Photorhabdus luminescens
ttgaaagattctgaatgttgtttggatttttgtaaaaaaatcttagattcggatctttttaacaataattctgttaaatctactgctttagattttttgattttatcagaatctaattggtttgaggcttttagctatttgctcaataaagctgaaaaattatctactcctgaattggaaaaagcattgttttacttttattgcgcaaaaaacgatcctaaaccatatcctgttcctgaaggactttttaataaattgatagaaaggtaccaggtactaaaaactgaatctgatgcaaatttttgtcatctgcatgaaacatacaacgattttattaaagcttattcattgaaattttga

SEQ ID NO: 8344 - DNA, 252 bp, Photorhabdus luminescens
ttggcaaaagtagaaacgcaaaatccagagcatacatgcccgtatcgcaatatccgcaaagattaccttcataaagtcacgatgactatcagcgaaaaccacgccatgatcgtcattgaggacttaaaggtgaaaaacctgtcaaaatcagcggcggggatggttgaacaccccgggcgccacgtcagggcaaaatccggattaaatcgcgcgatactggatcagagctggtatgaaatgcgccgccattag

SEQ ID NO: 8345 - DNA, 624 bp, Photorhabdus luminescens
gtgagaaaaaatggacacagcatttttcataatgaaaaaaacaaacctcattattttgaatggggtttgccagcggtctgtaaagcagttcactttttttatctttccgaccaggaatatgacataaaaggatttattgataaatttgaagaaaatagcaaatttttatgcaatgttttttctgcgattgtaggattgcatattaaaagaatttttctaaaagagcttgaagagaattatgaaatagaacctgaattttataattcacgaatttatttatcggcagaaaaacgtggtaatataattgatgcttttgaaacagttttgccctattacttagcgcctaaacagaatagccagtatgaacatatttatcttcaaccaaggggagatgatttattgtattttgtatcaccatgcaattcacctaatcaaacgattgcaaaagagaacttaatttacaatattctgactatggataaagagggaaaacagataaatgcgatggaacaaaatatcacatctattttcctacgttcttttaccaacgatatattaaggttaagggaggtcagtaaaagctctttatttgagaaaatagctaagatatatattgaaaactag

SEQ ID NO: 8346 - DNA, 153 bp, Photorhabdus luminescens
ttgtgggttgctgaaagtgaaaatacaatgccttttggtagcaacagttcaaaatatcaagcagatagagttgctgatcgcaaggctttattatttttatctgtggatgggggaatattcagtgtagcagggtccaaaatggcatttgggtga

SEQ ID NO: 8347 - DNA, 159 bp, Photorhabdus luminescens
ctggtacaggaaattcaggttaatgtggcttaccacgggtttctgcgcctcggactgacagagaaggtccccgattcctcaaccctgagtcagaaatgtcgtcgtcgtttcagtcacagcgaggtcttccggcaaattttttacaacattgttgagtaa

SEQ ID NO: 8348 - DNA, 159 bp, Photorhabdus luminescens
atgttaagaacaccccctctccagactttctcaccagaaacgctcttgtttgacgagctggcccttaaaaatcatttggtccgtcaagtcgatgccgtcattgatttcgaatttatccgcgaattagtagtcccattgtattgccacaataatggctga

SEQ ID NO: 8349 - DNA, 1077 bp, Photorhabdus luminescens
atgagaatagcatgtggttttaatcctaattttcttagcggtgaaatacacataccgagtaaagtatcgatgatagaattagggattactgcatacaatattttatcagttgcagaaaaaagaactccattcgaaagatacaatggaaaattctctcttcacatcgccagaagtgcaataacagaagatattcaatcaggctgtaactatattaataacattatgccacgaataatcaacacggaaaaaacaattagcattggttttcatttgtgtggaaatagaaaagataacattggtaaatatggttttactccccattatgaaagaagcaagaggaaagaaagaaatgctataaatttcttaaaaagggtttctcacacatatcagatagatacatggatagaaaattcaaacttttactctggtggaccaagtgagatctctaacgcgataataagcgcgaattacataagtaaagaaagtaattctaaacaaatagttgacctggctcatctaatcatcaattcagtaaatgcaaaagttgatcctcttatatttattggaatgatagattgggataatgtagtcgaggttcatctatcaggaataattgagggaaaggatggagcatttcatgatggacatccagagagaattcatcatattgtttgggattcttttgagaaaatagtttccagcaaattaatcaaaaaaaatttctatataaatattgagcacacagaaaattcttggttaaagaacttatctggttataataatgactttgaaaaattgaattcaatattattaaaaaataaagaaacaagtaaaccctcaaataccaacatgagcaattatgcgaaatcatacctatcaaaaactctgctagcagccataaaaaacaagaaggaaattgaaatcgctaagtcggaaaacattgagtcgcttatatctagttggatattaagtatagaagaaagtgaagtaaacctatgcctaacaaaagaagaggaagatgaaactataaattcagttcattatttaaaatcattcgaaagttttgtgaataggtga

SEQ ID NO: 8350 - DNA, 780 bp, Photorhabdus luminescens
atgaaaataggaaccaattggtcgggaaatagagaactaagcgttctaaaggagataatatcattaagaaaggtcgatttcatagagatattaatagataactttttgcagtgcactcctgactcaatacttggcataagcaaaggattaccgatagcgtttcatatcatgaactctaaatatatgcacagaagcaaacaagatttagagagtatagggaaaagaataaaattactccaaaaagaactaaaccccatatatatatctgatcatgttggtattttttatcataatagctatcctttaccaacaatgggtgaaatagattactcttctgaaaaagataaatacttcgattcagtaagcctttggcaagatataattggcgaaaaaatttatttagaaaacttcccttcaatacttgatgaaaacgccaagctacaaccagatttttttaaagaaatgacaaaaaaatgcggtaatggacttttgttcgacatatcaaatgctgtaattgcacaagaaaacacgggaaccccatttgaagaatggcttgatatagaaatgaaccatcttcacattggtggttatgcagaaacatcattacgccctagttttttggttgacactcatgcagatagaatatctaatctttcattaaagtattttaataaattgggaacagaaagtaaggacaatcttacatcactatctgttgaaagagatgataattttgtattaggagactggattaatgacatcgaattatgcagacaatag

SEQ ID NO: 8351 - DNA, 1185 bp, Photorhabdus luminescens
ttgccatcgataacaatgtttaagagtagaatgttaaatatggcaatgcaacttattattaccgcactaatatatcaattgtctacagacgatgccggattttttttactatcatcacagttggttcagatatttgttgttgcttcatgtacctttttcatcggcattaatataaaatcagacattaaaaataaaaactacacttacgaaaactacacttggcttctaataacagggacggtaataggcttattaataactctaatatctgtggtatcaatacattattacagtgaccatacagtaacgaaaaaaatagcatggatactatcaatcggaattataccattatgtatatattctgttaactgcgcaattctagagtctacaaaacaagaaaggtacatggtaaaagtcaactcattcagtatattaacaaatgtattcgccctgattgcattatacttatttactggtgatttaatattttctattgctcttgctatcagtatctcaagggcatacatggccatctcatcttcaatcccattaataaaatttataaaatggaaaaaagttgacttaccttacattaaagatattgtgaatataggaataaatgaggctttaacatctacatcattagtgatattgatgtctattttaataaggtttgtatcgacattaatttcaaacatagaattatcaaagttatttgtttacatgggggttatgaattatctatttgtcacgggcttttctgctgttatttcattggctgcaaattacagaagtgatgaaaacaattttttaaatatagctataggtaccaacttattttaccttattatcttttcaaccgtctcaccattaatcagtttgatggtattcaatacgctaacagaaacaatagatataataacttgtgcattagtcatattctttgacttgatttccttatctattattaacagaataaggagcaaatcaccaaattcaaaatctgtatatcttaaggtgattcccattaccaccatacttgtggtcacctctacattaattagcccgacatcattcgaaatcttattgatttttgtatgcagtaatatactgtatacgctaatttcattaatatggtactcgctatggaaaaagaaatctttatttttagagaagttaacgtag

SEQ ID NO: 8352 - DNA, 543 bp, Photorhabdus luminescens
atggaaaaagaaatctttatttttagagaagttaacgtagaagatgcaaacaatctcattgttttttttaatgatttggataacacatcggaatttatgttgcttgagccagaagaaagaaaaacaagcgttgaagaacaggcggatataataaaaggattcggaaaagacaggcaaatgttaatatgcgaagatagcaaaaacattgttggctttattgttatatctagaggggtgttcaataggaacaggcatctgggttctattgttcttggagtaaaaaaagaatatagaaataaaggcatagcaagaaccctactcaacaaagcgcaagattggtcacggaaaaatggagttagtagacttgaattaaccgttgcaataaaaaacacattggcaataaagctgtatttgtcatcaggttttattttttctggcatcagaactagctcactatttataaatggtgaactgacagatgaatactatatgactaaaggaatatctgaaacagtaatagacaatgtaacaaacaaccggtga

SEQ ID NO: 8353 - DNA, 1368 bp, Photorhabdus luminescens
atgaccacatcacgctctgttctcgatatgattggtaataccccattgctggagttaacgcatctgaataccggtccatgtcaattatttattaagctggagaatcaaaatcccggcggatctattaaagatcgcgttgctctttccatgatcgagcaggcggaagaacaagggttacttcaatctggtgggacaattatcgaagctactgctggtaataccggcatcgggttggcactggtcgctgccttgaaaggctataaattgattctggttgttccagataagatgagccgagagaaggtgtttcatctgcgtgctctgggtaccgatgtacgtcttactcgttctgatgtcagcaaaggtcatccagagtactatcaagattatgccctacgtctggcgcaagagatccccggtgcttattatatcgatcagttcaataatccggctaattcagcagcgcatactaccactaccggaccggaaatctggcagcaaatggaccacaatgtcgatgccgtggtgatcggtgtcgggtccggcggtacgctcggcggtttgagccactatttcgctcaagtttcgccggaaactgagtttgttctggcagatccaactggttctatcttggtagactatatcgaacacggcaaatatggtgaggccgggagttggcaggtggaaggtattggcgaagattttgtccctcctctgggcaatttcagtcgagtgcaccacgcataccgtgtcagtgatgcagaagctttctccagtgcccgtgatctgttgctaaaggaaggtgtgctggcgggttcttccagcggaaccttgctcgccgccgcactgcgctactgccgtgcgcaaaccacccccaaacgtgtggttacgctagcgtgtgacagcggaaacaagtatctgtcaaaaatgtttaacgattattggatgctggaacagggattccaatcacgtgtgcaacagcacgatctcagcgattatattacttaccgctatcaggatggcgctacggtttttatatcgccagaagatacgttaaaaactgcacatacccgaatgcgcttgtatgagatttctcaattaccggtgctgaaagaagagcaagtcgttggcattatcgacgagtgggatttgatgcacaccgtgcaggctgatccacgcaattttagcctgcccgttagccacgccatgactcatcaggtgagaacgctggataaaaacgattctctgcaacaattgatggcaactttcgacgccggacatgtggcgctgatcgtcgataatggccgttttcttgggctggtaactcgcacagatgtgctgaacgcatggcgtcagcaacttaattga

SEQ ID NO: 8354 - DNA, 1155 bp, Photorhabdus luminescens
atgaccaagttcgatactaaaactgttcacgccggctacacaccagatcacacgggtgcggtaatgccggcaatttatgcaacatcaacttacgcccaatcagcccccggtcaacacactggttatgaatattcccgtagtggcaacccaactcgtgatgctctggaaagcgcgatcgccgaactggaaaacggtagccgaggctacgcttttagttcagggctcgctgccagttccacggtgctagaactcttggataaggatagccatttggtggcagtcgatgatctgtacggtggtacctaccggctactcgaaaaagtacgtagccgcaccgccggtttgcgtgtcacttacgtggaagccaatgatatttccggccttgaagcagccattcgtcccgatacaaaaatgatttgggtggagactcctaccaatccgttgctgaaactggccgatctgacggctatcgcacaaatagcgcaacgtcacagtattattagtgttgcagataacactttcgcttcaccatatctccaacgcccagttgatttgggatttgatatcgtcgtgcactccgccactaaatatttaaacggccactctgatgtgatcgcaggactggccgtcgtcggaaaaaatgcagaactagcagaaaaacttggttttctgcaaaactctgtcggtggcgtgctcgatccctttagtagtttcctggtgctgcgcggaatgcggacacttgccctacgtatgcagcgccacattgatagtgcatcaaagatcgcacattggttggagcaacaacctcagatcgaaaccgttttctatcccggtctcgcttcccatccacagcatgaattggcgaagcgtcaaatgaaaggctttggtggtatgatttctgttcacttaaaaggtgatgatgattatgcccgccggttaattcaagagctaaaactatttaccctggcagaaagtctgggcggggtggagagcctgatcagccaaccattcagtatgactcacgcgtctattccattagaaaaacgccttgcttctgggatcacgccacagttggtacgcatttctgtgggtatagaggatgcagaggatcttatcgccgatttggctcaagcgttagaaaaagccgctcaataa

SEQ ID NO: 8355 - DNA, 717 bp, Photorhabdus luminescens
atggccacgcctcatattaatgctgagatgggtgattttgcagacgttgttctgatgccaggcgatccattacgtgcgaaatatattgctgaaacttttctggagaatgtgcggcaggtaaacgatgtacgcggtatgttggggtttactggtacttataaaggccgcccaatttctgtgatggggcatggtatgggtattccatcctgctctatctatgcgaaagagcttatcaccgatttcggtgctaaagttcttatccgtgtaggttcctgtggttcagtacgtcacgatgttaaattgcgtgatgtcgttattggcatgggggcatgtactgattccaaagttaaccgtatacgctttaaagatcacgattttgcggcgattgctgatttcgatctggtccgtaatgctgttgacgcggctaaagcaaaaaacatcaatgtgcgtgtaggtaacatcttctcggttgaactgttctatacacctgatccacaactgttcgatatcatggaaaaatatggcattttgggcgtagaaatggaagctgcgggtttttacggtgttgcggctgaatatggcgcaaaagcactgactatctgtaccgtttctgatcacatccgcactcatgaaaaactgaccgccgaggaacgccagacgactttcaatgaaatgattgaaatcgcactggaatccgttctgttgggtgataaataa

SEQ ID NO: 8356 - DNA, 1224 bp, Photorhabdus luminescens
atgaaacgtacattcatcatggtattggattcttttggcattggtgccagtaaagatgccgaaaaatttggtgatcaaggatctaacaccttggggcacattgcagaagcgtgtgcccgtggtgatgcggatatcggtcgcaaagggcctctgtatttgccgaacttaagccgtttaggtttggggaaagcgactgaggagtcctgtggaactttccctgccggcttggataaagacgcggacattattggtgcttacgcttacgccagtgaactctcttccggtaaagatacaccgtcaggtcattgggaaattgccggtgtcccggtgctgtttgactggggttacttcaaagatgaagaaaacagctttccgcaggcattgttggataaactggtagaacgcgcaaatctgccaggttatctcggtaactgccactcttctggtacggttattctggataaactgggtgaagagcatatgaaaacgggtaaaccgattttctatacttctgctgattcggtattccagattgcttgccacgaagagacattcggtttagatcgtctgtatgagctatgtgaaatcgcccgtgaagaattgactgatggcggttacaacattggccgggtgattgcgcgtccgtttgttggagacaaagcgggtaacttccagcgtaccggtaatcgccatgatttagcggtagagccacctgctcccaccatactgaaaaaattagtcgatgagaaaaatggcgaagtcgtttctatcggtaaaattgccgatatctatgcaaacgtcggcattacgcaaaaagtgaaagcgaccggcattgatgcattgtttgatgcaacgctggtggaaatggaaaaagcgggtgacaacaccatcgtattcactaactttgtcgatttcgactcttcttatggtcatcgtcgtgatgttccgggttatgcggcggcattggaactgtttgaccgtcgtctgcctgaaatgctgaagcgggtgaaaaatgatgacattttaatcctgaccgccgaccacggttgtgatccaacctggtctggtactgaccacacacgtgagcacattccggtgctgatttatggaccaaaagtgcaacctggttcattgggtcaccgtgaaacttttgctgatattggacagacagtcgctaaatattttgaactgtcgccaatggaatatggcaaatcaatgctctga

SEQ ID NO: 8357 - DNA, 780 bp, Photorhabdus luminescens
atgaccgatttaaccgcagcagcgcagcgtgcgctgagtttgatggatttaacgacactcaatgataatgataccgatgaaaaagtgacggcactttgtcatcaggcgaaaagcctcgcgggcaatactgcggctatctgtatctaccctcgttttattcctctggcacgtaaagtattacgtgaacagggcacacctgaaatccgcattgcaacagtgacaaacttcccacatggtcatgacgatattgacatcgctttagctgaaacccaagcggctattgcttatggcgctgatgaggtcgatgtggttttcccataccgtgcattgatggccagtaatgaacaagtcggttttgagatggtaaaagcgtgtaaagtcgcctgtgcagaagcggatgtgctgctaaaagttattattgaaactggtgaactgaaagaggcatctctgatccgtaaggcatctgaaatttcaatcaacgcgggtgccgattttatcaaaacatctacaggtaaagtgccggttaacgcgacattggcaagtgctgaaatcatgatgaaggtgattcatgagatgggcgtgggtgaaacggttggcttcaaaccggctggtggcgtgcgtaccgctgaagaggctgcacaatatctggcattagctgatcatatcatgggtgacaaatgggttgatgcccgtcattttcgttttggggcttctagcttgttaggcaatttgctaaatactctgggtcatcaggggcaaaaacaaagcagccattattga

SEQ ID NO: 8358 - DNA, 1278 bp, Photorhabdus luminescens
atgcaactctttatgagcttggtcgggatggtagtgctgattttgatcgcagtactcttttccagtaattatcgcgctattaaactccgtactgtccttggtgcctttttgattcagatcgctatcggtgcttttgtactttatgttcccgcaggtaagaaaatattaatgggtatgtctgagggagtttctagtgttatccagtttggtcaacaaggaatggattttatttttggtggattagtttcccccaaaatgtttgaactgtttggtggtgggggatttgttttcgccctgcgtgtactgcctattattgttttcttctcttcattgattgctgtgttgtactacattggtgttatgcagctagttatcaaagtcttggggggggggctgcaaaagattctcggaacttcacgtacagaatctttgtctgcgacagcgaatattttcgtgggccaaactgaggcaccactggttgttcgcccttatattgcgactatgactcaatctgaactgtttgcggtaatgagtggtggtctggcatccgttgcgggttcagtactggcgggttatgcatcaatgggtgttcctttggaatatctgattgcggcttcctttatggcggcaccaggtggcctgttgttcgcgaaattgatggtgcctgaaactgaaaagccacgcgatactgttgatgcaatgtcactggtcgctgaagaggaacgtcctgctaacattattgatgcagccgcctctggtgctgcttctggtatgcaattggcattgaacgtcggggcaatgttattggcgtttgttgccctgattgcattgttgaatggtattctcggtggaatcggtggttggtttaattatccacaactttctcttgaactggtgttggggtgggtcttcgcgccaattgcttacctgattggtgttccgtggaatgaagcaacggtagcaggttctttcatcggtcaaaaaatagttgtgaacgaatttgttgcttttatgaatttcggtgcctatttgaaaccggatgatgtggttatggcggcgggtttgcaggttctatcagatcatactaaagcaattatctccttcgcattgtgtggctttgctaaccttgcttccgttgctatcctgctaggggggctgggcggtatggcaccgaaccgccgcggagatgttgctcgtttgggaatgaaagccattatcgcgggcacattatccaacttaatgagtgcaactatcgcaggcttcttcctggctctgtaa

SEQ ID NO: 8359 - DNA, 696 bp, Photorhabdus luminescens
atgaaagccaatatgctagaagaacgcttgagagaatttttgaaacatcgactcgctcactctaatgataatgctcatgatattgggcatctgatccgtgttgcaaataacgcgaaaagaatcatggagaaagaaggaggtgagcctttaattatcattgcctcaagttacttacatgacattgtgtcattaccaaaagatcatccagaaaaaaaacagtcttcaaaacttgcagcacaggaagccgtaaaaattctatctattgaatttccagagttcccaaaagaactttatgatgcggtagaacacgccattataacccatagctacagcgcaaacttacctgccaaaacaatagaagctaaaatactccaagatgcagaccgattggatgcattaggagctattggactcgccagagtattttatatagcgggtatgctcggtcaggggctttttcatcatgatgatccctttgcacttaatcgccccttggatgacaaatcctatacaatcgatcactttcagacaaagttatttaaactccccgaaaaaatgaataccacagagggtaagaagattgcacaattgaatgcccaatatttggttgactttttgagcaaactgtcgagcgaaattaaaggtgatttaattaatacggatgaatttataaaggattttttcaaggaaaattaa

SEQ ID NO: 8360 - DNA, 774 bp, Photorhabdus luminescens
atgtttattgatactcactgccattttgatttccctccgtttcgtgatgatgaacagcagagcctgcaacgggcggcacaggttggtgtggatagaattattgtccccgctattagtagtgcaaatttgcaacaggtatctgaattggcttgttcttatcctgcaatttatgctgcattgggtttacatcctctttatatcgatcaacatcaggaagcgcatcttgcggatttggaatcgtttctgaaacagaaacacgaaaagttggtggcggttggggagattgggcttgatctctatatgactgaaccccaatttgaaaaacagaaagcgttgttatgcgatcaattgcggttagcaaaacagtatgaactgccggttatccttcattcccgaaaaagccatgatcaactggcagcgatcctaagaagaatcaaccttcaccgtaccggtgtagtacacggatttgcgggtagcttatcgcaggcggaggcttttatcggtttgggatattaccttggggtagggggaaccattacttatgaaagagcgcagaaaacacgtcgcgtaatggctgaactcccgttaacgtctctggtgctggaaaccgatgctccagatatgccgcttttcggttttcagggagaacctaaccggccggaaaaaattgctggagtttttgcttcgttatgtgagctccgccgcgaagctcctgatgagattgctcgccaactttatcataacagtgttgagttatttggattaattatatga

SEQ ID NO: 8361 - DNA, 138 bp, Photorhabdus luminescens
ttgatcggggcatttctggtcttttaccgggtgatggctcctcgccttatcggcatagatatctacacagtttccgtcaaaaatggtattgatattcagtatgccctcaatttttctatcgtcagaacagataaataa

SEQ ID NO: 8362 - DNA, 384 bp, Photorhabdus luminescens
gtgatccgctatttcgatcaattaaatgctaaagatatgacggctgaaaatgcagcttcacttatcgccacattgcatgagatggataaaggtacgataacgcaagtgaataccttgctattaggagaaaataactggccgaaaagttttacatcactttggcaacgtctgacctggttacgtgtcggacaaagtttgaatgtcggtagtaccactctgagcaacctagatagccgttttttgccttttgaaggtcgaaaagcaacaaccggtacactggagctcaatattttccatgccggtaaagaaagaacgcaacgtgggctagttgccaatctgagtgacatcattgtgcatctgaattacatcattcgagacgcataa

SEQ ID NO: 8363 - DNA, 4458 bp, Photorhabdus luminescens
atgcaggattcaccagaagtatcgattacaacgctgtcacttcccaaaggtggcggagctatcaatggcatgggagaagcgctaagtgctgccggccctgatggaatggccactctatctctgccgttgcccctttcgactggcagagggactgcgcctggattatcgctgctttacagcagtagtgcaggtaacgggcctttcggtatcggctggcaatgtggcgtcatgactattagccgacgcacccaacatggcattccacaatacggtaatgacgacacgttcttatctccacaaggcgaagtcatgaatattgccctaaataaccaagggcaaccagatatccgtcaagacgttaagacgctgcaaggcgtgaccttgccaatctcctataccgtgacccgctatcaagcccgccagatcgtggatttcagcagaatcgaatactggcaaccggcctccggtcaagaaggacgcgctttctggctgatatcgtcaccggacggccaactgcacatcttagggaaaaccgcacaggcttgtctggcaaatccgcaaaatgatcaacaaatcgcccagtggttgctggaagaaaccgtgacaccaaccggtgaacatgtcagttatcaataccgagccgaagatgaaacccattgtgacgacaatgaaaaaaccgctcaccccaatgctaccgcacagcgctatctggtacaggtgaactacggtaacatcaaaccgcaaaccagcctgttcgtactggataacacacctccgacaccggaagagtggctgtttcatctggtctttgaccacggtgaacgcgatacgtcacttcataccgtgccgaaatgggatgcaggtacagcacaatggcctgtacgccaggatatcttctctcgctatgaatacggttttgaagtacgtactcgccgcttatgccaacaagtactgatgtttcaccgtaccgcgctcatggccggagaagccggtaccagtgacgccccggaactggttggacgcttaatactggattacgatagaaatgccagcgtcaccacattgattgccgcccgccaattgagtcacgaaccggatggcagcccaatcactctgccaccattagagttggcctggcagcggttcaacctagagaagatgccaacatggcaacgttttgatgcactagataattttaactcgcagcaacgttatcaattggttgatctgcgaggagaagggttgccgggtatgctgtaccaagatcgcggtgcttggtggtataaagcgccgcaacgtcaggaagacggggatagtaatgccgtcacttacgacaaaatcgccccactgcctaccctacccagtttgcaggataatgcctcattgatggatatcaacggagacggccaactggattgggtaatcaccgcctccggtattcgcggataccatagccagcaacccgatggaaaatggacgcactttacgccaatcaatgccttgccagtagaatattttcacccaagcatccagttcgctgaccttaccggggcaggcttatccgatttagtgttgatcgggccgaaaagcgtgcgtctgtacgccaaccagcgaaacggctggcgtaaaggacaagatgtcccccaatccacaggtatcactctgccggttactggaaccgacgcccgcaaactggtggctttcagcgatatgctcggttccggtcaacagcacctagtggaaatcagggctaatcgcgtcacttgttggcctaatctgggacatggccgtttcggtcaaccactgaccctgccaggatttaaccagcccgaaactagcttcaatcccgaacggctgtttttggcggatatcgacggctccggcaccactgacattatctatgcgcaatccggctctttgctcatttatctcaaccaaagtggtaatcaatttgatgccccgctgacgttagctttgccagaaggtgtacaatttgacaatacttgccaactccaagtcgctgatattcaagggctagggatagccagtctgatcctgacagtgccacatatggcaccacatcactggcgttgcgatttgtcgctaaccaaaccttggttgctaaatgtgatgaacaataaccggggtgcacatcacactctacattatcgtagctccgcgcaattctggttggatgagaaattacaactcaccaaagcaggcaaatctccagcttgttacctgccgtttccaatgcatctgctgtggcataccgaaattcaggatgaaatcagcggtaaccggctcacgagtgcagtcagctacagccacggtgtttgggatggtaaagagcgggaattcagaggatttggttgcgtcaaacagacagataccacaacattttctcacggcaccgcccccgaacaggcggcaccgtcattgagcattagctggtttgccaccgggatagatgacgtagacagccaattagccacagaatattggcaggcagatactcaggcttatagcggatttgaaacccgttataccgtctgggataacgctaaccagacagatcaagcattcacccccaatgagacacaacgtaactggctgacgcgggcacttaaaggccaactgctacgcaccgagctctacggtctggacggaacggacagtcaaacggtgccttataccgtcagtgaatcacgctatcaggtacgctctattcccgtagagaaagaaaccgaattatctgcctgggtgactgccattgaaaatcgcagctaccactatgaacgtatcatcagtgatccacagctcagccagagtatccgactgcaacacgatatctttggtcaatcactgcaaagtgtcgatattgcctggccacgccgcgaaaaaccggcggtaaatccctacccacctaccctgccggaagcactattcgacagtagctatgatgaccagcaacaacgattacgtctggtgaggcaaaaaaatagctggcatcacctgactgacggagaaaactggcgattaggtttaccaaatgcacaacgccgtgatgtttatacttatgaccggaccaaaattccaaccgaagggatctctcttgaagtcttgctgaaagccgatggcctactagcagatgaaaaagcagccgtttatctggggcaacaacagacgttttacaccgccggtcaatcggaagtcacactagaaaagcccacgttacaggcgctggtagcgtttcaagaaaccgccatgatggacgatacctcattacaggcgtatgaaggggtgattgaagaacaggggttgaataccacactgacacaggccggttatcagcaagtcgcgcggttatttaataccggatcagaaagcccagtatgggtggcacggcaaggctataccgattaccgtgatgccacccagttctggcggcctcagactcagcgtaactcgttactaacagggaaaaccactctgacctgggatacccatcattgcgtaataattcagactcaggatgccgctggattaacgacgcaagcccgttacgattatcgtttccttacgccggtacaactgacagatattaatgataatcaacatattgtgacactggacgcgctaggtcgcgtgaccaccagccggttctggggtacggaggcaggacaagccacaggctattctaatcagccctttacaccaccggattccgtagataaagcgctagcgttaacaggagtactccccgttgcccaatgtttagtctatgccgttgatagctggatgccgttgttatctttgtctcagctttctcagtcaccagaagaggcagaagcgctatgggcgcaactgcgtgccgctcatatggttaccgaagatgggaaagtgtgcgcgctaggcgggaaacggggaataggccagcagaacctcacgattcaactcatctcgctattggcaagtattccccgtttacctccacatgtactggggatcaccactgatcgctacgataacgatccgcaacaacagcaccaacagaccgtgagttttagtgacggttttggccggttactccagagttcagtccgtcacgagcccggtgatgcctggcaacgtaaagaggacggtgggctggttgtggatgcaaatggtgctctggtcagtgccgctacagacacccgatgggccgtttccggtcgcacagaatatgacgataaaggccaaccggtacgtacttatcaaccctattttctgaataactggcgctacgttagtgatgacagcgcacgagatgacctgtttgccgatacccacctttatgatccactgggacgggaatacaaggtcatcaccgctaagaaatatttgcgagaaaaacagtacactccgtggtttatcgtcagtgaggatgaaaacgataccgcatcaagaaccccatag

SEQ ID NO: 8364 - DNA, 1593 bp, Photorhabdus luminescens
atgtctaaatacaaattaaaccgatatttattagcgagttctatattatgttttttcacatcaggaaatgttattgccgccaaccctaaaatatctgcatattatctgagtgggcctgctgcacaggtggatactcaagaatattatgccagccttgataattttaaaaaattaagtagagatatctctaagaacaagagtaactttaatacgttggtattgtctttcgtccagcctggttttgttaattatgaaaaaaatagcctgaaatgttcaggattgtttggttatacctgtacttctggtcaaagtattagcatcaaagaagctgaaaatgctagagctgattttatggcattaaaaggtgtgattgctgatttaaaatctcatggtgtgagcacttatattgcagtaggtggatggaactttagttgtgatccaaaaatttatgatataactgccagcaaaaaagatgcttgtggtaatgaacccggtgcggtttatgacatcttccctaatcccctgactaaaattcctcgatttgacagtactattacgggtaaagcagcagataaggcatatagaaatattgtcaatttggctgctaacttgggagtcgagggaattgatgtggattatgaagaattctggcacgctgatattaatgcaaaaagctggaaattaacgcctgactcaatcaaggttccccttaataacagtgaaactcttattacatcaactttaatagcaaagggactcggcggttatgtttatgatgcgtcaatgaagattgttcctggcgcagaaaaaattccccgtgcaatgcctgcaaccgtggataaattcgccgctattttaaaatctttttacacttcaattaatgccgttaaaccatcacttaagctaagtattgcaggtcctgcaacgggaggtatcccgaatatgtccgctaattggggaaccaatgcgaggaatagtgatatttatggtggtgcttggtggggaggaaatctctatggtttaatttataataccgcgctgagttatcccagtctgatcaaccgactcagttatattggtgtgatgacctatgatttaagtgaaaaagattgtggatttattggaggaggtgaaacatatattccttgtgaccttcctggacaggttaagtattattatgggcaatatattaattggcttaaatcgggcaatgaagttgttacctttcatatcaaactgaaaggggcacgtaattacgctcaggcatcagttcaaccgcaaaaattattggttttgccgccgattaccgttggatttgaagttggtagacccgcaaccggtaatttaccgctgacgaagagcgctcttaacagcatattagatggtacgatcaaatatggtaaaacgggtctgataatgtgggatctatttaagaatgaacgttatgacggtagtaactggaaagatgagtgggcaacacctaatgatcttttgtctacagcttgcaaaaaaatagggctgacaggagagcattataattgtgatagttctgtcccgacacctgatcctgttccggcttttattaagaaataa

SEQ ID NO: 8365 - DNA, 192 bp, Photorhabdus luminescens
ttggtattcgaagattggggggcgggtgtgctaggtgcagccaataccgcgccagagaataacagtgataatacagttatggataagcctaaacgtgtcatgataattttcctgtgttttaactttgtttcacttgctggaatacattttgcgcgactcagtaagctacttgctattccagatttgttttaa

SEQ ID NO: 8366 - DNA, 669 bp, Photorhabdus luminescens
atggaaaactatgttcgccctgttttaacgttaccggataatgcggaacgattattattgcactcttgttgtgctccttgttctggtgaagtgatggaagcgctacgtgcttctggaattgattacaccgtctttttctataatccgaatattcatcccaaacgggaatatttaattcgcaaagaagagaacattcgttttgcggagcaacacaatgtgccatttgtcgatgcggattatgacagcgataactggtttgaacgtgctaaaggcatggaattggagccagaaagaggtgttcgctgcaccatgtgctttgatatgcgttttgagcgtactgctttgtatgcttatgaaaataatttcagcattatttcaagctcattgggcatttcccgctggaaaaacatgcagcagataaatgattgtggaaaacgagcggcaagtcagtatccggggattcaatactgggattacaactggcgtaaacaaggtggttcagctcggatgattgaaattagtaaacaggaaagattttatcagcaggaatattgtggttgtatctattcattgcgtgacacgaataaacaccgtaaatctcagggacgggatatcatcaggattggtgttaaatattatggtgatgaagatactgaaggggcttgttaa

SEQ ID NO: 8367 - DNA, 1206 bp, Photorhabdus luminescens
atggagaccaccatgcgccatacaatttctctgcgtgacctctcttttccggcaatcaccgccggatttgtcgctgttttagttggatataccagttcagcggcaattatctttcaggctgcggaagctgcgggcgccaccaccctacagatcggcggctggctgagtatgctagggcttgggatgggtatcagctccctggggctatcgctttattaccgcacccccgtccttaccgcatggtcaacaccgggcgcggcgctactggcgacaacgctaccaggaacatcaattaatgaagccattggtatctttatctttgcttcagcactgatcttgctgtgcggtattactggcctgtttgctcgattgatgaactatatcccacaggcactttccgccgctatgttagccggtattctattacgctttggtttagatgccttttcctcattttcagtcaacttcgtactgactgccggaatgtgtttaacttatcttctggcacgcagatatttatcccgctatgccatcatcttaacactattatcggggctgattatcgccgctttacagggaggtattcactttgaacaacaatccacagtcgcatttgttgcccctgaatttattgcgcccagtttcacactctcttcgttattgagtgtcggtattccatttttcatcgtcacgatggcatcccaaaacgcacccggcgtagccacactgaaagccgcagggtatccagtttctgtttcatcactgataagctggactgcgctcatttcactgatcttgtcaccttttggtggtttttccgtctgtattgccgccattacggcagcaatttgtatgagcccagaaatccacactgacccaaatcgccgctatatggccgctgccgtagcgggcgtgttttacctgatagcagggctgttcggtggttcaatcagtatgttattcagcgcgctaccggcagcacttattcatattattgccggattagcattgcttggaacaatttccggcagcctgctacaaacgctacagaatgaaaaacaacgggacgctgcggtaataacatttttaatcaccgcatctggcgtaacattacttggtgtaggcgctgcattctggggattaataggtggcgtaataaccatgctccttttatctttgcctgagaaaaacagaatagttcattag

SEQ ID NO: 8368 - DNA, 1122 bp, Photorhabdus luminescens
atgatacttattatcaataaaacttatgatagtttgccgggtctgttgcgctttaaatattacgataggacatatctaacaaccttaaatcttcttacccgcaaaaccgagctttctattatgaaattttttgatatgaaattttctgatattagcaagttagctgttatttcatcctgcctggcaatcccttatagctatgctgatgatcgcccaattctttctctctctgttagccagtccggcggaaaccaaacgactgctgatggtagtttatccagaaaaccaaataagcaagaatcacgaatactcccaatttggggtgacgaggccagagctaaaggttatgacctaccggaaccttttggtgccagttacggttatatgaatatgcggcagaatatcattgtagacgatattaaaatcattataccgaataccccaggttttgaagatgtgctggatatccagacaggtaaaaccagagaaaagaatgagtcgcatatgctcaaactagatgcctgggttctaccttttctgaatgtttatggcgtttatggttggacaaaaggatcatcgaaaaccaacattgagggaatcagatttagtggtttccctattcctgatatgaaagatattcctttcaaattggactttaaaggtaaaacctatggtggcggttttactctagcaggaggttacgatcagtttttcggtacacttgatactaactatacctacactaatctagatattctggatggtaaaattagcgctctggttgttacaccacgtgttggttatgagtttatattccagccaatcatcccaggccaaggaaataccaaattgcaggtatggaccggtggtatgtaccagaaaattactcagaaatttgagggaaatattagtaatctggatttaccccccatgtttgataaattagtaagtgcattcgacgattatgaaagtatgaaattcaaagtaaaacagcatgttgcatcccgctggaataataccgttggtgcaaggctggaagtcacccgcaatttcaatctgctgactgaagttggctttaacaaacgtaatagctgctatatttcgggagagtttcgcttttaa

SEQ ID NO: 8369 - DNA, 1146 bp, Photorhabdus luminescens
atgaatatccgctgtactttatatgggctggctttagtcagcctttttatttctgatttctcatatggcgaagcacgactcagcaggggaaaaatcgatggctggctagaaaaattaggtggcagtaatacctatgacagcagtaaagcgattgactggggcattttacccggccctttctacactccagagttaggtgctggtctcggtgttgctgtcattggtctctatcggccagataataatgatcataccagccaaatctcttctctttccctgaatggatttgcctcttcaacaggtgcctttggcttcacatttgataactacaatttctttgctgatgatcaatggcgtttttttctttccggtacattgaacaacgttcccacctactactggggtacaggatatcaagcaggtaagacagatgatcgcaaagaaaaatatcactcacaggaactgcacttgcaacccagagttctctatcgagttgctgattctacctatttaggcgctggctggaatttttcatcattacatgccaaagaccctgataacggtgctaaaaaactttttgcagcagaaaacgatggccggtccatattgagttcaggcgtcagtgcctatttcagctatgacactcgggattttctgcctaacgctcatcaaggacacgttcttgatattacctatacccatttttccccggcattaggcagtgaccgccggtttaataccgttgatatgcaatacagcacctattatcaattagatgaaaaatctgtactggcattcgatagttatggtcgtttcactgacggccaagtgccctggaatatgctgtcaatgctaggtaatagtcatcggatgcgcggatattatgaaggcagataccgggacaaaaatgttatcagcacccaattggaatatcggcacaaattggactggcgacatggctttgttctatgggctggggcgggcactctaagccattatgcaaaagatattggctcagaaaactggttacccaccgttggcgcaggctatcgttttgaattcaaacctaaaatgaatgtcaggctggattttggtatcggtaaaaaaagcaatggattttattttcaggtaggagaggcgttttga

SEQ ID NO: 8370 - DNA, 1122 bp, Photorhabdus luminescens
ttgaaattgcgtttatggattactgctttaacgttagtcgcaggatgccaaggaactttttcttcaatcgcaccagtacaacctgacttaaatagtgaaacaaccgccgaagccacccgtgcatggccggttcttgctccgattccctctcccgaaggattaagagcttgctgtgcttttggctacaatttaaaaactgaattactgaccattccagtacctttttaccacataagtaatgtgctggatgccgataatcttggggcacataattataacaacagtttttttggtaccgttgcttcattaacagggctcagtaatgaaaaagtggggatgatatatacccgccgaggcggattcattgatatttcccatgtacgggataccgctgataatgcggtttttctgttcagtcaaatctggcctcgtcttggagaagagtggcaaatagaactcagcagcgaattagcattacgccgtatccaattctatcaattcacaccaccagcatcgatagaacaacgttataccttaactgcttatctagccgcaaaattggcttttgaacttgctgcatggcatgaaatcgcccaatggtacggttatcagtctgtaccgggattttctgaaaaagtatctgcgttctctcctgaagatctctactccaatctattaggcgctcgtctttccctctctttgatactggctgggcaagtaccgtcaatgaaacagtaccgtctatcaatgcaagctattctgcctcctgcactacgtgaactagaagccttatcccctgatgaaacacggaaaatgtttgaacaggttgatggtatctggtgggacagcaaacgtcgcgtgcctgataaacgtttaatccttcaacgtgatttccatactcacagcgatcgtacccctaatatggtgcctacagaacagcaagttccactcagacttaccctgccacaacaatatactggctacagattatctgaattggccgaattacaattgtggcctagccgccaaatgaaagatcttcctgtaccagaaagttattggattgctcttgattttccacaattggcagaaaaagcaaaagaacaacaagagaatcattga

SEQ ID NO: 8371 - DNA, 582 bp, Photorhabdus luminescens
atgaataaactagcgttatcaaccaccgctgcgcttatttttgctacgggttctgctgttgcagccaatgatgctgccggcggtacattacatttctctggtgcagtcactgatgccacttgtactattaatggtggtgcttcagctaatctgtcgattatattggaaccgatctcagtcactcaagccggacaaaaagaaggcttaattgattttggtaagaaagcattttcactagaattttctaactgccagtccaaagccgttggttttgatccagcaacctctatgttgaaaatccagttctcatcatcacatactatttctaacgatgctaagtacctggttaaccaagaacttaatgcaaatggtaagccgaaaaacgtaggtatcgcgattgttaaacacgccgaagaaaataaccctattatgctgaataaagcgtttgatacaggaatcaaaggctctgagacaatacctgaagttgtcgatttctatgcgaaatattacaaagtaggcgctggtgatgcagatcacggtaaaatagtaacaatggttacttatcacgttacttatttataa

SEQ ID NO: 8372 - DNA, 699 bp, Photorhabdus luminescens
atgaagaaattatttttaactatattattagggataacgactttatctgctcatgctaacatcgttattaacacaacacgtgttatttacccagccagtaataaagaggtatcagttcaattattaaatgcaggggatcaaccctctctggtacaatcctggatagatgatggcgatcctaattcaacacctgaaacagctaaagtcccctttttactcacccctccagtcgtcaaaattgatggcaataacgggcaacaattaagaattaaatacatcagtaacaatctacccacggatcgtgaatcgctgttttatttaaatgttctggatattcctcccgttgcagaaaatattagtgataaaaacgttatgcaaatcgcaattcgtacccggatcaaatttttctaccggcctgataagctttctatcttacctaaacagatccaacaacatattgtattaaaacgtgagggtagccaactaaaattggaaaatgcatcaccctatttcatgagtattgtcggccttaaatcttctgacactcaacctaacttactcaatgaaggaacaattataaaaccgttctcttctcattcattcagtaccaatgaaaaagtaaaagttggagacaaattaactctggctattgttgatgattttggtgctataaataaattaactttaccacttcaatag

SEQ ID NO: 8373 - DNA, 2475 bp, Photorhabdus luminescens
atgataagacaaaaaattagtccgttagctctgataataagtacccttctgtatacagattgtttatgctatgccacaacatttaatactgactttctggttggtgaatcggcaaaagcggatttatcccgattttattccacttcagagctacccgctggtcgttatggtattgacatatatctgaataatgactggaaaggaagatttgatattaatatccagaacgatggcaaagatatttacttacttaatgaagatcttcccaggttaggtataaaaattgataaaaaccaattaccagaatcgaatttatccaaagatgaaattcttcttactaaaataatacatgaaggaaccgctaatctcgatgttcctaaactcagcctgcatctggtcgtcccgcaggcatatatcaaaaacgagctaaaaggctatatcgatcctgcgttctgggacagaggtatccccggcgctatgctgtcctacaatgccaactattaccatactcagaataggaataaacaaaaccgcgaccgtgaagatgaagataatgcttacgtgtcacttaatagcggtttgaatctatttggctggcaattacgtgatcaatcctcttatcactatacgcgttcaaatggtgataaatggagtaacaatacccgttatctgcaacgaggaatttcatcaattaattcagaatttcgcattggtgacagctatacatcaagcgatttattcgactctttccgcttccgaggtatcaatttgaaaaccgatatgcgcatgtaccccgatgcctggcaagggttttcccctatcgttcggggagttgcgcagactaatgctctggtaaaaatcacccaaaataatgttgttatttatcaaggtaatgtaccacccgggccgtttgctattgatactattttacccacaggttcaggtagtgatttgctagttgcagtgacggaagcagacgggcgtactaacagttttaccgttcccttttcatccgttcctaatatgatgaaagaaggtcttggcaaatatgatatcagtgcaggtaaaacacatattgccaacagtcgttataaaccaaacttttttcaagccagctatcaatatggttttaataatgtcctgaccggttatacaggtaccattatcagtaaagattattactcactactgctaggtagtggctttaatctacccattggcgctgtctcaattgacgtttcacagtccagcgccaaatttgataatagcccaaccatgaaagggcaaagctacaaattggcttatagccgttatatcccacaaacaaaaacaaatttctcgctggcggcttatcgttattcaactaaaaattatctcaccctaatcgatgcgattgatctgcatgactggataagcaatggatataaccaacaatattattctcatcaaaaaaatacctttaatatcaatttgaaccagaatcttggtagtcgtgcaggttcactttttctttcgggaacatttcgtaattactggggaacccagaataaaagtagagaatatcaaatggggtattccaatagtctggggaaaatcaattattccctgacagcaagccgtgtccgatacaatatcaatgaaacagaaagtaaagaggaacagcgctattatctgatgctgtctgttccttttgagttgtttggctaccctgcctatttgaccaataatgtctcaatcaatgaaagtcactatgacaacagtaacttaggattaagcggcagcgcaggcccaaacaaccgtttgaattaccacttcaacatttcagatcagaaaagtggttcgacaacaaccagtgcaaatttgacctacaaaacatccgtttccacactgagtagttcttatagccaatccaaggagtaccgccaaatgggacttggcgcaaccggcagtttagttgcttatcgaggcggaattctggcggctaatcaaattggggaaactttcgccatcattgacgcaccgggcacagcaaacgcttctgtgaatggtgataaaagcatggtgacaaacaccagcggtaagttgctgataccttatctttctccttatcgtaaaaatgccatcatgctagataccagtgaagtgccagaaggggccgctgaacttatcggtaacatcagagatgtcgcgccatattccggcgcgattacccatatcggatttaaaacagaccagcggaagacttttatcttctactccgctcaggctgatggtaaacctttacctttcggtactgaaattgtcgattcagaaggtaacagcttaggatacgttggtcagggtagtatggttttcctacgagtagaaaaattaccaccgcaaatttatgtccacatcggtcaactaggtgaaaagagctgcataataaatgatccacagcctgaaatgagctcaaacgccaatatttgccgttaa

SEQ ID NO: 8374 - DNA, 1092 bp, Photorhabdus luminescens
atgaaacttaaaccatcatatcttaagccattgtatctggcggccataatcagtttgagcagtggcatagcctatgccgattgccaacccaaatatgcaataccggcaccggcaatcctggttgatatgacagatcatctcactctgaacagtaatgcaacctggatactcaacacccaatattctggctattttacatgcacaagaaattcactatggaaacaaaactcggttgctaacggttcgccttttaccaaaaacaaagttgttttaggattcaatggtggcaaaaattatgccgaagtgactatcacgaatctttctcctggcaacagtattaatctgggaaacagtaacgacacataccctgccagcaaattgcaagcccaatttacacttaatgtaaagctactgagtggcagacccggtggtagtaatattcacgtcttttccggcaattctgcaacattaaaaacggctgtaattgcgatggataccaccaacttaggactccttgatgccattctccgtttcgctaccgatttcctgacttttattcttacttgggagtggccgacacattctgaagatatctattatcaacccgtcacgatgatttttaatcacagagatacaacttgtcacttcttaaatgcggggttaacagtgaatctaccaaaagtcaaccgcattagattgcttaacggggcagataaaggagaaacgccttttaccctcaactttgaatgcaaatatctccaaaacggtaaaacttcacgctcagttaaagcttacctgagcagtaataatctgctaccaaatgacaatcgaactttaattgatagcaaagcaggtgccgctaaaggtgttggtatccgtgtttctcagacaagtgattcaacgccgataactttcagtgcttcgcaatcctcatcccaaggtgcaacactactattcagtaaaaactccggtaatgtcatcgataaacactttaccatcgaccttaatgcttactaccacgtttatgatccccaaaacatcatagcaggggaactgaaagcaacttctgtactgaactttgaatacaattaa

SEQ ID NO: 8375 - DNA, 792 bp, Photorhabdus luminescens
atgccctctcaaacaacgatgaggacaactgccatcttcgctttctttatctcactattgttttccgcttttagtcatgcttcaactagcacagctaaaagcatagagtattctcacaatgacatgcaaagcaatttgccagatttgcgaaaatacccttcgggcaccctacgtaagaaagcgtttttaaatgttgttgtccccgtgattgatcaacacaatcaacaaattatgcaggaacggaaatggctactggaacaccaaaatgacaagctttggtctatacagggtatcaaacgcctgcaacaaatttgtaaaaactacaacgtgagctgtagcagctcgcctaaaaaaattaactggaacaagctactaagtcgtgttgacatcatcccaacccattttgttgccactcaggccgcaacagaatctggttggggaacatctaagcttgcacaacagaataacaacttatttggtatgcgttgcggtaacaactgtaagaaaacccaaggtaaaataaaaggttattccgcctatccgactatcaatgattcggtcaaagcctatatgagaaatatgaacacccataacgcttatgaatcattgcgtgcttcacgcgccaagcagagaagccttcaggaatcactcaataccagcaaattgattgataatcttgaaggatattcacaattgggttcgacttacaacaactacctgcacaaagtatttaacagcaataaagggcttattactcaggcgcagaagttagctaaaaacgatcacgactaa

SEQ ID NO: 8376 - DNA, 1422 bp, Photorhabdus luminescens
atgaatttcttttcttttgagtttcttggttcctttgttgctttctttctcttgtattggatgctacaaaaacatgcgaaaacacaaaactacctgctgataatcgcaagttatctgtttgtcttttcctttaatccgcttttcaccagcatcctatttggctatacgctatttatttatcttttaacaaacgtagccagcaaatttctatccaaccgcatcacgtttactatcctgacaataggtattttggggtgttttactctattcaaatattattctttctttcaagaaagtctccaacaagcgtttgccaaatttggtttgtccatagatttacccgtactaacactactcgtccctctgggtttatctttttatgcatttcattccgtcagctatgtcgttgctgtcgccagaaaagaaatacccaaagcatcatttcctgatgtcgctttatatctatgcttttttccgagtattgttgccggaccaataaaccgagctaaagattttctgcctcaaatccagatatcatcaagagtgatcattgaaccatcaagagccatattattgattacattggcgataaccaaactatttttgttcagctcttatttatccgaaaattatgttaatccggtttttgatgatcctgtcagctacaatgcagggcaaatcttggttagtatttatgcctatgcttggcatatctattttaatttttctggttataccaatcttgttactggattagcactactccttggattcagagtacctgaaaacttcaatgccccttatctggctgaaaacttacaagccttctggcaccgttggcatatcagtttatctgaatttatccgtgattatgtctatattcctcttggtggtaataagaaaggatttttacgtaaaaatcttaatttgtttgtcgctatggtaatctctgggttatggcatggagccggaattaatttcattatctggggagctattcatggattgggattaatcatcctcaatgttaaataccagttatttcctccaatagacaaaaaaaatcaaaacattccccaaaacccagtcatctcatttctatccagaatcattactttccactttatctgtctggcatgggttttcttccgttgtcctactctagatgatgcactaatattattaaatcaattgatatcatcaaatttatttcactcgataatagccaatagtgggttgttactgatgttctggggactctttattatttatccgtggctgattaatctaaaaataatggttgagaaaatgtattctcagatttcatggatatgctacccaataccattagcaattattctgactttggtatttatgatttcaccacaaggaataccaggattcatttatgccaatttctga

SEQ ID NO: 8377 - DNA, 1137 bp, Photorhabdus luminescens
atgccaatttctgaattcaaatctaatttaaaaacggctgggcaagtcatttttatcgtaatattaactagcctactgttaatttggctaaatcatcgttcactggatagattctggcaacaggaatatcaccggcaaagtctttgggcgactttgcaaggtcatccgctctgggatttcggtgataacctggaacaaggtgtactcgctgcgggggaagctttcctgtcacatactaccagcaataacagtaacaaccatcaggaaactctccagaaaactgatatcacactgcctgcggattttcagattggactcaagcttctgagtggttatccctctcctgttacaaatctgcctgcaactttccctgagttattacaaaaatcgccccatactcatcctgttaattcaccaataccccatgatttaaggaataatgtttcccccagtacggttatcgctaaaactaacgtgacactgacagccaaagataaggtgctgtttgctggagattcaatgatgcagggtatcgccccccatctgaaacgtcggctctaccaggattacagtatttcaagtattaatctcagcaaacaaagtactggacttgcttatcccagtttttttaattggccggaaactatcaataaaacactggaagccaaccatgatatcaagctggttgttatttttttggggccaaatgatccctgggatatgccaccaaaacatggaaacatctacctgaaatttgccagtcctgattgggaaaacctctatcgccaacgtatcgaaatggtccttaccgaagcacgtaaccacggtgctgatattatctgggttgctcctcccaatatgcgacagaaaaaactttctgccaacatgaaatatctgagatccttgtatcaatcagaagtcacgaaagccggagaaatctatgtttctgttaatgatattttcaaatatcatgcaaatgattattccgattatgtcggcgacaatagtaacaaaattaaactcagaagcggtgatggtatacactttagcctgaaaggccagcaaactatctcagataacatattttcattgattaaatttattcaggaacccgctaaacaaaatgaaaatagttaa

SEQ ID NO: 8378 - DNA, 1221 bp, Photorhabdus luminescens
atgaaaatagttaaacaacttcgtcggcgataccaagctgctagcattagtctggtcatcacactctctttaagtttgatatcgtgccataaacaaaagccagggccgttgccaacacaacagtctgcaaaagagggccaacagctaatagactttggtgaaccgaatttagctttactggcggataaacttcacaacagccgccataatcaactgcattttgttcagataggagattcccatactgccgctgacttttttaccggcaagctccgctctttattgcaacaacgttttggcaatgcagggattggttttgttagcccaattaatgtacctggtcaacgtaacgctatggtcagtatgaccgataataagcagcaatggaaactcaccaccagccgcaaagataatcggcctgattttcctatcggcggtacaattgcagagcccaatagccaaataagtcaattaattctaagactgtttgcaccatcccatgatcgctatcaactcaaaacgttataccaagcatcggatgatgctcagattctggtacaatctgcaaccaaacgaatactgaaattaccggcaacccacgatcactggcaattttctactgaagaatcagtgacattcccagttaatattatggcgatacaaaataatcagttaaaattaggcggctggtttattaatcgtaaacaaccaggtgttatgttatccgccttgggtatcaatggtgcgactattaatatgatggataagtggcagcccgaatggattgatacattagttcaaatgcatcctgatatgatgatcctcgcttatggcacaaatgaggcatttaatcattcgctggacttaccaagctatcgccagcaactggaaactaagataaagcagattcgtaatcagttaccacaaacagttatccttatcattgggccgggtgattctttgaaaaacaaccaatttacaagttgtatagcacaacaatcaacaatgttggataatatcatccatattcaacaaaaagtcgctcaagatcagcacacactattctggaactggcgtgcatatatgggtggaaaatgctcaattaggcgctgggcgcaacaagatcttgctcgtcctgattatgttcacctttcagccgcaggttatgagcgcagtgctgaagctttatatcaacagttaatagatgctctcggtcaataa

SEQ ID NO: 8379 - DNA, 921 bp, Photorhabdus luminescens
atgatttttccaaaaaagtatcctctcagcacgataaaaaggctcatctccggctggaaagaatgtagtttcgaacgttaccaacaagcgtattctctctatggtggtggaatatctactcatccagatattgtacgttttttaaatgaaaaatttggcaatagttttatcttttacgtcaaagaaaatccacaaatagaaaacgttatcgaaggggcatactttacatgtaaagatcatcatctggcagcaagtcaccaaaaggactactattttttcagttacgatgaaattctcttccctattgccaaacatctaaaaactattatccctaggaagtcaaaaaccatatcacctctgcacaaagaaaacttcgtcaacatctattatggccgattaaacaagcgaacaatatgccttgctaaagaagatttttcttataaaacaagaagaaatcggagtaatgaaattaataaatttaagcgtgcaggcggagaaatacatcaaattgatgacttcacctgccaagaatttgttgatatttataccacactgtacgaaaaacggtggggaaaaaaacacagtgaagaagaaaaaggaaaattaaccgaactatacactgaactcaaacagcatctgtacggatgtgtattaactatcaatggaaccccagccgcctacgatttagttataaaatcagacagccctcaatgggtttcattcgatgcagtaaacggtggatacgatcctgaatacgctaatctcagccttggaagcattgtcatgtggttaaatattcaaaatgcttcaacgctctgtcagcagaatcaaaaaacgatgcgctattctattggtaaacctactttcgcctataaagatcgctggtgccatcgtcaccagttagcaagaacactattttaa

SEQ ID NO: 8380 - DNA, 1338 bp, Photorhabdus luminescens
atgagtactttaaccttagtgctgacagcggtgggttctgtgcttttactattgtttttggtgatgaaggccagaatacatgcttttgttgcgctaatactggtttctatgggagcgggtgttttttctggtatgccactggataaaattgctgaaacaatgcaagaaggaatgggaggaacgttaggttttctggctattgttgtcgcactgggcgcgatgtttggtaaagttctgcatgaaacaggcgcactggatcagattgcggttaagttactaaatagtttcggtgaaaagaatgctcattattcattggggatcgctggcttggtttgtgctttgcctttgttctttgatgtagctattgttttattgattggcgtggcgttcgcagtcgcgcgtcgtactggcggtaatgtagtgaagttggttattcctctgtttgctggtgtcgcagccgcagcggcatttttgttacctggtccagcgccgatgttgttggcttcacagatgaatgctgattttggctggatgatcttgatcggtatcagtgcagcgattcctgggatgttactggcggggccaatcttcggtaattttatcagtaagtatgtcactctggatttgcccgtggatataagtgagccaagccttggtcaaggtaagatgccatcttttggtttgagtttgtcactggttctgttccctttggctttggttgggttaaaggctattggtgagaattttgttgaacagagttctgagttgtatcagtggcttgaatttatcggtcatccattttctgcgattttggttgcttgtttgattgctatttatggtttggcaattcgtcgtgggatgagtaaagagaaagtgatggatatttgctcttcggctattcaaccggcgggaattattttattggtgactggggctggtggtgtattcaaacaagtattagtggattctggtgttggccctgctttgggaaacgcattgattggggcgggtctgcctattgcattagcgtgtttcatccttgctggtacagtacgcgttattcaaggttctgcaactgttgcctgtttgacaactgttggtctgattttgcccgttgttgatcttctgggatattctggtgcccagcttgccgctctttcaatttgtattgcgggtggttctttggtattgagccatgttaatgactcaggcttttggttatttggtaaatttactggtgcaacagaatctcaaacactgaaaacttggtcaattatggaaactattcttgggacaataggtgccattgttggaatggttttctttgccatgttgtaa

SEQ ID NO: 8381 - DNA, 540 bp, Photorhabdus luminescens
atgagcgatacccagcattcgaatcatgtttttgtgcttatgggggtatccggtagtggtaaatctgctgttgccagtgctgtggcctataaattggattctgcttttttagatggtgattttttacatccaagatctaacattaataagatggcagaaggctacgcgctgaatgatgaagatcgtgaaccttggttgaaatcactgaatcatgcaatttttgctatgcaacgcacaaacccgatttccctgattgtttgctctgctttaaaaaaacattatcgggatatactgcgtgataataataagaatctttcatttctttatatgaaaggcgactttgatttaattaaaagtcgattgaaggcacgtaaagatcatttttttaaatctcaaatgttggtatctcagtttgaggtattagaagagccggggagtgatgaacaggatgtttatctggttgacattagatcatctcttgatgaagtgataaatcactcgataagaataattaatagtgtcatttcaggggaaaaataa

SEQ ID NO: 8382 - DNA, 996 bp, Photorhabdus luminescens
atgaagaaaaaacgtcctattttacaagatgttgctgatcgtgttggtataactaaaatgacggtaagtcgtttcttgcgtaatcctgatcaagtttctgagcaattgcgaaagaaaatagcggatgctttagatgaactaggttatatcccaaataaagtgccggatattctttctaattccactagtcatgctattggtattttattgccttctttgactaaccaagtttttgcggaggttattcgtggtatcgaatatgtgacggatagttatggttatcaaactatgttggctcactatggttatcgctcagaaaaagaagaagagcgtttgatttctttactttcctataatattgatggtttgattctttcagaacgtactcacactccacgaactttgaagatgttgggaacggctggtatccctgtcgttgaactgatggattgtgtttctccttgttttgatatggcagttggtattgacaattttgaagcagctcggcagatggtaatcgcaatgattgagcgtggttgccagagggtgatttatcttggtgcgagacaagatgaaaggacaattattcgtctggagggctatgaagctgcaatgaaaagcgccgggttaaagccaggcaagataatgacaccagacagctcttcttacacattaggggggcagttactgaatgaagcacgaacaaaatatcctgatgttgatggtctattctgcactaacgatgacctcgcaatcggagcaattttcgagtgccaacgtcaagggatagctgtaccacatgatattgcgatagctggctttcatggccatgatgttggtcaggtgatgacaccaaaacttgccagtgtattgacgtctcgtgacttattggggcggagggctgccgaattattaatggctcggctgaagggcgaacatttaccgcaaaaaataattgatatcggttttcagttatctctgggagagagtatctaa

SEQ ID NO: 8383 - DNA, 444 bp, Photorhabdus luminescens
ctgttcgcccgcagagtcaagcgcttattgcgccggttctctgcccgacctcacaatgtttatcagcgttgtgtcggtcagtggtggcgcattatagggaattctttgacgctggcaataattattttgaaaaaaattgatcgtttgattaattccacagcaaagctctactttatacctacttaccaacagatttatccacatatggctagttggatgaaaatttatcgagcatcacgcaaacgttttcgttacaattcggtggttaaaatcatcaagcgattttatctgactatactgaaatgttattgcagtgcccattttttatgtcctggtatataccctatggatttcaagatgcatcgcgacggcaaggaagcgaatccccgggagcatagcgaacgatgtgaccggggtgagcgagtgcagccaacaaagaggtaa

SEQ ID NO: 8384 - DNA, 1590 bp, Photorhabdus luminescens
atgcaacagcttcgtccaatccatcgtgccctgcttagcgtttccgataaatcaggggttgttgaatttgcaaaagccttatctcaacgcggtgtcgaattgctttctactggtggcacagcgcgtttactcgctgagtcagatctaaaggttactgaagtttcagactacaccggttttcctgaaatgatggatggccgtgttaagacgctgcatcctaaagtacatggcggaatccttggccgccgcggacaagatgatgaaatcatggcacaacaccaaatctcaccgatcgatatggtggttgtgaatctatatccattcgctcagaccgtagctaaaccagattgtactttggcagatgccgttgaaaacattgatatcggtggtccaactatggttcgctctgcggctaagaaccataaagatgtagcgattgtggtaaatagtaaggattacaaaaaaatcattgaagagatggataacaatcaggggtcattaacacaatcaacccgcttcgatttagccattaaggcttttgaacacaccgcggcttatgacagcatgattgctaactattttggcaagctggttcctccttatcatggtgatacgactcaaccatcaggacgtttccctcgtactctgaatttgaatttcattaaaaagcaggatatgcgttacggtgagaacagccaccaagatgctgcattctatatagaagagaatctttctgaatcatccattgcaactgcaactcagttacaaggtaaggctctttcctataataacattgctgataccgatgcagcgctggaatgtgttaaggaattcgtggagcctgcatgcgttattgttaagcacgctaacccatgcggtgtagccattggtaaagatatccacgaagcttatgatagcgcattcaaaacagatccaacctccgctttcggcggtattattgctttcaaccgcgaacttgatattaaaactgcacaagccattatcgaccgtcaattcgtcgaggtaattattgccccctcagtaaataaagatgtcttacctgtgctggcaaccaagcaaaatatccgcgttctggtatgtggtgaatgggaggaccgggctgctggccttgattttaaacgagttaatggtggcttactggtacaagatcgcgatcttggtatggttgcagtaactaacctacgtgtggtttccaaacgtcatcccaccgaacaagaaatgaaagatgctctgttctgctggaaggtcgctaagtttgtcaaatctaatgccattgtttatgcaaaaaatgatatgaccattggtattggtgctggccaaatgagccgtgtctattccgcaaaaattgcggggattaaagcagccgatgaaggcttggaagtccaaggatgcgcaatggcgtctgacgcctttttcccatttcgtgacggcattgatgccgctgcggctgtcggcgtaagttgcattatccaacccggcggttcaatccgtgacgacgaagtaattaccgcggctgatgaacacggtattgctatgattttcaccggcatgcgccattttcgccactaa

SEQ ID NO: 8385 - DNA, 1284 bp, Photorhabdus luminescens
atgaatattttaattgttggtagcggtggacgcgaacatgcgctggcatggaaagcagctcaatctcctttagctgataaaatctatgtcgctccaggaaatgcaggaactgctctggaaagcaatcttgaaaatattgatatctcagcgacagatatcaacggcttgttagtatttgcacaaagccatgatattgggctgactatcgtcggccctgaagtaccattagtgttaggtatcgtcgatgcattccaaacagcagggttgactatttttggtccaactcaggcagccgctcaattagaaggttcaaaagcatttaccaaagattttctagcacgtcatcaaatcccaactgcggcttatcagaattttacagctatcgaacccgctcttgcctacctagataaagtcggcgttcctattgttataaaagctgacggattggctgcgggtaaaggtgtgattgttgcgataacacgggaagaagcccagtccgccataaaagatatgctagccggaaatgcgtttggtgatgcaggccatcgtattgttattgaagagtttctaacaggtgaagaagctagttttatcgttatggtcgacggtaagaatgttattccgatggcaaccagtcaggatcataaacgcataggtgatggtgactccggcccaaacactggcggaatgggagcctattctcccgcaccagtcgtcaccaatgaaatccaccaacgcattatggaagagattatttatcctactgttaatggtatggctgctgagggtcatgtctatacgggttttctttatgccggcttgatgatcagccaaaatggcgaacccaaagtgattgaatttaactgtcgctttggtgatccagaaacacaacccatcatgatgcgtatgcgctccgatcttgttgaactctgtctagctggtgcaaaaggcgagcttgcgggtaaaacgtctgattgggatgagcgccctgctctgggtgtggtactcgctgccggagggtatcctgctgattatcacaaaggggatatcattcatggcttgccccaacaagaaaatgaaagtagcaaggttttccatgctggtacagcaatgaaagacaatgatgttattaccgccggtggacgcgttctgtgtgttacagcattaggagaaaccattatagatgcacagaaaaatgcttaccaacaagcagaagagattgaatggaataactgtttttaccgcaaggatatcggatatcgggcaattaaccgattgaaataa

SEQ ID NO: 8386 - DNA, 705 bp, Photorhabdus luminescens
ttgcaaaaaagaaaaaatagaaggggtattatttatccccttttgttggttcgtcaggggctgatgacactaggattcgtcttcgcgctcagcgcctgtaccaatcaacctaaagaaccttctttcagcgcaagtggattcattgccgatgatggtgttgtccgcttgtggcgtctcaacgatcagaacagtaaacctcgggtgctgatgagtgtttacagcccctaccgtaatgacaataccgtcgtgactttttatgaatataagcagggagatttgcgccaaattcgccgtgaaattttgaatgataaaaatccactatctgaacaacttcgtttgaataaatccggtgatgtgatttttatgcaaaagcagtcgaaaacgcgacgagagcgactttccagcgatgatattgttcgtatgcagtttgatgctaaacggacgcttgaattaagtgatgcgttgatagtgggaaatgtgcgtttggtgcaagggcactggaataacggtaaagtcactacctgtgcaggtgaaacgatttcccttgagtttgaaccttacgcgaggtcatggcttgaacagcgcgaaaaaagtagctacagccagttaactattgcttggttggaagcgcctgctggccgcgaattattgttggtagctaataatgacttttgtcgttgggaaccgacgaaggacagtctctga

SEQ ID NO: 8387 - DNA, 273 bp, Photorhabdus luminescens
atgaataagactgaattagttgatgcaatcgcagaaagcacagaactgactaaagctcaggcaaaagctgctctggaatcaactttgaatgcaatcaccgaatccctaaaagcgggcgattcagtacaactggtaggttttggtacttttaaagttaaccaccgtgcagaacgtactggtcgtaacccgcaaaccggtaaagaaattaccatcgcggctgcaaacgtacctgctttctctgctggtaaggctctgaaagacgcagttaaataa

SEQ ID NO: 8388 - DNA, 591 bp, Photorhabdus luminescens
atgttacggaacccgatacatttacggctggaaaaacttgaaagctggcagcatctgacctttatggcaagtttatgcgaacggatgtatccaaattaccagatgttctgttgccagacggcatttgcagaacctgctctttaccgccgtattctggatttggtgtgggaaatattagttgtaaaagatgccaaggtgaattttgataatcagctggaaaagttggaacaaattattccctcagcggatgattacgatatttacggtgtgtacccggcgattgatgcatgtattgcattaggggaaattattcactcccgtctgagtggtgaaacattggagcatgcaattgcagtgagtgaaatttcaatccgcactgttgctatgcttgaaatgactcaggccggaaaagaaatgactgatgaagaactgaaaatattaccggctattgaacaagagtgggacatccaatgggaaatttatcgcttattggttagctgcgaagagcgggatattgagttgattaaaggattgaaagctgacctccgggagtcaggaacgagcaacattggtataaatttaacgcagtaa

SEQ ID NO: 8389 - DNA, 669 bp, Photorhabdus luminescens
atgattaatacgaaagcattacgtcaggaacaaatagcaaaggctcaacaggttatctgttatgatgatttttccccacctaaattgattgcgggtgctgatgtgggtttcgaacgacagggagcaattacccgtgcagcgatagcggttctctcttatcctgctcttgaactggtggaatatcagatagcgcgaattgaaactacgttgccttatattcccggtttactctctttccgtgaatatcctgcattaatggctgcttggcagttgttgaaatacaaacctgatctagtcatggtggacggtcatggcattgctcatccacgtcgtttaggtgtagctagccattttggtttattagctaatgtgcccacaattggtgtggcaaaacgtcgtttatgtggtgaaagtgaactattgggagaacagcccggcagttgccaacctttgcttgataaagaggaacagattggttgggtatggcgaagtaaaaaacgttgtaatccgttgtatatttctacaggacacagaatcagtcttgatagcgcattgctatgggtggaacgttgtatgaaaggttatcgcttgcctgaaacaacccgttgggcagatggtatagcctcaaatagaccattttttgaacaaatgatacagaaaaatccttaa

SEQ ID NO: 8390 - DNA, 1065 bp, Photorhabdus luminescens
atgaatgcgctgaaaaacgatcgttatttgcgagctttattacgccaatctgttgatgttacccctgtttggatgatgcgccaggctggccgctatttacctgagtatcaggctactcgtgctaaagccggtgattttattgctttgtgtaaaaacactgagctcgcttgtgaagtcactttacaacctttgcagcgttatccgctggatgcggcaattctcttctctgatattctcactattcctgatgctatggggttgggactctattttgaagccggtgaaggtccgcgttttaaatctccggttttcagccgtgctgatgtggaaaaactgccagtgcctgatccggaaatggagttgagctatgtgacggatgccgtgcgtgcgattcgtaaggcactcgcgggccaggttcctttgatcggcttttctggtagcccgtggacactggcaacttacatggtggaaggtggtagcagcaaggcattcactaaaattaaaaaaatgatgtatgccgaacctaccgtgatgcatctgttgctggataagctagcagacagcgttattctttatctcaatgctcagattaaagcaggtgctcagtctgtgatggttttcgatacttggggtggagtactgacggggcgggattatcgggaattttccttacattatatgcacaaaattgttgatggtctgatccgtgaaaatgaaggtcgtcgtgtgccagtgacactgtttgctaaaggtggtggacaatggctggaagcaatggctgaaaccggttgtgatgcgcttggtttggactggacgacagatattgccgatgcacgccgtcgtgtggggaataaagtcgctttgcagggtaatatggacccatctatgttatacgcctctccagagcggattgagcaggaagtttcgacaattttgcaaggttttgggacgggttctggtcatgtctttaaccttggtcatggtatccatcaggatatactgccggaacacgcgggggtatttgtcgaagcggtacataaactttcagctaaatatcatcagtaa

SEQ ID NO: 8391 - DNA, 774 bp, Photorhabdus luminescens
atgatgatgcaacaacaaattacaggtacagaacatggctggtggattatcagcaatgaaaatcgtatttggctcccgaaaggtgagttaccttttggaatggcaactcaatggtcactgcaaggaaaaatagccttgcctattggtgagtggcaaggcgaaaaagtttggcttatccgtcagaaaatggtttcaaatatggtttctttacggcaaattgttgcaagtgatcgtggcttgtttcaattagctggccgaggagtgcaattggcagagttttatcgctctcatcaatattgtggttattgtggtaatgaaatgcaccatagtgtcagtgaatgggcttgtctgtgtcatcactgccatgaacgttattatccgcagattgcaccttgtattattgtcggtattcgtcgggatgatcatattttgctggctcaacatcagcaccatcgtggaggggtgtacacagtattggcgggatttgttgaagtcggtgaaacactcgaagaagctgttgtccgcgaagtgatggaagagagtaatattaaaattcgcaatttacgttatgtggcttctcaaccgtggcctttccctcattcattaatgatggcatttctggctgattatgacagtggtgagatccgccatgatccgcaagagctgattagtgcggattggtatcactatgatcaattaccattgattccaccacataatactattgcccgtcggttgattgaagatacgattgttctatgccgaaatacgtga

SEQ ID NO: 8392 - DNA, 663 bp, Photorhabdus luminescens
atgtctcaattgcttgccgtgtttgatctggatgacaccttaatttccggtgattccagcgctatatggaccacgtttttatgggaaaaaggtgtcattactgatccaacttttatcgaagcagataaaaaaatgatggctgattacagcgcgggttcactggatatgaatgattatctggcatttagcctgcaaaccttgcaccaagttccacaagaacaagttgatctttggctgactgaatttgttaacgaaaaaataagacctcgattttatccgcaagctaaagctcttattgcagagtatcaacagcaacaaatcccaattatgatcatctcagccacagtctcttttattgtaaaaaagattgctaccgaattgaatattcacacggcactgggcattgatatggtaatagaaaatggctgttataccggtaaaatagatggaattgcgacttttcgtgaaggtaaagtaaaacggataaaacagtggctggaacagaaaaatagttatcccaaaattattcgcttttacagtgattcaattaatgatctcccaatgtgtcaatttgccgatgaggtaattacggtcaatgctgatgcccatttaaaaaccgaagcacaacaacatggctggcaacaattaacctggtcactgtaa

SEQ ID NO: 8393 - DNA, 1938 bp, Photorhabdus luminescens
atgtctcataatactgttatccctacaaccgatatttcaccaaaacccgatccggcacgcccacgtaaagctcaacgcgatgccgcccaagaatttattaattctattcaaggcgtgaccttcccaaattcacgacgaatttatcttcaaggttcccgtgacgatatccaagttccaatgcgtgaaattcaattatctcccacgttaattggtggcaccaaagaagaacctcagtatgaagaaaacgaagccattccggtttatgatacttccggcgcttatggcgatcctgatgccaagctggatgtacatgttgggttaactcaactacgtcaaccctggatcgacgaacgccaagatactgaacctgttgccgccctcagctccgattttactcagcaacgcctgacggatgccggtctcgatcatttacgtttcaatcatcgcccccatccattaaaagcccgtaaagacaaacgcgttactcaactgcactatgctcgtcaaggcatcatcacgccggaaatggaatttatcgcactacgggaaaatatgggacgtgaacgtatccgcggtgatgtgttacgccaacaacatcccggacaaagttttggcgctcagttgccggaaaatatcacaccagaatttgtccgtcaggaagtcgcggctggtcgggcaattatccctgccaatatcaatcatcctgaatcagaaccgatgattattggtcgcaattttctggtgaaggttaacgccaatatcggtaattcttcagtcacctcttcgattgaggaagaagtagaaaagttaatctggtccactcgttggggcgcagatacggtaatggatctctccactggccgttatatccacgaaacccgcgaatggatcttacgtaacagcccggttcctatcggtacagtccctatttatcaggcactggagaaagtcaatggcggggcggaaaatctcacttgggaaatattccgtgataccttgctggaacaagcagaacaaggggtcgattacttcaccattcatgccggcgtattactgcgctatgtaccgatgaccgccaaacgccttactgggatcgtttcccgcggcggttcaattatggcgaaatggtgtctgtctcatcatcaagaaaactttctctaccaacatttccgtgaaatttgtgaaatctgcgccgcttatgatgtttccctatcattgggagacggtctacgccccggttctattcaggatgctaacgatgaagcgcagtttgcagaactacatacattaggtgaactgaccaaaattgcctgggaatatgatgttcaagtgatgatcgaaggccccgggcatattcctatgcagatgatccgccgcaatatgacggaagaattagaacattgtcatgaagcgcctttctatactcttggccccctgacaacagatattgcacccggttatgaccacttcacttccggtattggtgcagccatgattggctggtttggctgcgccatgctctgttatgtgacgccgaaagagcatctcggcttgccaaacaaagatgatgttaagcaagggctgattacctacaaaattgctgctcacgccgccgatctcgccaaaggtcacccaggcgcacaaatccgcgataacgccatgtctaaagcacgttttgagttccgttgggaagatcaatttaatctcgcgctcgatcccgatactgctcgcgcctatcacgatgaaaccttgccacaagcctccggcaaaattgcgcatttctgttctatgtgcgggcctaaattctgctctatgaagatttctcaagaagtacgcgattatgccgctggtatggaacagatgtccgaagcattccgcgcccacggtagtgagttgtatcacagtgtagaggatgtatcccatgaacaatctgcctaa

SEQ ID NO: 8394 - DNA, 651 bp, Photorhabdus luminescens
atgaacaatctgcctaacgcaccatttgccccaactgaacacagattggggctgtatccggtcgtggattcgctagcgtggatttcccgcctgttacagacaggcgtcaccacaattcagttgagaattaaagatctaccagaagatcaggtggaagaagagattcaacaagccattatgctcggtcgccaatacaacgctcgtctgtttattaacgattactggcgactggcaataaaacatggcgcttatggtgttcatctggggcaggaagatttagttatcgctgatctgaacgccatccaaaaaacgggattgcggttaggaatctctacccacgatgaacaagagctggcaagagcaaaatccctgcgtccatcttatatcgctctcggccacattttcccaaccacaaccaaagcgatgccatcttccccacaaggagtggaagcactgaaacgacaggtagaaaacacaccagactattccactgtcgccatcggcggaatttctcttgaacgcgtaccggatgtcattgcaacgggagttggcagtgtggcgctggttagtgccattaccaaagcaaaggattggcgtcaggcaactgcacaactgctttatctggttgaaggcattgagttgaaggggtag

SEQ ID NO: 8395 - DNA, 750 bp, Photorhabdus luminescens
atgctgaatgatcaagaatttatgcgttacagccgacaactgttactcgaagatattggcccggaaggacaggaaaaactgaaatccagccacgtattgattgtcggactgggaggactaggcgctcctgcctctctctatctggccggagccggtgtgggaacaatttatctcgctgatgatgaccacttacacatctccaatttacaacggcaaatactttaccgcactgaggatatcccttctgcaaaagctgaacttgcagccaatcaactcaatgcattgaatccgctgatcaaaacaatggttcttaatcaacgtcagaacctggaatcgctgacaacaatcgtgaagcaagtcgatctggttctcgactgctgtgacaacatgacaacccgccacgctatcaatgctgcttgtgtggcaacgcgaaaaccgttgatcagcggcagtgctgtcggttttagcggccaacttatggtatttgaacccccttatcttcatggctgctataactgtctctaccctgaacagcaagagcctctacgaaattgccggactgcgggtgtattaggtccgatagtcggtatcatcggcacattacaggcattagaagccatcaaaatgttaactgggcttccctctccgttaagcggcaaactccgactgtttgatggtaaacaacaaagctggagcacactacaacttaaccggtcgcagcaatgcccgatttgcggagatatggcatga

SEQ ID NO: 8396 - DNA, 201 bp, Photorhabdus luminescens
atgaaaattacggtaaacgaccagccgatggagcttatggcttctctggctatacagcaattgctagaacaacttgaacaaacacaaccgggaatggcactggctattaatcaaaccattattccgcgttcagagtggaatacgcatcgaattaatgatggagacaatatccttttgtttcaggctattgctggaggttga

SEQ ID NO: 8397 - DNA, 768 bp, Photorhabdus luminescens
atgttaaaaattgctgatacgacttttcattcccgtctatttaccggtacaggcaaattcgccaatgcaaatttaatgactcaagctatagccgcttccggcagccagcttgtcacgatggcaatgaaacgcattgatttgcagagcggtaatgacgctattttggcgccattgcaaaaacttggcgtcaaattgctgccaaatacttctggggccaaaaccgcagaagaggccctgtttgccgcccgtctggcccgtgaagcactggcaaccaactggatcaagctggagattcatcctgatgtgaaatacttgttacctgacccgattgaaacactcaaaggcgctgaaatgttggtcaaagatgggtttgtcgttctgccctattgcagtgctgatcctgttttgtgcaaacgtctggaagaagtgggttgcgcggcggttatgcctttaggcgcaccgatcggatctaatcaagggctactaacccgagatttcctgcaaattattattgaacaagcacaagtgccagtggtcattgatgccggcatcggtgcaccaagccatgcattggaagcgcttgaactaggcgcggatgctgtattagtcaacaccgcaattgctgtcgcacgtaatccagtaaaaatggctcaagccttcagaatagcgattgaagcgggtgaattatcttatcaagctggccgggcaagtccaaaacaacacgctgttgcatccagtccactgaccgatttcctgagagtgctctga

SEQ ID NO: 8398 - DNA, 1092 bp, Photorhabdus luminescens
ttgagttgggatgacatcaccctgcgcattcatagcaaaaccgcgcaggatgttgaacaagcattaagcagtaacaaattaaatctggacgattttatggccttgctctcaccagcagcgaaaccctacatcgaaccgctggcacaacgggcacaaaaactgacgcgtcaacgcttcggtaacaccgtaggtttctatgtgccactttatctctccaatttgtgtgccaatgattgcacctattgcgggttctcaatgagtaaccgcatcaaacgcaagatactgaataaagatgaaattattgccgaatgtcaggcgattaaagcgctgggcttcaacaatctgttattagtcaccggagaacatcagggcaaggtcggtatggattatttccgccactatctgccgcttatccgcgagtatttcagctcaatcatgatggaagtccagcctatgacacaggaagagtactcagaattaaaaactctggggctagatggcgtgatggtttatcaggaaacctatcatcaaccaacttacctgttgcatcatctacgaggtaagaaacgggatttccactggcgattagaaacacccgatcgtcttggtcgggcaaaaatcgataaaatcggtttaggggcattgattggcctttctagtcattggcggacagactgctatatggtggcggagcatttattctttctgcaacgcacatactggcaaagccgttactctatttcattcccacgtttacgaccttgtaccggagggattgaaccggcatcgctaatgagtgaagcagaactggtacaactgatttgtgcttttcgtctatttgcgccagatgttgagctgtctatttccactcgtgaatctccattcttccgcgatcacatcataccactggcaatcaacaacgttagtgccggttcgaaaacccaacccggtggttacgcagatagtcgccacgaagaattggaacaatttatgccgcatgataaccgttctgtctatcaggtcgcagacgcattaattaaagccggattacagcctgtctggaaagattgggataactatttaggtcgataa

SEQ ID NO: 8399 - DNA, 477 bp, Photorhabdus luminescens
atgaacgtacaagaaatcctgaataatgaagattattctgatagcaagaaaaactctcataaagaactggttaacggctcattcgaagagggatataacggctggagaatcccagctcctgagtcagtagaaatcttatctgaaaatggcgttcactttatcagaatccaaagcgttaccggttctggcgtcattgatcaaattatcgaaggattagaacctaacactaaatataaactaacaggtacagctcgcgtatcatcagaatgggcctcatcagcttattttggtttacagagtcgcaccgaaggccccaacacttttgctgtaaacagcaccgattttacaaccggttcggtagaattaagtacagatcaagagggacttttacgcgtttatttattgaaagaccaagttggtcctcgaccagacggagaaaccgctgactttaccggttttattttagagcaagcttaa

SEQ ID NO: 8400 - DNA, 486 bp, Photorhabdus luminescens
atggatatgaagaaaatgctaaatagcgcagattattctgatacaaaaaacgctaataaagagctggttaatggttcatttaacgaaggatatcgtggctggagaatcccaacccctgaaactgtagaaatcctgtccgagaatggcgttaattttcttagcatccaaacctattccagctctggtgtcattgatcaaataataacagggttggaacctaacgttaaatatcgactgacgggtacagcacgcttatcgactcaactaacaccacaaagggccttgcccgcttattttggcttacagaatcgcacatttggccctgaatcctttgttgtcaatagcttcaattttacgaccggttcagttgaattaaacacagatgaagaaggacttttacgtatttacatgctgaaagaccaatttgtagaacttccagaagaggcaactgctgactttaccggttttattctagaaagagtttaa

SEQ ID NO: 8401 - DNA, 1026 bp, Photorhabdus luminescens; identical to SEQ ID NO: 6127

SEQ ID NO: 8402 - DNA, 582 bp, Photorhabdus luminescens
atgggtttatcacaatatcattggcttaatgagccatctgattggcaatgtggaagcggctggcttaatgtcactacagatcataaaactgacttttggcaacgaacatggtatggctttgaacgtcataatggtcatgtttttgggcgttatgttgaggatgatttcacctttcaactctgtattgaaggctgttttgaacatttatacgatcaggcaggagtcatgctattagtcgatgagaaacattggctgaaaggcggaattgaatattctgatggtcatgcctcgattggtagtgtgctaacacgtcatcattctgattggtctatgggcgtatttcctggtgatgctagtaaattttggttacgtttgactcgtgaagagggatatttaagactgcaatattccactgatggttttcggtggccattgttgaggttatctcctttttttgaagataaacaacctgtctttgttggtgcaatgtgttgttctccagagcggcacggattacaggtgcggttttctgatttccaattgacaccaccaataaaaaaaccattgcatgatttaagttag

SEQ ID NO: 8403 - DNA, 1152 bp, Photorhabdus luminescens
ttgtctgatcaaaatattgtctctttggtaaaacaacccatcatggcaacgcgtgccgctttttttattgccggctttagtcttgcaagttgggcacccctgattcctttagctaaagaacggctacaacttgataatggcgcgatggggctcctgatgttggcgttcggtattggctctttcatcatgatgccgatagccggcatgttagccgcacgtttcggctgtcggcaaatcttcactttatgtgctttggtcgtgctagtgatgttgccagggctaagtgtattacctacaccgctaacactggcttgcgttttatttatttttggcgcaggtattggtgcaatggatgttgtggtcaatatccacgctgtcatggttgagaaaatggctcggcggccaattatgtctggctttcacgcgttatttagtttgggcgggatcgctggtgccggttcggtgagtgcattgttatctttgggaatatcacctctccaggcgatggtaatggtggtgttgctggttattttattgttactgccggtatggagtggattattaaacgaagccgaatcggataatacgccattttttgctatgcctcatgggatcgtgattttattaggctttctctgttttgttgcctatatcatggaaggatcaatgctggactggagtgggatattattaaccagcgtacataatatcagtagtcatcaggcgggtatcggttataccttgtttgctattgctatgacatcgggccgctttctcggtgataagattattgccctttatggacaccgacgggtttttatcagcagtgctttattggctacttccgggtttatccttatttactcagcatcgaccgcaataatgctagggctctctttcctgatgatcggggcaggattatctaatatcgcaccaatgctttttaccgcttccggtcaacagaaaattatgcctgattcactggctgttgccgcggtttctactatgggatattcagggattttgctggggcctgcaatcatcggcggattagcgcatattgtgacattacacggcgcttttgcttgtattgctttactctctatctccttacttgcaggatataaattgattaattcaagcggaagataa

SEQ ID NO: 8404 - DNA, 642 bp, Photorhabdus luminescens
atgtttcacatggatagatttaatgtgatttttgatatcgatggggtcattgttgacagtgaacaactgcactttgatgttctttgtgatttggcgcccgactatacacagcatgtacaaccacagcaacttattggcctgagtttggaggaaacgttagattacattggggttccagctcagcaacagaaagagatcactgctcaaatcgtctcggtgtacaaaagtaagctggctaaaagttaccttcgtccagggatttccaggttgatattggccttacaacagcaccgtatcccttttggctttgtctctactgcgccgcgggaagtctgtttggcgaatattggattgttggaattgagcgaaagcccggctttaatctcaggtgacgatgttgagaggacgaaacctcatcccgatccctatcttgctatgttgaaattgaagtctatggatgttcatcagacattagtgattgaagataccgatttgggaattacagcagcaacgcaggcaggtattccctacgtgtatgcttggcctcatgctttatcggttgcggaacagtatcaacaggctactcgtattattggggcgctgaccgatattccacaattttctaaaattaattttgggtaa

SEQ ID NO: 8405 - DNA, 1062 bp, Photorhabdus luminescens
atgaaagcacttaaatttaatcgggtgtgggatgtgcaaatccaggatgttgaaccgttacgctgtgctgagcctgatgatgttgttgttgatattgcggtgtgtggcgtttgtggtacggatgtcgggattatcaccggatcttatcctgttgctattccgggaaccacgctgggccatgaaacaacgggggttattacgcaaatagggaagagtgtcacgcgttttaatgtgggtgaccgtgttgtcatcaatccgacctattcttgtgggcattgtcggatgtgccagacaggcagtccaaatcattgtgagaaaaaattgggaaccgaagcaggggtttcctatgatggggcatttgctgagcaatatctggctaaagagagttcgctgataaagctggatgatcatgtcagtatggaagaggcatcattgactgagccactcagttgtacgctgaccggggttgataaactgggcattactcatactaatattcgtgcagcggtagctggcgcaggcccaatggggatgctctacatttgggctttacatgccagaggcgttaaggctttcatggtcgagaaaaacgaaagtcgaattcaatttgccaaagaaaatctgccaccagaatgtgagctgtatactgattttgatgaggcgttaatacagaaatatggcgataaatcagcgcttatcgatctctgtgtggatacgaccggtcaattaaccgaatacgtttttgaacatttggcacctggcggaaaattgttgaatgtggcgcttaaagataagcatgccaatcttgatatcttgaaaattgctgataagagcctttcagtgattggttccatcgattctctgaataacagttttgaacgtgcttataccatgatccgtgatggtgttattccagccggtcgtctggttagccaggtttttgattttaatgattacttgcaggcttttctcactgtgggttgcgatattgctaacaaaagccaaaaaccactttttactccgaactgtaaagtgctgatccgtatctccgatctaaaataa

SEQ ID NO: 8406 - DNA, 1254 bp, Photorhabdus luminescens
atgatggaaaatggaaaacggtttgaagatatgctttctcgctttgttggaaacggtccttatttagaaattgatggtgaaaagtatattgatgcagcttcggggacatttaaccttccacttgggtacactaatcgcagaataactgaaaaattaaaacagcagatcgacagatgtacacatctaagttcagcttatacccatgaaatgtcacaatatattttggataaattagttaaacatagccctaagggcattgatagaatatggttacgtgatgtttccggctctggggcggttgaatgcgcaattcgtatcgcgcaaaaagcaacaggacgttcaggggttatctctttctttctggctcatcatggtcagtctttagctacagcgcaaatttcaggtaatgcttttagaattaaagacttccatgtcaacattgatggttcttttaaaattccaacccctactagtgtcatgtcagagcttgaaccgaatacagaatccaatcaatattttgacttagaacaatttattcaattagggtcaaatgacaatattgcctgtcttatcattgagcctattcaaggaaatggcggaaataacgttttccctgttgatttttatcgtaagatcagagacatctgtcataaacatgacattattattatcgcagatgaagtacagaccggatttggccgtaccgggacattttttgcttcaaccggttacgccaaagaattagaacccgatattattgttttcgctaaaggtgctggtggcataggtattcctactggtggtgtgctgatgcggagttcattagatgtattagagtcattcgaacattccagtacatcaggcgctaacccgctttcattaacggcgcttaacgaaattatcgatattattgaagaggaacaagttctggagaatgtgcaacgcaatgaaacttatttgcgtgatggcttactcgcactacagcataaatatccagaaatcactggcgttaggggcgtcggttatatgtttggctttgatacgccatcacccgaatttgcggcacaagcgattgcaatagcgaattctcatcacttgatcatccggggttctcgttatggtaaaggtcgtgcacttaaagttcgtccaccattaatttgtactcaggaacatttaaacgaaattctgtataagcttgatctgacttttgctgatatgacgttaaatatgctggataccaaggaggtagcgtaa

SEQ ID NO: 8407 - DNA, 1194 bp, Photorhabdus luminescens
atgcaaaattatattcttctactacttagcttggcactttttggacctttgggtatcgatgtattcttgcctacggttcctgccattgccgaggattttaaagttaataatgaagtcattcagtcaacgatttctttgtttttattaattatggggctaggtcaattaatctctggaccactggtcgataaattcggccgtcggccagtagccctaacgggtatcaccttatatatcatcggttcggtgatcgcagcgctttctacttttcccgaaatgtttattgccgcgcgaattattcaaggatgtgctgtctgctgtaccagtgtcgtctgcattagtggtgtgcgtgatcgcctaaacggtgacgaagcggccaaagcctatggatttattaacggtacgctaaatattgttcctgctcttgctccgttacttggcggtattctggccgaaatgttcaactggcgagcgccattctggtttttgacttgctactcggttattgcactactgatcattgccaactggctaccagagacgcgccctgctaacactaagccaattcgcgggctaccactgaagcaatatttccaaattcttagcaatgcccagtttatgcattttgccttggttaatgccggcattatgggaatagtgattacctatgtctcatttgcaccaaccgtgctaatgactgagggccatatttcaccgctagcattttcattgatttttggtggcaacggactctggacgatgatcgccttcctaaccgccaataaaatcatccatcgacttggccgcccttgctgcctgctgttagggacaattctaatggcactggctagcctatctctgttctctggcatgcatctgccaactgtcgccagccagcactggctaagctatatgttgccggtttctttcgcctgtacaggtatggcatttgttatgggacctgcgaccagttatgcactagaaccttattctgacgaagccggtgtcgcttctgcactgataggattcgtccagatggctgtcggctccgctctctcgctcattgctatggcgttgccattttcgctcaaacagtcactcgtgttagttatgctactcggtaccacgctaatcctgtcagcacacatactcagtcgtaacctgaaagggcgggtagtttcgctagaaccctaa

SEQ ID NO: 8408 - DNA, 2715 bp, Photorhabdus luminescens
atgcttatcccatcaaaactgagtcgtcccgttcgtctgaataatacagtcttgcgtgagcgtctgttaatcagactgaatgagtcgtctaattatcgtcttgtgctaataactagccccgcgggttatggcaaaaccacattggtctctcagtgggctgccgggcaggataatctgggatggtattctttagatgagagcgataatcagccggaacgttttgccagttatcttatcgcggcattgcagcaagctacgcagggacattgtgttaaaagtgaagtgttggctcaaaaacatcaatatgccaatttacccgcgcttttcgctcaattatttattgaacttagtgagtggcggcggcccatttttctggtgattgatgattaccatctgattgtgaataacatgattcatgaggctatgcggtttttcctgcgtcaccagcctgagaatctgacgttaaccatcttatcgcgtaatttgccttctcttggggtggctaatctgcgtgtgcgtgagcaactgctggaaattgacagtcagcaactggcgtttgattatcaagaaacgcagcaattttttgataagcggttaaccacatcccttgatgccgacgattgtaagcgcctatgtaatgaagtcgcgggttgggcaacggcgctccagcttattgcgctgtcagcacggcagtcgtgtgatgctgctgaactgtcggctaaacgtttgtcgggcattaacgccggccatctttccgattatttggtggatgaggtactcaatcaggtgggtagttcaacgcgtgaatttttgttacgcagctctatcttacgttccatgaatgacggcttgattgttcgtctaaccggtgaagagaatggtcagcagcgtcttgaagagactgaacgtcaggggctgtttatccagcgtatggatgactctggcgaatggtttcgctttcatccgctttttgcttcatttctacgtcaacgttgtcaatgggaaatggcgttgcaattgccggagttgcatcgggcggccgcagaaggttggttggcgcaggggtatccgggtgaggcgattcatcatgccttggctgcgggggatacggctatgctgcgcgatattttgttgcaacatgcttggtcgctgtttaaccacagtgagttatctctgttggaagagtgtatgaatgcgttgccttatgagcagctcttggagagtccgcgtctggtgctgctccaggcttggctggcccaaagccaacatcgttattcagaagtcaataccctgttaaaccaggcggaacaggcactgcaacagaaacaaattgctatagagccggatctgctcgctgaattcgatgcgctacgggctcaggtggcgatgaacagtggtaagccggagatggctgataagttggcgaaacaagctttggcggcactgcttcctcagaatgaatacagtcgtattgttgcaacttccgtggaaggtgaagtattacattgtagaggtgagttggctgatgcattagcgcggatgcaacaaaccgagcagcttgcgcgtcgttttcatgttcatcactatgcgttgtgggcgctgttgcagcaaagtgagatcttattagctcagggatatttgcagacggcttatgaaacgcagaataaggcatttgaattgatccgtgaacagcatttggagcagttgccaatgcatgaatttttgttgcgtatccgttcacagcttttgtggtgctggtctcgtcttgatgaagccgaagaggcggcacgtcgtgggctggaagtgttgtctaacttccaacctcaacagcagttgcaatgtttaacccagttggctaaatgctctttgaccagaggggatattgataatgcccgccgttatctggcgcgttgtgaaaacctgctgagtaatgggcagtatcatagagattggcgtacgaatactgacaagctgcgagtcatcatctggcagagtatggacgacaaaagcgccgctattcggtggttggcacagactgagcggccagaaagcgtcagtaatcattttaatcagggccagtggcgcaatattgctcgtgctcagattctgcttggtttgtatgatgaagctgagtccattttggatacactgaatcaacatgcgagagaattgcaattaatcagcgatctgaatcgtaatttattgttgtgtaacttgctttactggcatatcggacgcaaaagcgaagcgcagagtgcactcattgaggcgttgtctctggctaaccgtacaggatttattagccattttgtcattgaaggtgagttgatggcccaacagctacgtcagcttattcagctcaataccttgtctgaactggagttgcatcgggcgcagcgcattttgcgggatatcaatcgtcaacatcgccataaattcgctcattttgatgaaagttttgtcacacagttgctaacacatcctgatgttcctgagcttattcgcaatagtccgcttacacagcgtgaatggcaggtgttggggttgatttactcaggctacagtaatgatcagattgccgcagagttggatgtagcgacgacaacgattaagacacatatacggaatctgtatcagaagctagggattgcgaatcgccaagaggcgattcagcaagcacaacaattgatgcagatgatgggattaggtgtatga

SEQ ID NO: 8409 - DNA, 2403 bp, Photorhabdus luminescens
atgcaacagtccagattagataaagcccagtttcaggctgcgctgacacgtcaatggcagcgctttggcctcggttcagcacaggaaatgactcagcatcagtggtggcaagccgttagtgcggccctgtcagaactggtgcccgcatgccctgtcatcaatcattccgagcaacaacgccatgtgaactacatctctatggagtttctgattggccgtttaaccgcaaacaacctgcttaaccttggttggtatgaagacgttcaggcttacctggcagaagaaaatatcattttaagtgatcttctggaacaagaaaccgaccccgctttaggtaacggtggactgggacggcttgccgcctgttttcttgactctatggcaaccgtcggtcagtcggccattggctatggtctgaattatcaatacggcctgttccgccaatcctttgaacaagggcaacaaattgaagaacccgataattggggacgagaatcctatccctggttccgtcacaacactcagttagatgttgaggtaaattttggtggcaaagtcgtcataaccgatgatggacacgaaacttggcagcctgaatttaccttgattggagaagcctgggatctaccggtcattggttatcgcaatggtgttactcaaccattacgcctgtggcaagcaacccatgcctctccatttgatctcgacaaattcaacgccgggcagttcctgacagcagaacagcaaggtgttgaagccgctaagctaacgaaagttctctatccgaatgataatcatcaagaaggcaaacgcctgcgtctgatgcaacaatatttccagtgtgcctgctccgtcgcagatatcctgcgtcgtcatcttctggcgggccgcaaaatagaagatctgcctaagtatgaagttatccaacttaacgatactcatccaacgattgccatccctgaaatgatgcgcattctgctggataaacaccagatgagttgggaaaccgcatgggagataaccagccatactttcgcctataccaaccacaccctgatgccagaaggtttagaatgttgggacgaagatctagtcagccacctgctaccacggcattacagcatcattaaagaaattaactaccggtttaaaaagttggtggacaaaacctggcccggcgagccagccgtatgggaaaaattagctgtacattataaccatcagatacgaatggcgaatctttgcgtcgtcgcgggctttgccgtcaacggggtagctgcgctgcactcacagctcatcgttaaggatctgtttcctgaataccatcaactgtggccgaataaatttctcaacgtgacaaatggcgtcaccccacgtcgctggatcaaacagtgtaacccggcactgtcaggattgcttgaccgtacacttaatcgcgaatggattaacgatcttgacgcccttaaaacacttgagccctatgcagatgacgccgctttccgcgaagagtaccgagctatcaaacaaagcaacaagatcttgctctccaattatgtcaataaagtgatggggctcaagctagatccaaacgccatttttgatgtgcaaattaaacgcttgcatgaatataaacgccagcatctgaacctgttgcatatcctatcgctctataaacaaattcaggaaaatccggcgctggacatcgttccacgtgtgttcctgtttggtgcaaaagccgcaccgggctactatttggcaaaaaacattatctctgccatcaatcaggcggcggagaaaattaacaacgatccaatcgtccgtgatcgcattaagatcgcttttatccccgattacaaagtttctgtcgcggagctcatgatcccggcggccgatgtttcagaacaaatctccacagccggtaaagaagcttccggtaccggcaacatgaaactggcactgaatggggcactaactatcggcaccttagacggagcaaatgttgaaattgccgaacaggtaggagatgaccacatcttcatcttcggacataccgtagaagaagtgaaagccttaaaagctgccggttatgacccactgaaactactcaaggaagatcaacatctggacaacatactcaaagcactggctagcggcgagttcagctatagcgataagcgagcattcgatatgctgctacatagtctgattgaaggcggcgatccttatctggtactagctgattttgcctcctattgtgatgcacataaacggatcgataccttgtaccgcgatactcaacattggacacgtagcgccattctgaacaccgctcggatgggtatgttcagctctgaccgaacaatccgtgattatcaacagcgcatctggcaagcaaaccgataa

SEQ ID NO: 8410 - DNA, 2088 bp, Photorhabdus luminescens
atgggggagaagagcctcgatcatttagcgaccgaggctggcattgtcgccagctacattaatgcttatggcaagccacaagcgattccaacggaaacccgacatcgcttgttagatgcgataaacgtaaacaaaccggccaatgcgccggtttcacccttgccgacagtaaaaatttttactcaaggtgaacacttcacgatcactctgaaagatgaagagcgctaccaatggcagatacggacagaacaaggagaggaatttcaggggcattgctgccataaactgatgctacctgatacgcttgctctgggataccaccgcctcactctgatacaaggaagccaatgctggtctatgcagattatcgtggcccccaaacgctgctatgaacccgatgctctactaaggagagaaaaactttggggtgcctgtgtgcaactctatactctgcgttcagaaaacaactggggaattggcgattttggcgacctgaaacacatgctgaaagagatagcaatacgcggtggggccttcatcgggctaaatccattgcatgcgctatatccgaccataccagaaagcgccagtccctatagcccctcttcacgcaactggcttaatgtgatttacattgatattaatcaggttgaagatttcaaacacaatgaagaagcacagagatggtggcaaacagcgacgactcaacgcatgttacaggatgcccgtaacgcggaatgggtagattacaccacagttatggcgttgaaaatggcagcactacgtctggcatatcaacaattcagcactcgtccagaacatgatccgtcaaaaaccgctttccaccaatttgtcatccaaggtggtgaatgtctctactatcaagctgtctatgacgctctgcattgccggttatatgctgaaaatagtacctattggggctggccggtatggccggaaaagtaccgcgatccgcacggtgaagcggtacaaacattttgccaatctcacccgcaggaagtggaatttttcctctggctacaatggctggccgatactcagcttgcagactgctttacccaaagccaaacaagtggcatgcccattggaatttaccgtgatttggccgtcggcgtagcggaaggaggctcggaaacctggtgcaaccgggttgtttactgcaccaaagcatcagtgggagcaccaccagatgcactgggcccactaggtcaaaactggggcttaccaccaatgaatcctcatgttttgcaatctcaagcttaccagccgttcattaagctgctgcgcacaaatatgacttactgcggtgcgctacgcattgaccacgttatgtcgatgcttaggctttggtggattccctatggcgaaacggccgacaaaggagcatatgtacactatccagttgatgatctaatggcgattctggcattagaaagtcaacgccatcgctgtctggtcattggtgaagatttgggtattgtaccggaagagattgtgggcaagctgcgcgatagcggtgtctattcttataaagtgctctactttgagcgtcacggcaatggggaataccgcgcacctgaggattacccgatacaagcaatggcgaccatcaccacccatgatttacctactttacgtggattctggcaaagcgccgatttgacacttggggaatcactcaagttatatcctgataaaaacctgcttcaagggttatataccgaacgtcaagctagcaaacaagggttattagaaggcttacatcgctacggctgtatcccggaacatatcggtgacacggcaaaagaggttggaatgtcaccgatgataaaccaagggttacatcgctatattgcccacagtgcctgctcactactgggactgcaacccgaagattggctggatatggataaacctgtcaatattccaggtacggtaatggaataccctaactggcggcgaaaactgaataccacattggaaaccctgtttggtgatgatcatgtcaatcaattgctgaaagatgtagataaatgccgtaaaaaagcaggaacagccagaggttaa

SEQ ID NO: 8411 - DNA, 1014 bp, Photorhabdus luminescens; identical to SEQ ID NO: 7370

SEQ ID NO: 8412 - DNA, 273 bp, Photorhabdus luminescens
atgcgcagtgtagtggaaagtaaaaaagttatccttaaaggtgataccacaacaaccggaggtgaggttttaaagggttccgatttggtaaaccaacacctatcggttgcctgtaaaggtgccccggtgttttgtcccgcctgtaaacaaaccggcgttgttgcggaaggttctaacttgtttaatatacaaggaatacctgtcgcgctggaggggcatcttgttaattgtggttgcccgactggcgcttgtcgattaaaggtacggtcataa

SEQ ID NO: 8413 - DNA, 1146 bp, Photorhabdus luminescens
atggaaactgtagattactttgcccaactgagatcacaactgacctcttttctttttcgtaatggcgatggactgaccgtttcccgtctggggatttctatcaccttgttttttaaacagggttacacccaggcgaaaaaacaacgcattctggcctgctaccagcgttttcgggaagagtttggctctcacttgcgttttcaccgtcatgagctggaaaggctaaaaaaatattcaccggaaaatattgctaaagtggaagagggtattcttaatcagaaaaaaaaccagttttctggttgggtggtcagtgatgccaaaaatgaagatgaggcacctcattatctgatgcgttatctggattcccgggaaataagcggtgataacggcagttcttacctaagcctggcacttccttggaattatctgaaagaacaagagggcatggctcgttttatggcctggctggagtttttgtgtgaacaacttgaaccggatagtggggactgtggctactgtctggtcttacccaatgacttctatgactactttcctttagagtatcaactggcgcaacgttacccttccttgcaagttaactccgcagtgttcacagctaaattacagtatgggcattccatccggagcattaactggatcaccctgctgtccaaacgctttgtaaaccgactgggcggggaattctggatacatcatgtactgcgccgctaccgggatgtagtgattacgccttattccaatggtctgatgatccgcgccggtcaatacccggacttaacgccactaccgggcagtgtcccggagagttattttgccattaaccaactgatacgtccgatacgggtgataccttgtgaaggccattcattgcacttctatggtgaaggtcattttaattcaacttccaccctggcttggtatgcccgttatgaccggggaccgctacaagtgacccctttgagaggtgaccatccggcactggtcagcgggatctggcaaactgacagcctgccgggcaggcagtatttctttgctcagggtgcgatggcttttgatgttgaaggtgcagaaccgggcacaactgtatggcatttaatacgagaaacggaaaatacaacggagtaa

SEQ ID NO: 8414 - DNA, 1149 bp, Photorhabdus luminescens
atgatggaaactgtagattactttgcccagttgaaatcacaactggccgcgtttaccttcctcaatggcgatgggctgactgtttctcgtcttgggatttctatcaccctgttttttaaacaaggctatacccaggagaaaaaacagcgcattctggcctgctaccggcgctttcgcgaagaatttggtacctacctgcgttttcatcgtcattcattgaaagggctaaaaaaatattctccagaaaatattgctaaagtggaagaaggtattcttaatcagaaaaaaaaccagctttctacttgggatatcagtgacgccaaaaatatctatgaagctccccgctatctgatgcattatctggattccgatgaagctgatggtgacaacagtagctcctacctgagtctggtgctgccctgggattatctaaaagaacaagagggcatgacccggtttatggcctggttagagtttctgtgtgaacaactcgaaccggatagtggggactgtggctactgtctggtgctgcccagagattaccatgactactttcccttagagtaccagctagcgcaacgttacccttcattgcaggttaattctgcggttcatacagccaaattacagtatgggcattccatccgtggcattaattggatcaccctgctgtccaaacgatttgtaaaccgactgggtggagaattctggatacgtcaggtgctgcgcccctaccgggatgtggtgattacttcttaccgtgatggcctgattatccgggccggtcaatacccggacttaacgccactcccgggcagtgtcccggagagttattttgctattaaccaactgatacgcccaatacgagtcattccccgtgaaggccattccctgcacttttatggtgaaggtcattttgatgatatttccacactggcttggtatgcccgttatgaccggggaccgctacaagtgacacctttgaaaggtgaccatccagcactggtcagtgggatctggcaaaccgacagcctgccgggcaggcagtatttctttgctcagggggtgatggcttttgatgttgaaggtgcagagacgggcacaaccctctggcatctggtacgggaagcggcaagtatgtgggaataa

SEQ ID NO: 8415 - DNA, 996 bp, Photorhabdus luminescens
ctggcttgctaccggcattttcgcgaagagtttggtactcacctgcgttttcacagtcattcactgaaagggttaagcaaatattcaccggaaaatattattaagatagaggaaggcattctcgccaggaaaaaaaatcggctttgtggttgggttgttagtaatgctaaaaatgaagatgaggcacctcgttatctgatgcgttatctggattctgatgaggatgatggtgacgatagtagctcctatctgagtctggtgctgccctgggattatctgaaagaacaagagggcatgacccggtttatggcctggctggattttctgtgtgaacagcttgaaccggacagtggtgactgtggttactgtctggtcctgcccaaagattactatgactattttcctttagagtaccaactggcacaacgttacccttccttgcaagtgaactccgcagttcatacagctaaattacagtatgaacactccatccggggcattaactggatcaccctgctgtccaaacgttttgtaaaccgactgggtggggaatactggatacgtcatgtgctgcgcccctaccgggatgtggtgattagttcttattccaatggcctgattatccgggccggtgaatacccggatttaacgccactaccgggtagtgtcccggagagttattttgctattaaccaactgatacgtccgatacgggtgatacctcgtgaaggccattcattgcacttctatggtgaaggtcattttaattcaacttctaccctggcctggtatgcccgttatgaccggggaccgctacaagtgacacctttgaaaggtgaccatccagcactggtcagtgggatctggcaaaccgacagcctgccgggcaggcagtatttctttgctcagggggcgatggcttttgatgttgaaggtgcagagacgggtacaactatctggcatctggtacgggaagcggcaagtatgtgggaataa

SEQ ID NO: 8416 - DNA, 1359 bp, Photorhabdus luminescens
atggcaatatctaatagtggtaaaatgtgtccggccgtgacctcaattaactgtacgatggaaatcggcgtctttcccgccgatgaagacccttgctatctggcggaaaaagctgaatatgccctgcgcctgccggcaatgattatgaccaaactgggcgctattcgctttcttaatcaagtcattatgagtgggttgattaaggttgaggagcttaagcatgactttctgtggccctataaagcagaagtggtgtttgctatccgggggaagaaggatgttcctctgcccatgctggcgaccagtctggcctctaaacagcgttatagcgataacttaccgcaatccagtaatccgtttgcccggccttctgccgaagacgcggaggaatttggtgttaaacgtattcggcgtcccgatattattctagttaaagatgaagctctccgctggccgggcagaaatgccacctacttcgatgattctgtgcaccctgataatctaaagatgttgattgaggtgaaatttccgggcgataaacttgccgaagatcaagaaatagattacatccaaattgcgaccgaagaccgctttggggtgatgcgtgtcgacgataaccgtacagaagagcaaaaacagtatgacgaagcgtggcgaaaactttatcagcccggttcccaacactataaaaatccgatcccactggccccgctgccgcccggttcgccgcctgatgatgaagctttacccgtaccgcccgcagagggtgtgccggggaccattccgcaacccttgacaaaaaatccaccgcttctcagcacttcccgctggtcgtttttacccagctatgaagactgggtcgtcctcgggcaggaggtggcgggtctggccgaaaatgggttgaattatgtccgcgacagtactcgggagcttcttgcccaatttggttcatggctcaatcaaaccggcaagtgggtgtgtgaagagattattgacccgataagccatcaggtcagctacgctttttcctgggctaatgaacaaacgggaaaaatcgtgacttggacggagagtgagataaaagcccggtggcagacggtgcaacagggttcagacgtcaccctggaagagcttaaaaacattagctggatgcagatatcaaaagaggtgggggaaggcatgctggaaatggtggtgattgttgccggagttgccgttgttatccttgtcacccttgccgtcgctgccgcactgattgcactggtggaaattttagctgccgctgccgcagttagcgccgccgcgttagccgccgtcctagcaatattggcgagtgtgacattcgccaccgcttcataa

SEQ ID NO: 8417 - DNA, 2142 bp, Photorhabdus luminescens
atggttcaattatgtagggtttcaaatatggatggattagttttcacctgccgaattggcgcactgccccaaaccacctttcaggtagcgcaatttactttacaggaagagctgtcacagctttatcgcctgacgttaaaggtggtgagctcacgtgatgacattcccctgaatgaacaactgggggacagcgcgtcactgaccattacccgcaatggcgtcaccgaacggaccattaatggtttaataaccggggctgaacagggtaataccgatggtcgtagcactttttatattttcactgtccgccccacaatgtggctgatgacgctcaatcaggatagccgtattttccatctgaagtctgtacccgaaatcttaacgatcttgcttaaagatcatcgtattttatttacccgcgatacgctctataaacgccatgccgaacgggaatacaccacgcaaaaacgcgaatccgcttatgatttctggtgccggctggcggcggaagagggcattatcttctggtttgaggaagaacagacgttgttctgtgattgccacttgggcatgcaggcggatatcgctctgacttacaatacgcatcctgaaacggacgagaccgataccacggcgtaccagtggagctatggcgaatacctgtgttcgaatggcacggtccagaaagaccataactttcttaaccccaaatattcgcttgagcatcagaagcaatccgacgatagcgggcaccattcggtgtttgaaagttacgggcgtttccagtgggacgaggaaggaaaaccttttacccaactgcggctggaacagttacgaaactacagtaaagtcggtaccgccaaaaccaactgcatccggctgcggccgggcaagatttttaccctgcaatcccatcccatagaagccatgaacgcccgctggcagttaatctctgtcacgcatcatgggtggcaacctgtcgcatcagacgacgggggtgaaggcacaacactgaccaacgaggtcgcctttattcccggaaaccaggactggcggccgccttaccgctacaaaccgctggcggacggtgatgaagtcgccacggtggtcggggtgggaagcgaagagatttatgtgaacgaacacggcgcgatacggatccatttccactggaaccgttacgataaagcggacgacaacgcgtcttgttgggtacgggtggcacaaggctggaacggcaacggtttcggttttatggcgataccgcgcgtcgggcaggaggtgattgtcagctatctcaacggcgatatcgaccgcccgattgtgacggggtgtacctataatggcctcaaccgcccgcctcttaatttaccggcggagaaaacccgtaccacttttaaaacccggactcacggaggagagggatttaatgaactgcgctttgaggataataaaggaagcgaggaagtgtttattcatgctcagagggatatgaatagccagattctccgggacaaaaccacgcagataggccatgaccagcaaacagaagtggcgcataaccgcaccgcgataattaaaaacgatgatgatgaagccgtgcagggcggccagacgcttgaagtcggtcaaaatcaaacggtgaccattaaaggtcagcaagccctttccattggtaaaagccatcaattaaacatcgccgataaccagcaaattaccgtgggtaaacatatcacggtgcactctgaaagcgggcaaatcatcattgggaacgcaggcggacagatagttattgacccgatgggcaatatccgcatcgaaggggtcagcatcaccatgactgaccatatcaccggcaagaaatccgccggtgcgctgtttgactactccgcccgctataccctgctcagtgaacagagcggtaaaccactggcccatacccgctataccattaccaccgctggcggtcagaccctttccggtaaaaccgatgcgttgggcagaacggtgattgtacagagtgaggcggaagaaaatttgcaactgagttcaccagaaaacccaccgaaaccgaagcaaaccttatatcaggccagtgataacacaccggtagagcatgttatggaatttacggagaaataa

SEQ ID NO: 8418 - DNA, 2016 bp, Photorhabdus luminescens
atgtggttttccagatttaaactggcttttatcgcacttttacttccctggttgctaacggtagcaacacaaatggcgggaagaatctatcttctcttaacttatggcagttatcagctcttcattgactctactcaagacgtggaacgaatgttctggatcggcggattgtttgatattcgtattgccagtctgctgtttgtgccttgtctgctgattgctagcttatttgccattaataaaaacagcttcaacatatggcaacacgcctatccgtggttggcaacaacactcaataccgtagtcggggctttgacggtaagtaatgtttactactatgccacttatgaacggtcgttcgatattttcatcttcggcttagtggaagatgatacgcaagccgtgctgcacaccctatggaacgactatccggtgattgaaagtttgctctgtttagcgctgttcgcaatgactgttttctggtcctgtctgctctggcaacgctaccttatttcacgcacagagcgcaaaaccagtctgccggtttctgcgatggcgacgctggttattttgactgtctgtttcattggcatgcgtggctccataggcacctttccactacgtcagtccaatacacaagtttcagaagtcaaaatgcttaatatgctgacacctaatggcccaatggcactgaattgggcgtttaatgatcattacaaaaacagccacttcccagaagcaacagatgcacaaggtagctggttattaaaccattttctagagaagccaacccccgcaaatctgtcaccgtttatggctaaaactgccgataatcccaccgctcaaaaaaatccgcctcatgtaatatttaacgtcatggagagtatgggttatcacctacaaagtttggatcgcccagatcttgatgtttttggcgctctacgccagcactggcaaaacgactggcgttttgaacgtttcatttctgaaggagatggcaccattgatagtttaagccgtttcttgatccgcagcccaaacagcgcagtcagtcaatccaccgcgcagcatctcgatttcaccagcaatatgttcaaaccctatctggcgaatggttacaaaattatcttcgtcacatccggtaacggcgcatggcgtaatttgaatcagttcctgccaaacctgggagtcagtgaatttatcgatcaaaatgggctgaaaaaacgctatccagaagccaaattcgatacctggggtgtacctgatgagtttatgttccgttatattgaagagcgcttaactcaggcagaaaagaacggggagcatgttctgattatgtcgttatctactactcatcacccaccgtataaatcgccggcaggttatcagaaaaccgacatcaagctgagtgataccgagaaacaacgtttaagtcatttggctagtggtagtgagttacaagaggtttttcataccctgcgttacgccaatgatcaattaggacaatttattagttgggtaaaatctcagtcattggcttcccataccattattgcggcaaccggtgaccataatattcgaggtatcagttatccagatgctcatgagttggcaatcggccacggtgtaccgttttatctctacgtgccgcccgcttatcgccaaaacgcaacttttgatgctaccagagtcggcagtcataaagacatttggccaaccctctaccatttgagcttgtcacatacagcttattaccgtaccggctgtaatttgctggctgaacatctagaccctatctggtgtcaaggatataacccggaagtcactattacacagcaaggagcttatgtcatgataggcaaaggtgaatttcgaccgtgggcaaatcaaacaggattattactcggtgacccccagccaatgacagcagaccaaaccaaacagttcaaacgttggcaggcatttaccgatctcctgtcatggcaattaaatcgtcaagttcaccaccagcaataa

SEQ ID NO: 8419 - DNA, 891 bp, Photorhabdus luminescens
atggcaatggttcaacccaaatcacagaaatggcgtttgttagcgacacatttgttgatgtttacctttattgccatgatcttattccctctactgatggttattactatctccctgcggccggggaactttgctacggggagtttgatcccggaaaatatctcttgggaacattggaaattggcactgggttacagtgtggtatcaccggatggccgtgttactccgccacctttcccggttatgctatggctctggaactctgttaaggtggcctttattaccgctgtaggtatcgttaccttatcaacgacttgtgcttatgcttttgcccgtatgcattttcgcggtaaaagtactttactgaaaggcatgctcatttttcagatgttcccggcggtactttccttggtggcgctgtatgctttgtttgatcgactaggggaatatgtaccgtttattggccttaatacccacggtggtgtgatttttgcttacttggggggcattgcgttgcatgtctggacgattaaaggttatttcgaaaccattgatggctccttggaagaggctgccgcgcttgatggtgcgacaccgtggcaagctttccgtatggtgctgctaccgctttcggtaccgattctggcagtggtattcattctttccttcattggtgtgattacggaagtgcctgttgcctcactgcttttgcgagatgtgaacaattacactttggcggtgggcatgcagcagtaccttaacccacagaactatctttggggagattttgccgccgctgctgtgctctcggcactcccgattaccatcgtcttcttggttgctcagcgctggttggtcagtggtttgaccgccgggggagtaaaaggctaa

SEQ ID NO: 8420 - DNA, 1557 bp, Photorhabdus luminescens
atgtcagcgacgctcgaaaaaacatcatggtggcagcattctgctctgaaatggcttgcagtgagcctgtgtgtactctttaccggttatctggtggtattgatgtactcacagggagagtatctgtttgcaatggtgacactggtattgttaggtatggggatttatgttttttccaaccgcaatacttatgcctggcgctatacctatccgggtgtggcaggcatgggattgtttgtactgtttccactcatttgcaccattgctatcgccttcaccaactatagtagtatcaatcaactgacttttgaacgcgcacaatctgtcctgatgagccgtcagtatcagtcagggcaagcattgacttttaagctctatccaaaatcggatttgtgggttttggcactgagtataccgagccaaacgaagcaactagtgtccgaaccgttttcgctgtcagcaatggaagagacgactctgcatgtgtatgagcaggataatcttgagaacggtgaagcagcgacattgcgcattattacccagaatcgacaggcattgaaccagttggttgttgttttaccggatggtaaccggctgaaaatgagttcgctacgtcaattctctggagtgcaccctcaatactctcttggggaagatggtgagtccctcaccgacaatcaaacaggtacgctttatcgccccaataccgataccggtttctatcagtctgtcaatgctgagggaacatggggtaatgagactttgacgccaggatttactgttaccatcggctggaaaaatttcctgcgggtgatacaggatgaaggtattcagaaaccattcctcgctattttcgtttggacagttgtgttttctctgttcactgtggtgctgacagttgctgttggcatggttttggcttgcatcgtgcagtgggaagcgctgaaaggtcgtgctgtttatcgcgtgttgttgatcttaccctatgcagtaccatcgtttatttctattttgattttcaaggggttgtttaaccaaagttttggtgagatcaatctgttgcttaacggtctattcggtcttaaaccggcttggtttaccgatccaacgatggcgcgaaccatgctgattgtagtgaatgcctggcttggatatccctacatgatgatcctctgcatggggttattgaaagcaatacccgatgatctgtatgaagcatcggcaatggatggtgcagggccgtttcagaacttttttaagattactttcccgttgttgataaaaccattgacgccgctgatgattgccagctttgcctttaactttaacaactttgttctgattcagttgttaacccttggtggaccagatcgcattggcaccacgacgccggcaggctataccgatttactggtgagttacacctaccgtattgctttcgacggcagtagtgggcaggactttggcttggctgcggcgattgcgacagtgatctttttgttggttggtgcactggcggttattaacctgaaagctacccgtattaaatttgactaa

SEQ ID NO: 8421 - DNA, 1200 bp, Photorhabdus luminescens
atgataaaaacaaccttaaaagtaggcgcccgtactttagcgctttctgttttagccacgctggtgttatctgcctctgcttttgcaaaaatagaggaaggtaagctagttatctggatcaacggtgataaaggctacaatggcctggcacaagttggtgagaagtttgagaaagatacgggtgtcaatgttacggttgagcatccagacaagcttgcagagaagtattcacaggttgcagcaaccggcgatgggccggatattattttctgggctcatgatcgctttggcggctatgcacagtctggtctggtgacagaaatcacgccagatccgagcttcaaagataagctatttccgtttacctgggatgctgtgcgttacgacggtaaactggttggttaccctatcgcggttgaagccctctctcttatctacaataaagacttggtgaagacaccaccaaaaacgtgggaagagatcccggctctggataaggcgctgaagagtaaaggcaaaagtgccattatgtttaatctgcaagagccatatttctcttggccgttgattgctgcggacggaggatatgctttcaagctggaaaatggcgcatatgatgtgaagaatgccggagtgaataatacgggtgccaaatcaggcctgcgtttcattatcgatttggtgagaaataagcatctaaatatagatactgactattccattgctgaggcggcgttcaacaaaggtgaaacggcgatgaccatcaacggtccgtgggcgtgggccaacatcgacaagagcaaggtaaattacggtgtggcattgttgccgacctttaacggtcatccgtccaagccgtttgttggtgtattgacggcaggtatcaatactgccagcccgaataaagagctagccaaagagttcttggaaaactacttgctgaccaacgaaggtctggagatggtgaataaagataagccgttgggggctgtgtcattgaaatcctatcacgatattctggctaaggacccacgtattgcagccacgatggaaaatgctaaaaacggcgaaatcatgccgaacgtctcacaaatgagcagtttttggtatgccatgcgcaacgctattgttaatgcgttggctggccgtcagaccgttgatgccgcactaagtgatgccgaagcccgtataactaagtaa

SEQ ID NO: 8422 - DNA, 117 bp, Photorhabdus luminescens
ctgcccggaatgggtgtgatctctattacaaaaacagaagaagcgtgccgttgcccacaaaaaggggcatctttttttgcgataaatatcacaatttatccagtagctcatacctaa

SEQ ID NO: 8423 - DNA, 1110 bp, Photorhabdus luminescens
atgtcgagcgtcacattacataatgtatcgaaggcttatggtgaaactattatttccaagaacatcaaccttgagatacaagaaggagaatttatcgtttttgtcggtccatcgggttgtggaaaatcgacaatattaaggatgattgcgggtctggaagatgtgacttccggtgatttgctgatcaataacatccgaatgaacgatgtgccccccgccaaacgcggcgttgggatggtttttcagtcttatgcactgtatccccacctgtctgttgcagacaatatgtcattcggcatgaagctggcgggcgctaaaaaaagtgatattcagcaacgggtaaaacaaattgccgagatgcttcaactcgctcacctgcttgatcgccgccctaaagccctatcaggtgggcaacgtcaacgcgttgctattggccgtactctggtagctgaacccagtgtttttctgttagacgaaccgctttccaatctggacgccgcactgcgggtccaaatgcgcattgaaatctcacgcctacacaaacgattgcaacgtacgatgatttatgtcacccacgatcaggttgaagcgatgacgctggccgacagaatcgtggtactggatggtggagatgttgcccagattggcaaacctcttgaactttaccattacccggttaatcgctttgttgccagctttattggttcacccaaaatgaatttcctgccagttaaagtcacggctaccgctattgatcaggtacagattactctgcccaaccgacagcaaatctggctgcccgtagaaagcaagggggtaaaagtaggcagtaatgtctctctggggatacgtcctgaacacctcctgccaagtgatatcgctgatgtcacgttggaaggcatagtgcaagttgtcgagcagttaggaaatgaaacccaggttcacattgaaatcccggccattcatcagaatctggtttatcgccagcctgatgttgtactggtggaagaaggatctaccttcaccatcggattacctccccaccgctgccatttattccgagaagacggaaccgcatgccagcgtctgcatgaagaacccggtgtttaa

SEQ ID NO: 8424 - DNA, 1287 bp, Photorhabdus luminescens
atgaaatcaatgcgtatattacctatctcactaaccattatggccggattactgtctatcgaggcgtcagccgtagaattccacggttacgcccgttctggtattggttggaccggcagcggcggtgagcaacagtgtttccaaagcaccggcgcacagagcaaataccgtttaggtaatgaatgtgaaacctatgctgagcttaagctaggtcaagaactatggaaggacggtaataagagtttctacttcgataccaacgtggcgtattccgtggcgcaaaaaaatgattgggaatccaccgaccctgcgttccgtgaggtgaatgttcaagcgaagaacgtcatcgattggttaccgggttcaacattgtgggcaggtaaacgcttctaccagcgccatgacgtacatatgattgacttctactactgggatatctctggtccgggtgcaggcctgcaagatattgatctcggctttagtaagctcgcgctggccgtcacccgtaacactgaatctggtggttcttatggctggattgctagtcagcgcaaagaaattcccacctccaatgatgtctacgatatacgtctatccggtctggaagttaacccaggcggcaatctggagcttggttttgactatggacgcgccaacgcgcgagatcactacaaacttgaccgtcatgcttccaaagatggtttcatgtttaccgccgaacatacacagagcatgttaggaggcttcaacaaatttgtcgtacagtacgcgacagattccatgacctcctccaacagtggtcattctgaaggtgccagcgtaaacaatgacggttatatgttacgtattctgaatcatggcgcgattaatctcgcagaaaaatgggatctcatgtacgtagcgatgtatcaggatactgaccgtgacaacaacaatggcaacacatggtatacggttggtgtacgtccaatgtacaaatggacatcgacgatgagcaccctgctggacattggttatgataacgtcaaatcccaacgtactcatgacaccaatgatcagtacaaaatcaccctagcccaacaatggcaggcaggtgacagcatttggtcgcgcccggccattcgcctgttcgccacctatgcaaaatggaatgaaaaatggggtaatgcgaacaaaaaagacggttacatcgatggaatggcctaccgtgataccgcaacgcataaattcagccgtggcgacgatgatgaatttacctttggtgcacaattcgaagcttggtggtaa

SEQ ID NO: 8425 - DNA, 933 bp, Photorhabdus luminescens
atgaaaactaaactgctctcatgttgccttagcgcggtactctgtagcacatttcctcttataggatatgcaacgcccattaccgcaactcaagcaactatcacagctaaaacaaccacaaaacaggatattgtcgccccgtccctctcgataacagcattgcaaaaactgagctggcaaccgattaataccagtgatactcaaaccattatcctcaatgcagcatctcagcatcttaatgagggagagattcaggggccgatagccgcattcgcgctgccggcaaaccggggctctttggatattaccctgagcagcttagtacaagataaacaagtttacgtgccaaatgttttagtcctggatcaagggttacgccccgccgcattttacccgagcagttattttccctatgaacgtccgggggttatgtccaccgatcggctggaaggcacactaaagctaacaccagcactggggcaacaacaaatttatgtactggtctacaccacccgtaccgatttgcagaaatccacccaaatggttgatccggccaaagcttacgcgcaaggcgtcggtaatgccgttcccgcgattcccgatcccgttgcccgccacacacaaaccggtacgttgaagctgaaagtgagatcggaacaaaacgccagcaacatcacgattggtcaagtcttctcaagtccagcacaagaaccgatcattgtcgggccaacacaagccatcgtaacgccgtctacgctgcaaaaagtcaaaccagtcctgagtgatacagaacgttatttcagtgatgcaattaaaaaagaaattagcaatggcaatatcgataaggcactcaaattgctggatgaagcggagcgccttggatcttcaacggcacgagaaacatttatcaacagtatcaaaaacaaagggtaa

SEQ ID NO: 8426 - DNA, 921 bp, Photorhabdus luminescens
atgtctagccacgttaactttaacgccattgttgatgaagtcattgaacaagacagactggcaaacctgaggccagttgtagaaaaagaactgttgcattatgacatcctgttttgtctttctaaggacggtttactcaaggagattacctttcagggtggtacatcgctaaggctctgctacggctctaaccgatttagcgaagatctggattttgctggtgggcgtggtttctgttccgctgatttgagtagaatcaaagagtgtatcgagaaatacctgggtgtacgatatgggcttgaggtcacggtaaaggaaccgaatgaactacgaaacaaaccggagtatgcagaagtaaaagtggataaatggcaaatatccgtcactactgcgcctgaacgtaaagacctgccaaaacagcgcataaaaatagaaatcgccaatattcctgcctatacaaacaccccccgttcattgataagaaattattcagtgttacccgacggatatgctgatctccttgtgtctgtcgaaaccctgcctgaaatcatggccgataagctgatagcattccctgctactacatctcaaattcgataccgcgatatgtgggatttattatggttaagtcagcaaaatacgacaccagacatagaactcattaaaagaaaagtatcagattatcagcttgataactttgaggaattgcttcaagccagaatcgactcgattgaaattattgttgcttctggtcactttcacaacgagatgagacgatttatacccgcacctatatacgacagaagtgtaggacaagaagcattttccacctatttaacgacgagcctaaaggagttgttaaccactgtgaagaaaagcctgtattcttcaggagacaactccattccattcaagttataa

SEQ ID NO: 8427 - DNA, 1080 bp, Photorhabdus luminescens
atgaaaaaaatattcataatataccatgatcttttcttgaatggatatggtggggtagaaacggtatgttcgaatttaataaatttgattggccgtgccaacattgaaattgatttcattttcatatctctgaataagaaaaatagaattgaaaatcgtgattggttatctcatgctcaatatatctccttaacgccaagcaatgacgaatctcgcccggatattgcatgtgaactgtccttgatattagaaagatttcaccccgagattttaataagtttagacacaacatcttgtaatattgctcgactttcctgtgaaaaaattaatttcccggtaaaaacttactcttggctgcatacttccattagaaatcctacctcacaaaaaattaaagatttatgctgtgccgacgagcaccttgtaattagttctggtttaagagatcaaatgttatcctttggaataaaaacagacaagcttcatcttattttcaatcctatcaagatgaactcttttatcattcctcaaccaaaacacatagccagattcttatatgttggcagaattcttgcctataagtcaaaaaatctaactgaactgtttttagcgctttcacaattgcatggtcattgggagttacatatagtaggttctggtgatgatgaggtttatttaaaagaattatcttcacaacttaatataagtaacaatattatttggcacggttggaaaaatcagccttgggaatttgtgatggataatataaaagaggtgtccgcttttattttaacctcaaaatatgaaggctttggcatggtattagcggaagcaatatcttatggtatctattgtataagttcagattgtcaatgtggcccgggtgatattatcaatgattttaatggtgaactttataaatcaggtagtattcctgagttgtctgaaaaattacaactcattattgacgaatataaaataagagatcatcaagcaataaaaaattctattgcctttctttatgaagataatttcctgttaagaatcactaaggctttacctgtattagctcagatctaa

SEQ ID NO: 8428 - DNA, 780 bp, Photorhabdus luminescens
atgatacatctatttctatcacctcatttagatgatgcagctttaagcgctggcggtttaatacataaattagtttcagaaaatcaaaaggtgattattttaacattttttactgaatatgataaagacctgacatctcattactcacactctgcacataatgataatatatattcatttataaaactttattcaaagcgagctaatgaggatattgctttttgcaataaattatcagtgattccaatacatggtaaaattttagattgcatttacaggaccgatcaatacggtgaacctatgtataaaaattcggccatgatttatactggccagatacataaatcagatgatgcatccgatatggctcaagagctaattgacaaaatattgttaaattatcaacctgattatatctatgcccctttggggataggtcgacatgtagaccatatcataataaataatcttgtacctaatataaaaggttcacgtaagtttaagatattgctttatgaagattttccctatgttttaggtgaataccctattattaaccctgatagtttggaaagtgctttattaagaaataataaatttgataagcgtgccatattggtggatattgatttaaaagaaaaagcacaaaacatcctattttatgagtctcaattagaacctctatttgataataaatcaaacattttaatttcattggagaaatatcatcgaactattaatgaaataaaagtgcaagagcgtttttggttaattcgataa

SEQ ID NO: 8429 - DNA, 747 bp, Photorhabdus luminescens
atgagtaaagaaaataacaaagaactgctggatagcaaaatcaatttaaattcaacatatttatccaaagagattcagagaagattaaaacaagcttcatttatatttaatcctagccaaaaaactttaaattgccagttaaatagttcacaaattaaattattttctgaaatatgtctgttcttggagcaggatgataacttagatattcttgcttcttgcatacacgacttatggtgtgcaaaatatttagtcgataataaaactgctatgcaagactcaataacaaaacttgaaattgagtacaacttacaggttaattttttaaaaccttatcaagcattcactgaaaaagagaagaaatttgagaaaaggttaataaagagtgacctgagtattatatcggaagtaataaaagatacttgttcatacgatgataatattgtgtctgataattttaattatgagagcttactttctacaaacgatactattttttctgatttaatgacaatattaggccacagtgacagcgtaatagaagttgcagcaaaaagaatccatgctggctggtttgatataatgaaagaattttatgcccatgatgaaagagttcaatgccaagaaaattcaaacattgataactcagattttataaaaaatagggatgggatacgcattgatctcgctgctatttatattgtactgatggaaataaaatataataacttttacatggagatttaa

SEQ ID NO: 8430 - DNA, 627 bp, Photorhabdus luminescens
atgaatatgcctgacaagaatgagcgttatctaattgatttaattaatggtaagttgaattatatccatattgatagaaacggagattttaacaatacaaacatagactggaaagagactttaattttatctggttcttttaatccactgcataaaggccatgaagaattaaaagaaatcgctacagcgatgacgaaaagaaaaccctattatgaactgtcaatcaagaatgcggtaaaacttaccatttcaaccgatgaaattttcgagaggataagacaatttaaggggaaaggtgatatagttttaagtgacgctaaaatttttactgaaaaatcgcatatttaccagggagcaatttttgtcattggcgctgatttatgccaagaaattaataaccctatttattatggaggtgaggaaggattaaaaaaatctcttatgacaattaagaataatgattgtcgatttctggtggctggacgtttttttaataataaatatcataccgtcgatgacttgatgaatattagaaaggaacatcgatttttatttgaatctattccagaaaatctatttcgcttagatatatcatcaacagaaataagattaatgaacaaagaatag

SEQ ID NO: 8431 - DNA, 1161 bp, Photorhabdus luminescens
atgttatatgcggatgtagcttctacttcatggccaaagtcacaagaagtgaaagacatgataaatatgtatttagacactcttggggtaactccagggcgatctttatcgcaacaatctaaaaaggttacggaactcgttgaagagtgccgacacgaatttatcgaacaaacaaaattaaatggacatgggacagtaatttttaactcaggagcaacatattcactcaacgaatgtctaaaaggtacacttaagccgggtgataatgtcattactacccatttagaacataattcagtccttaggccgataaaccatttaaaagacattggggtaagtagtcaatttatcgatgtgacagatggtgaaattgatatgtcgcatttggcgtttttattaaagaataagaaaactaagttattagtgattcatagttgcgccaatactattggtacattttgtaatatagatgagataggaaaactggcacatttatacggcgcgatggttttagttgatggttcacaatcttttggttcacaagtaatggatttatcgaaaggtaatattgattaccttgtttttagcggacacaaaagtttaggtggagtatcaggtattggcgggtactttattcttgataatggattttctcataatgaattaatccagggtgggacaggtgtattatcaagattaacaacgcaaccaacgggaataccatacaagtatgaatcaggaacacaaaacactattggcatactttcattgctagcgtctatcaggcgtttaaaaaaaattggagtggagaatattcaaaatcaattacaaactttgcgtacaactcttatagatgagctatcacaattaaagaagatcaaattgatctgtaaacatcaagttgggttaccaacaattctttttacagtagaaggttatcatcccggagaagtctcttatatactagaaaacaaatacaatattattacccgtcccggattgcaatgcgcaccgttagcgcataaaaaattcgggacttatcctgatggcgctgttcgggttagccttgatacgacgcatacaacggaagatattttaaaaataaaatctgccttagttaatatcactgaggaaaattatagagaaaatactgataattaa

SEQ ID NO: 8432 - DNA, 657 bp, Photorhabdus luminescens
atgggatgtattttttgtcaccccgaatcttcctttgaaaaagataaaatacttttacaaggagaatatttctatgcgttcgtacctaaaggtcagataattgagggctatataataattgccaccaataaatgtgatactgatttaggggggtgccggtgctttgcagaaatatatgatgacgaagcaataaaagaactgaaacagtttaagaatatagtaaatgatttttatcgtgaatattacaatataagtaatcctctttgttatgaaaatggacgagccggtggttgtatcatcatggacccgaatcaaaagtattgttaccatgcacatttatgttgttttcctaccgagattgatctgcataataaattaaaggatcaatttaaaatgcatacaatagactcattggatgaacttgagatgttcggtgaggctggcccctatatttacgttgaagatagtggtaataagtatatttttacgataggtgaatcagatttcattgagagaggaatgataagaaccgtattggcaaatagtttaaatgtgcctgaaagatccgattggagagataatgaaggaataaaggagatggatgcgacggctaaaaaattcaaatcatatattagtaaccatatggaggttggataa

SEQ ID NO: 8433 - DNA, 879 bp, Photorhabdus luminescens
atggagagtggaataaacctaaactatgaagatataacggaagagaattatatcctaattaataatttttacaagcgtgacataggaagcttggattattttatttggaaaaattttaaagaaaagaaatataatctttccagtgagataaaagcatttttttataaaataaacgatatatgcttgtcaattgttataacaagaaagtgtgaattcagtcttaaaaacagacgagtatccattaatatgcttagcgattttggaatagatgaaagtgtaaaatcaccaactttgataatagaaagtgccaaacaaacacatcgtaatgatgtcgatgcgacggtttgttactcagatgaaagaaaaataaaatgttattcaaaaatttttgagaaatatatatgtggcagagtgaacgtttttgattttatagaaatagtagtagaaggatgtactaaaatcgatgtagacctgagagattttaatgaaataggtaatattaataaaatcaattttttcggcagggaagtaaataacaattggattgcttatgcaaagcagtgtccttgctacagcgatattaaactgttaacggttgggaaagaattagcgatattaggttttgatgataccacggtggaaataatcggtttatcaaacacagctcacggtacaattatatctgtgattgattcttgccttgctattagggcaaaatgcagaataatcttaccaaatcctatttattctgagctacaaagcagactgaataaacatagtattataaataagtttagcatgatgattgcctggcataccgaagaagacttcaatttgtgtcatgaagatatatttatcagtagaatcgacaaacgataa

SEQ ID NO: 8434 - DNA, 204 bp, Photorhabdus luminescens
atgatcacacttgatgaattgcttgaaaaacgcagccctgaaagccgccgtagaattgctaaaaaagttgatgaaatgaaacgggagataaggctttatcagatccgcgaggcccgtgatgttccacaaactgagctggcagttgtgcttgggatcaaacaaccaactgttgctaaaatggaacagtctgataatgacctttaa

SEQ ID NO: 8435 - DNA, 252 bp, Photorhabdus luminescens
ctggcagaaatgatgaaagactctgaatttaaagccgcttacgaagctgaagaacgtaaagaaagattgcaagaaacacttgcagagtggcgtaagtttgctggactgactcgcgcgcaagtcgcggaaagaatgggggttacgccgccaacggtgacgaaaatggaaaataatgtaacaaaagctagtatagaaacattagtgcgctatgcgcaagcctgtggtatccagaacccacaaattacgttgtaa

SEQ ID NO: 8436 - DNA, 324 bp, Photorhabdus luminescens
gtgtttatagttaagtaccatgatgaggccgaacaagaaattaagtctttgccagcaaaagtaggggtaaaacttgtaaggttgattggaaagctagaaaaagatcctcgctcactacgtgaaccggacacaaaacatttgggaaatggtctttacgaaattcgaacaatggggggagatatagcacgcggattatgggtatatcagacaggaaagcaaatatatattctgcaagtttatataaagaaaacacaaaaaatcaacccaagtgagatagctttagcatttcgcagattggaggaaatgaaacatgaagaaatataa

SEQ ID NO: 8437 - DNA, 300 bp, Photorhabdus luminescens
gtgactatcgagacaacaggcacctttgatgcatggttcgatgctttgaatgacaccgacagggccaatatgctagcttcaataatagcacttcgggaaagaggccctatgttacccaggccatacgcagatactgtgaacggttcatgccacagcaacatgaaagaattacgtgtccaaagcaaaggcgacccgctccgagcattctttgcgttcgcccccaagcggagaggaattttgctttgcgctggtaacaaaaagttaaaatgccctctcaaaaggagggcatttattagctag

SEQ ID NO: 8438 - DNA, 4221 bp, Photorhabdus luminescens
gtgaaagacttattgaagtttctgaaagcgcaaactaagaccgaagagtttgatgcgatcaaaattgctctggcctcgccagatatgatccgttcgtggtcatttggtgaagtgaaaaagccggaaacaattaactaccgtacgttcaaacctgagcgtgacggtcttttctgtgcccgtattttcgggccagtaaaggattatgagtgcttgtgtggtaaatacaagcgcttgaaacaccgtggtgtaatttgtgagaagtgtggtgtagaagttacccaaactaaagttcgtcgtgagcgtatgggtcacattgagctggcttctccaactgcacacatctggttcctgaaatcattgccatctcgcatcggtttgttgctggatatgccactgcgtgatattgagcgtgtactgtacttcgaatcctatgtggttgtcgaaggcggtatgaccagcttggaacgcagtcagattctgacggaagagcaatacttggatgcactggaagagtttggtgatgaattcgatgcgaagatgggcgcggaagctatccagtctttgctgaaaaatctcgatctggaaaatgagtgtgaaacgctgcgtgaagagttaaacgaaactaactctgaaacgaaacgtaaaaagctgaccaaacgtattaaactgttggaagcctttattcagtctggtaacaaaccagaatggatggttctgacggttctgccagttctgccaccggacttacgtccattggttccactggatggcggccgttttgccacttcggatctgaacgatctctatcgtcgtgttattaaccgtaacaaccgtttgaagcgcctgttagatctggctgcgccggatatcatcgttcgtaacgaaaaacgtatgttgcaggaagcggtcgatgctttgctggataacggtcgtcgcggtcgtgcaattaccggttctaacaaacgtccactgaaatccctggctgatatgatcaagggtaaacaaggtcgtttccgtcagaacttgttgggtaaacgtgttgactattctggtcgttctgtaatcactgtaggtccttacctgcgtttgcatcagtgtggtctgcctaaaaagatggcactggagctgtttaagccattcatctacggcaagctagaactgcgtggtttagcgacgacgattaaagccgctaaaaagatggttgagcgtgaagaggcggtggtatgggatatcctggatgaagtcattcgtgaacatccggttctgctgaaccgtgcgccgacacttcaccgtttgggtattcaggcattcgaaccggttctgattgaaggtaaagcgattcagttgcacccactggtgtgtgcggcatataacgccgacttcgacggtgaccaaatggctgttcacgtaccgttgacactggaagcccagttagaagcgcgtgcattgatgatgtctaccaacaacatcctgtctccagcgagtggtgagccaatcatcgttccatctcaggacgttgttctgggtctgtattacatgacccgcgactgtgttaacgcgaaaggcgaaggcatggtattgaccgggcctaaagaagcagaacgcgtatatcgcgcaggactggcttctctgcatgcccgcgttaaagtgcgtatcactgaagaagtgaaagatggcgaaggcaatatcacaactaacaccggtttggttgatacgactattggtcgtgccattctgtggatgattgtaccaagaggtctgccttactcgttggttaaccaaccactgggtaaaaaagccatctctaggatgctgaacacctgttaccgtgtgatgggcttgaagccaacggttattttcgctgaccagatcatgtataccggctttgcctacgctgcacgttcaggtgcatctgttggtatcgatgacatggttatcccagagaaaaaggccgggatcattgccgaagcagaagcagaagttgctgaaattcaggaacagttccaatctggtctggttacagccggtgaacgttataacaaggttatcgatatctgggctgcggcaaacgagcgtgttgctaaggcaatgatggaaaacttgtcgactgaaacagtcactaatcgtgatggtgaagaagagcaacaagtttccttcaacagcatctttatgatggctgactccggtgcgcgtggttctgccgctcagatccgtcagttggcgggtatgcgtggcttgatggctaagccagacggctccatcatcgaaaccccaattacggcgaacttccgtgaaggtttgaacgtactccagtacttcatctcaactcacggtgctcgtaaaggtttggcggataccgcactgaaaacagcgaactccggttacctgactcgtcgtctggttgacgtggcgcaagacttggttgtgacagaagatgactgtggtacgcacgacggtattctgatgacgccggttattgaaggtggtgatgttaaagagccactgcgtgagcgtgtattgggtcgtgtgacggcggaagatgttctgaaaccaggtactgctgatattctggtgccgcgtaatacattgctgaacgagaaatggtgtgatctgttagaagagagctccgttgacagcattaaagtacgttctgttgtaagttgcgaaactgacttcggtgtttgtgcaaactgctatggtcgtgaccttgctcgcggacacatcatcaataaaggtgaggcggttggtgttattgcggctcagtccatcggtgagccgggtacacagttgacgatgcgtacgttccacatcggtggtgcggcatctcgtgcagcagcagaatccagtattcaggtacgtaacaaaggtagcttgaagctatttaacgctaagtccgtgacgaactccgcaggcaagctggtgattacttctcgtaacactgaattgtgtctgatcgacgaatttggccgtactaaagaaagctataaagtgccttacggtgcagtactgggtaaaggtgatggcgaaaccgttaacggcggtgaaaccgttgctaactgggatccgcacaccatgccagtggtcagtgaagtatctggtatcatccgtttcgctgacatgatagatggccagaccattacccgccagactgacgaattgacaggtctatcttcattggttgttctcgatagtgcagaacgtaccggtagtggtaaagatctgcgtccggcactgaaaatcgttgatgccaaaggtgacgatgtattgattccaggtactgatatgcctgctcaatatttcctgccgggtaaagcgattgttcagttagacgatggcgtaagcatctctgcgggtgatactttagcgcgtattcctcaggagtccggcggtacgaaagatattaccggtggtttgccacgtgttgctgacttgttcgaagcacgtcgtccgaaagagcctgctatcctggctgaagtcagcggtattgtctcctttggtaaagagaccaagggcaaacgccgtttggttatctccccattagatggtggcgatgcttacgaagagatgatccctaaatggcgtcagctcaacgtgttcgagggtgaagtggttgaacgtggtgacgtgatctctgatggtccagagtctccacacgacatcttgcgcctgcgtggtgttcatgcggttacccgttacatcaccaacgaagttcaggaagtttaccgcctgcaaggggttaagattaacgataaacacattgaggttatcgttcgtcagatgctgcgtaaagcgaccattgaaagtgcaggtagctccgagttcttggaaggcgaacaggttgaatatgcccgcgttaaagtggcaaaccgtaagctggaacaagaaggtaaagtggctgcaacttatggccgtgacctgttgggtatcaccaaagcgtctctggcgactgaatccttcatctctgcggcatcgttccaggaaacgacccgcgtactgactgaggctgcggttgcgggtaaacgtgatgaactgcgtggcttgaaagaaaacgtcatcgttggtcgtctgatccctgctggtaccggttatgcttaccatcaggatcgcatacgtcgtcgccagttgaatgagcctgccgaggcaccacaagtgagtgtcgatgaggctactgcgaacttggcagaactgttgaatgccggttttggtggtgataagaagtaa

SEQ ID NO: 8439 - DNA, 4029 bp, Photorhabdus luminescens
atggtttactcctataccgagaaaaaacgtattcgtaaggattttggtaagcgtccgcaagtgttggacgtaccttatctcctttctatccaacttgactcgttccagaagtttatcgagcaagatccagaaggccagaatggtttagaagcggcattccgttctgtattcccaatccagagctacagtggcagttcggagctgcaatacgttagctaccgtcttggtgagccagtgtttgatgttaaagagtgccagattcgtggtgtaacttattctgcacctctgcgcgttaagctgcgtctggttatctatgaacgtgaagcaccggaaggcacggtcaaagatatcaaagagcaagaagtctacatgggtgaaattccgctcatgactgacaacggtacttttgttatcaatggtactgagcgggttattgtctcccagttgcatcgtagtcctggtgtattctttgacagcgataagggtaaaactcactcatccggtaaggtactgtataacgcacgtattattccttaccgtggttcttggttagatttcgaattcgatccaaaagataatctgtttgtgcgcattgaccgccgtcgtaaattgccggcaacgattattctgcgtgcaatgaattacagcactgaagagattttgaacctgttcttcagtaaaacgattttcgaaattcgtgacaacagactgcaaatgacgctggtaccagaacgtttgcgtggtgaaactgcttcttttgatattgaagcaaacggcaaggtttatgttgaaaaaggccgtcgtattaccgcacgtcatatccgccagttagaaaaagatgaagtgaaccgtattgaggttcctgttgaatacattgcgggtaaagttgttgcaagagactacattgatgtcaacacaggtgaaattatctgtgctgctaacatggagctctctttagatctgttggcacgtttgagccaatctggtcataaatctatcgaaacattgttcaccaacgatttagatcacggcgcatatatttccgagacacttcgtgttgatccaaccaatgaccgtttgagtgctttggttgagatttatcgcatgatgcgtcctggtgagccaccaacccgtgaagcggcagaaaatctgtttgaaaatctgttcttctcagaagatcgttatgatctttctgcggttggtcgtatgaaattcaaccgctcattgagccgtgaagaagtcgaaggatctggtattctgagtaaagatgacatcattgatgtcatgaaaaaactcattgatatccgtaatggtaaaggtgaagtcgacgatatcgaccacttaggtaaccgtcgtatccgttctgttggtgagatggcagaaaaccagttccgtgttggtcttgtacgcgttgagcgtgcagtgaaagagcgtctgtctctgggtgatctggatacactgatgcctcaggatatgatcaacgctaagccgatttcagccgcagtgaaagaattctttggttccagccagctgtctcagtttatggaccaaaacaacccactttctgaaatcactcacaaacgccgtatctctgcgttgggtccaggtggtttgacccgtgagcgtgcgggcttcgaagtgcgtgacgtacatccaacgcactatggtcgcgtatgtccaatcgaaaccccggaaggtccgaacatcggtctgattaactcattgtctgtttatgcgcagactaacgagtatggtttccttgaaaccccatatcgtctggttcgtgatggtgttgttactgatgaaattcactatctgtctgcgattgaagaaggtaacttcgttatcgcacaggcaaacaccgtattagatgacgaaggccacttcgttgaagatctgataacttgccgtaattatggtgaatccagcttatttaaccgtgagcaggttgaatatatggacgtttccacccagcaggtggtttccgttggtgcttccttgatcccattcttggaacacgatgacgcaaaccgcgcattgatgggtgcaaacatgcaacgtcaggctgttcctactctgcgtgctgataagccgttggtcggaacaggtatggaacgtgcagtagccgttgactcaggtgtaacttctgttgctaaacgcggtggtgtggttcaatacgttgatgcatctcgtatcgttatcaaagtaaatgaagacgaaatgtatccgggtgaagcaggtattgatatttataacctgactaaatatacccgttctaaccagaacacctgtattaaccagatgccatgtgtctctctgggcgaaccggtggaacgtggtgacgtactggctgatggtccatctactgacttgggtgaactggctctgggccagaacatgcgcgtagcgttcatgccgtggaatggttataacttcgaggactccatcttagtttctgagcgtgtcgtccaggaagatcgctttacgaccattcatatccaggaactggcttgcgtatctcgtgataccaaattagggcctgaagagatcacggctgacatccctaacgtaggtgaggctgcactctccaagctggatgaatccggtattgtttacatcggtgcggaagtaaccggcggtgacattctggttggtaaagtgacacctaaaggtgaaactcagctgacgccagaagaaaaactgctgcgtgctatcttcggtgagaaagcgtctgatgttaaagactcttctctgcgcgtaccaaatggcgtatccggtacggttatcgacgtacaggtatttacccgtgatggtgtagaaaaagataaacgtgccttggaaattgaagagatgcagctgcgtcaggctaagaaggacctgacagaagagttgcaaatctttgaagctggcctgtttgcacgtatccgttctgttttgattgcaggcggcatcgaagctgagaaactggataaactgcctcgtgagcgttggttagaactgggtctggctgatgaagagaaacagaatcagttggaacagttggctgaacagtatgacgaactcaaagctgagttcgagaaaaaactggatgctaaacgccgtaagatcacacagggtgatgatctggcaccgggtgtgctgaaaatcgtcaaagtttatctggcggttaaacgtcagattcagcctggtgataagatggcaggtcgccacggtaacaagggtgttatctccaagatcaacccgatcgaagatatgccttacgatgaaaacggcactccggtagatatcgtactgaacccactgggcgtaccatcacgtatgaacattggtcagatcttggaaacgcatctgggcatggctgcgaaaggtattggcgacaagatcaatgcgatgctgaaacagcagcaggaagttgccaaactgcgtgaatttatccagaaagcttataacctgggtgatgaaacccgtcagaaagttgatctgagcactttctctgatgaagaagttatgcgtttggcagaaaacctgaaaaaaggcatgccaattgcgacaccagtgtttgatggtgcgaaagagaaagaaataaaagagctgctgaaattgggtgacttgccaacttctggtcaaattaccctgtttgatggtcgtaccggtgagcaatttgagcgtcaggttaccgttggctacatgtatatgctgaagctgaaccacttggtggatgacaaaatgcacgctcgttcaacgggttcgtacagtctggttactcagcaaccgttgggtggtaaggcgcagttcggtggtcaacgcttcggtgagatggaagtgtgggcattggaagcatatggtgccgcgtacaccttgcaggaaatgctcaccgtcaagtccgacgatgttaacggccgtaccaagatgtataaaaacatcgtggatggcaaccaccagatggagccaggtatgccggaatccttcaacgtattgttgaaagagatccgctctctgggtatcaacatcgagctggaaggcgaataa

SEQ ID NO: 8440 - DNA, 372 bp, Photorhabdus luminescens
atgtctatcaataaagaacaaattctggacgcagttgcaacaatgtccgtcatggatgttgttgaactgatcactgcaatggaagacaaattcggcgtttctgcggcggcggcggtagctgttgctgctggcggtgctgctgaagctgttgaagaacaaactgaatttgacgttgttctgtctgctattggcggtaacaaagttgctgttatcaaagcagtacgtggtgcaactggtctgggtctgaaagaagcaaaagatctggttgagagcgctccaaacgctacactgaaagaaggcatcagcaaagatgacgctgaagcactgaaaaaatctctggaagaagcaggcgcttctgttgagattaagtaa

SEQ ID NO: 8441 - DNA, 507 bp, Photorhabdus luminescens
atggcactaaatcttcaagacaaacaagcgattgttgctgaagtcagcgaagttgccaaaggcgcgctgtctgcggttgttgcggattcccgtggcgttactgtagataaaatgactgaactgcgtaaagcaggtcgcgaagctggcgtttacattcgtgttgttcgtaacacgctgatccgtcgtgctgttgaaggtactgcctatgagtgcctgaaagaagcgtttgttggtccaaccttgattgctttttctaatgaacacccgggcgcagctgctcgtctgttcaaagagttcgcgaaagcgaatccagcattcgagattaaagcagcagcctttgaaggtgagtttattcctgcggccaatattgaccgtttggcaacactcccgacttacgaagaagcaatcgcacgcctgatgtcaaccatgaaagaagccgttgcaggcaaactggttcgtactctggctgcgttacgcgagttacgcgagcagaaagaagtagcttaa

SEQ ID NO: 8442 - DNA, 702 bp, Photorhabdus luminescens
atggctaaactgaccaagcgcatgcgcacaatccgcgaaaaagtggatgcaactaagcagtatgacattaacgaagccgttgttctgctgaaagagctggctaccgctaaattcgtagaaagcgttgacgttgctgttaacctcggcatcgatgctcgtaaatctgaccagaatgtgcgcggtgcaacggtactgcctcatggtactggccgttccgttcgcgtagctgtatttacccaaggcgcaaatgcagaagctgctaaagcagcgggcgctgaactggtaggtatggaagatctggctgaactggttaaaaaaggtgaaatggactttgacgttgttattgcttctccagatgcaatgcgcgttgttggccaattaggtcaaatcctaggtcctcgtggtttgatgccaaaccctaaagtgggtactgtaactcctaacgttgctgaagctgttcagaatgctaaagcgggtcaggttcgttaccgtaacgataaaaacggcattattcacaccaccattggtaaagttgacttcgacgctgacaaattgaaagaaaacctggaagctctgctggttgcgctgaaaaaaggcaagccatcttctgctaagggtatttatattaagaaagttagcctgtctactaccatgggcgcaggtgttgcgattgaccagtctggtctgaatgcttcagcttaa

SEQ ID NO: 8443 - DNA, 429 bp, Photorhabdus luminescens
atggctaagaaagtacaagcctatgtcaagttgcaggttgcagctggtatggctaatccaagccctccagtaggtcctgctctgggtcagcagggtgttaacatcatggaattctgtaaggcgttcaatgctaaaactgatagcattgaaaaaggtctgccaattcctgttgtgatcactgtttattctgatcgttccttcactttcgttactaaaaccccaccagcggctgttctgctgaagaaagcggcgggcattaaatcgggttccggcaaaccgaacaaagacaaagttggtaaagtgaccagcgcacagattcgtgaaattgctgaaactaaagctgcggatatgaccggtgctagcgttgacgcaatgatgcgttcaattgaaggtactgctcgttccatgggcctggtagtggagggttaa

SEQ ID NO: 8444 - DNA, 546 bp, Photorhabdus luminescens
atgtcagattccccaaaaaaacgttggtatgttatacaggcattttccgggtttgaaggtcgtgttgcacaatctttacgtgaacatatcaaattacatgatatggaagattcttttggcgaagtgatggtgccaacagaggaagttgttgagattcgtagcggccagcgtcgcaaaagtgaacgtaaattcttccctgggtatgtgctggtacaaatgatcatgaacgatgcaacatggcatctcgttcgcagcgtaccacgcgtcatgggttttatcggtggtacatctgaccgtccggcaccaatcagtgataaagaagttgatgcgattatgaatcgccttcagcaggttggtgataaaccgcggccaaaaacattgttcgaaccaggcgaaatggttcgtgtcagcgatggtccattcgcagacttcaatggtgttgtggaagaagtcgattacgagaagagccgcctgaaagtttcagtttctatctttggtcgtgcgacaccggttgagctggatttcagccaggtagagaaagcgtaa

SEQ ID NO: 8445 - DNA, 384 bp, Photorhabdus luminescens
atgagtacgaatagcgatgctcaagaaagcaggcgtagtcttgaagtaatgaaatggctattagtggcagccttattaacggttgctatcgttggaaactacctttatcgagagcatagccttcctctacgcgcgatgacggttgttgttattgttgctcttgcgggagcggctgcgctctggactgcaaaaggtaaaaccacactggctttcgctcgtgaagcccgcattgaaatgcgcaaagtcatttggccaactcgccaggaagcgctgcacacgactttgattgttgcggccgtgactgcattgatgtctttgatcctctggggtcttgacggtatcctggtgcgtttagtttcatttattacaggcctgaggttctaa

SEQ ID NO: 8446 - DNA, 1185 bp, Photorhabdus luminescens
gtgtctaaagaaaaatttgaacgtaaaaaaccgcacgttaacgttggtactatcggccacgttgaccatggtaaaactaccctgactgctgccatcactactgtactggctaaaaccttcggtggtaacgctcgcgcattcgaccagattgataacgcgccagaagaaaaagcgcgtggtatcaccatctctacttctcacgtagaatatgatacgccaagccgtcactatgcgcacgttgactgcccaggccacgccgactacgtgaaaaacatgatcaccggtgcggctcagatggacggcgcaatcctggtagttgccgcgactgacggtccaatgccacagacgcgtgagcacatcctgttaggccgtcaggtaggcgttccttacatcatcgtgttcctgaacaaatgtgacatggtagacgacgaagagctgctggaactggttgagatggaagtgcgtgagctgctgtctcagtacgatttcccaggcgacgacacgccagtcatccgtggttctgctctgaaagcgctggaaggtgatgcagagtgggaagccaaaatcatcgaactggcagaggccctggatagctacattccagagccagagcgtgctattgaccagccattcctgctgccaatcgaagacgtattctctatttcaggccgtggtactgtagttaccggtcgtgtagagcgcggtatcgttaaagtgggtgaagaagttgaaatcgtgggtatcaaagacacgactaaaaccacttgtactggcgtagaaatgttccgcaaactgctggacgaaggccgtgcaggtgagaacgtcggtgttctgctgcgtggtaccaagcgtgacgaaatcgaacgtggtcaggtactggcgaaaccgggttcaatcaagccacacaccactttcgaatcagaagtttatattctgagcaaagacgaaggtggccgtcatacgccattcttcaaaggctaccgtccacagttctacttccgtacaactgacgtgaccggtaccattgaactgccagaaggcgtggaaatggtgatgccaggtgataacattcagatgaaagttaccctgattgccccaatcgcaatggaccagggtctgcgttttgctatccgtgaaggtggccgtacagtaggtgctggtgttgttgctaaagttatcgcataa

SEQ ID NO: 8447 - DNA, 2109 bp, Photorhabdus luminescens
atggctcgtacaacacccattgcacgctaccgtaacatcggtatcagtgcacacatcgacgccggtaaaaccaccactaccgaacgtattctgttctacactggtgtaaaccataagatcggtgaagttcatgatggcgctgctactatggactggatggaacaggagcaggagcgtggtattaccatcacctccgcagcaacaactgctttctggtcaggtatggctaagcagtttgatgcgcatcgtatcaacatcatcgacaccccagggcacgttgacttcaccatcgaagtagaacgttccatgcgtgttcttgatggtgccgtaatggtttattgtgcggttggtggtgttcagccacagtccgaaaccgtatggcgtcaagcaaataaatatagagttccacgtatcgcgttcgttaacaaaatggaccgtatgggagcgaatttcttacgcgttgttgagcagctcaaaactcgcttggcggcaaacccagtacctctgcaattagccattggtgcagaagatgcgttcaccggtgttgttgacttggtgaaaatgaaagccatcaactggaacgatgaagatcagggaaccaccttcacttacgaagatatcccagctgatatgcaggatctggcggaagaatggcgtagcaatttgattgaagccgctgcggaagcatcagaagaactgatggaaaaataccttggcggtgaagaactgactgaagaagagatcaaagctggtctgcgtcatcgtgttctgactaacgaaatcatcctggttacctgtggttctgcatttaagaacaaaggtgttcaggcaatgctggatgcagttattgagtacctgccagcaccaacggatgttgaatccattaaaggtattctgccagacggtaaagatacgtcagcagagcgtcattctgacgacaacgaaccattttcggcactggcgtttaaaatcgctactgacccgttcgttggtaacttgaccttcttccgtgtctactctggtgtggttaactccggtgataccgttcttaacccagtgaaagacagaaaagagcgttttggccgtatcgttcagatgcatgctaataaacgtgaagaaattaaagaagttcgtgcaggtgacatcgctgctgcgattggcctgaaagatgtgactaccggtgatacgctgtgtgatatcaacgcaccaattatcctggagcgtatggaattcccagagccagtcatctctgttgctatcgagccaaaaactaaagctgaccaggaaaaaatgggtatcgctttaggtcgtctggctcaagaagacccatcattccgcgtgtctaccgatgaagagtctggtcagactattattgccggtatgggtgagcttcacttggatgttctggttgaccgtatgcgtcgtgagttcaaagttgaagcgaacgtcggtaagcctcaggttgcttaccgtgaaaccatccgttctactgttgaacaagaaggtaaatttgttcgtcagtctggtggtcgtggtcagtttggtcacgtatggctgcgtattgagccaatggaaccaggtggcgtaggctatgaatttgccaacgaaatcgttggtggtgttgttcctaaagaatatatcccagcagtagataagggtattcaggaacaaatgaaaaatggtgttctggccggttacccgattgttgacgttaaagtggcactgttcgatggttcttaccacgaagtggactcttctgaaatggcgttcaaaatcgcaggttctatgggcttcaaagaaggctttatgaaggcgaaaccagctctgctggagcctatcatgaaagttgaagttgaaacaccagaagattacatgggtgacgttatcggtgacctaaaccgccgccgtggtatgattgatggtatggaagatatgactaccggtaaaatcgtacgtgctcaggtaccattatctgaaatgtttggttatgctactgacctgcgttctcagacccaaggtcgtgcttcttactccatggagttcctgaagtacaatgaagcgccgagcaacgtcgctcaggctattatcgaagctcgtaaagctaaataa

SEQ ID NO: 8448 - DNA, 471 bp, Photorhabdus luminescens
atgccacgtcgtcgtgtaattggtcagcgtaaaattttgccagatccaaagtttggatctgaattactggccaaattcgtcaatatcctgatggtagatggtaaaaaatctactgcggaagcaattgtatatagtgcgcttgagaccctggctcagcgttctggtaaagagcacctggaagcatttgaacttgcattagataatgtgcgtccaaccgtggaagttaagtcccgccgtgttggtggttctacttatcaggtaccagttgaagttcgtccggttcgtcgcaatgcgttagcaatgcgttggatcgttgaagctgctcgtaaacgcggtgataaatctatggccctgcgcctggcgaacgaattatctgatgcagccgaaaataaaggcactgctgttaagaaacgtgaagacgttcaccgtatggcagaagctaacaaggcgttcgcacactaccgttggtaa

SEQ ID NO: 8449 - DNA, 375 bp, Photorhabdus luminescens
atggcaactattaaccagctggtgcgcaaaccccgtagcatgaaggttgcaaaaagcaacgttcctgctctggaagcttgcccgcagaagcgtggcgtatgtactcgcgtatataccaccacccctaaaaaaccaaactctgcactgcgtaaagtatgtcgtgtgcgtttgactaacggttacgaagtttcttcttacatcggtggtgaaggccacaacttgcaagaacactccgtaattctgatccgtggcggtcgtgttaaagacttgccaggtgtgcgttaccacactgttcgcggtgcactggactgttccggtgttaaagaccgtaaacaaggtcgttctaagtacggtgtgaagaagccaaaagcttaa

SEQ ID NO: 8450 - DNA, 288 bp, Photorhabdus luminescens
atgctatatactgttggccgatcgccttatcaatgtgatttcaatgtgatatccaagctgcttgcccgtggtgatgacatcttgtttattcaggatggtgtgctggcaggtattgagggtaattgctatctgtcggcgttgatcagttgtggtgctgccttgtatgcactgaaagaagatattgaggcgcggggattggacgatcaggtttcagacaaagtgcaagtgatcgactatactgactttgttaacctgacggtaaaacaccatcaacaattcgcttggtag

SEQ ID NO: 8451 - DNA, 360 bp, Photorhabdus luminescens
atgaaaaaaattgcttttatctttactaaaacaccccatggtgatgcagggggtcgagaaggtttagatgcattgctggccacttcggcattaacagaaaaggtaggggtattttttatttctgacggtgtacttcaactactacccaatcagcagcctgacagaattctcgccagaaactatatcgctacttttaaggtgttgcctttgtacgatattgaagaatgttatttgtgccaggaagatcttgttatgcgtggattaagctcagtcaatcattttgttctggatgcgaaagtgatacccgcagaaacgatccgtgagaaactggttgactatgatgttgtgctgacattctga

SEQ ID NO: 8452 - DNA, 396 bp, Photorhabdus luminescens
atgtcttcgctgtcttattgtctgctggttacggggcccgcatatggtacccaacaagccagcagtgcttaccaattcgcgcaagccttgattacgatggggcataaacttaataccgtatttttttatcgggaaggggtttataacggcaatcaattgacctcaccagccagtgatgagtttgatttggttagcgcatggcagatgatggcaacagagcatcggtttagcatgcacatttgtattgccgctgcccttcgccgtggtgttattgatgctcagcaggcgagtgagttgaatttaccggtagcaaacctcgcggaagggtttgaattaagtggattgggcacactagctgaagctatgttgatttgcgaccgtgtggtgcaattctaa

SEQ ID NO: 8453 - DNA, 735 bp, Photorhabdus luminescens
atggtgtatttaatgtctaacccgttattatctggtgatatcagtgatgtcgatttactggaaaaccaaccgtttactgaaacggatcacgaaattttaaagtcttatgaagccgcagttgatggcttggctatgctaattggtgggcattgcgagattgtccttcattcattggaagatcttaaatgttcagctgtcagaatagccaacggagaacatacaggtcgtaagataggttcacctatcactgatcttgcattgcgtatgttacatgacattacagacgaagactgtagtgcatccaaagcctattttacccgagcgaaaagcggttcattgatgaagtcagtcacaattgcgatccgcaaccggaaccgccgagtgatcggcctcttgtgcattaatatgaatctcgatgtccctttctctgaaattattcagacatttattccagaggaaacacatgatgtcgctccaaatgtaaattttgcctcatctgtggatgatttggttgcgcaaacgcttgaatatactatcgaagaagtcaatattgatcgcagtgtatccaataatgccaagaacagacaggtggttctaaatctctatgagaaaggcatttttgatattaaagatgcaatcaatcaggttgctgagcgtttaaatatttctaagcatactgtttacctctatattcgccagtttaaaaatggtgaatgtttagggcctgagcggtaa

SEQ ID NO: 8454 - DNA, 204 bp, Photorhabdus luminescens
gtgaaaattcaattattgcagattaacagagatctcaatcaaagatctttgcatccacatgaaatattgacgttaaaaccacatgacattatcgtcaagccattgctactcagacatttgggctctatcacagctttcagtaacaaaaaaccgttgacagaatctctaccaacggttttatccgtattgatcaaagatatttag

SEQ ID NO: 8455 - DNA, 765 bp, Photorhabdus luminescens
atgaaatcattgtttaaagttaccctgcttgctaccacattagcgatggctttcagcgcccctcaggtgttggcggctaaagcagatagccagagtagtacagaattgaacagcgcatttaaaacagaagatcagcaaaatgcttatgctctgggcgcatctttagggcgttatatgcaaaacaccctgaaagaacagaaatctctgggtatcccattggataaagatcaattgttatcgggtgtgcaggatgctttcaataataagagcaaactgactgacagcgaaattgaaaatacgctgcgtgcgtttgaaggtaaagtgaagtctgctgctgaagctaagatggaaaaagaagccagcgagaatgaagctaaaggcgttaaatatcgtgaagaatttgctaaggaaaagggtgtcgttaagagtaaaaccggccttttgtataaaatagagaaggaaggcagtggtaagaagcctgtggcaagcgacacggtagttgtgaactaccgggggacattgattgacggtaaagagttcgatagttcctataagcgtaatgaacccctttctattcgcctggatagcgttatcccaggttggacagaaggtttacagaatgtgaaaaaaggcggaaaaattaaactggttattccaccagagctggcctatggtaaagcggatctgccgggtattcctgcaaattcgacactagtatttgatattgagctgctggatgttaaagcggagaccaaagctaagtaa

SEQ ID NO: 8456 - DNA, 219 bp, Photorhabdus luminescens
atggatctgtcaaaatttgagcaacggcttgagtgtttggaaagtcgaatggcctttcaagaaagaactatcgaagaattaaatcaggtagtgactgaacagcaaatggagatcactaaattaagagagcatttgcggttgatgacagaacgattgaaagccactcaaccctcaatgatcgcttcacaatctgaggaaacacctccgcctcattactag

SEQ ID NO: 8457 - DNA, 573 bp, Photorhabdus luminescens
atgaaagtagcaaaagacttggtagtcagcctggcttatcaagtaagaacggaagatggtgttttagttgatgagtcaccggcgagtgcgccgttggactatctgcatggccgtggttcactgatcagcggtttggaaaaggcgctagaaggccgtgaggcgggtgagagttttgatgtcagcgtacaggctgatgatgcctatggtcagtatgatgacaatctggttcagcgtgtgccaaaagatgtctttgttggtgttgatgaactggaagttggcatgcgtttcctggctgataccgatatggggccagtacccgtagaaattacagcagttgaaggtgagcatgttgtggttgatggtaaccatatgctggcgggtcagaatctgaaattcaatgttgaagtcattgccattcgtgaagcgaccgaagaagagctggctcatggccatgttcatggtgctcatggtcacgaacatggtgaggggtgctgtggtggtcacggcgatgacgacagtcatcatcaccataatgaaggacacggatgctgcggtggcggtggttgccactga

SEQ ID NO: 8458 - DNA, 204 bp, Photorhabdus luminescens
atgtcagtaagccgtaagagatttattgccggtgctgtctgtccagaatgtcactctcaggacacgctggcaatgtggcaagaagatcaggtggatgtggtggaatgtgtccattgtggtcaccaacaacgccagactgatgagaaagtgagctctcatgtcagaaagcaggagcaggttattggtatttttaccccacagtaa

SEQ ID NO: 8459 - DNA, 1926 bp, Photorhabdus luminescens
atgattgttttctcttcattacaaattcgtcgcggaactcgtgttctgctggacaatgccagcgccactatcaatcccgggcagaaagttggtctggtagggaaaaatggctgtggtaaatctaccctacttgcactattaaaaaatgagcttcaggctgaaacaggcacattcacttttcccagtaactgggcactttcttgggtgaatcaggaaacgccagcactggaaatacccgctctggaatatgtcattgatggtgatcgtgaattccgtcaactggaacaacaactgcggatagccaatgaaaaaaatgaaggtaatctgattgctcatctgcatggtcaattagacacgattcaagcctggacgatccgttcaagagcatcaagtctactgcacggtttaggtttctctcaagagcaacttgatcaacctgtacgtgcattttccggcggatggcgcatgcgcctcaatctggctcaggcactactctgccgttctgatttactgttgcttgatgaaccgactaaccatcttgatctggatgcggttatctggttggaaaaatggctgaaaagctaccccggaacattaatccttatctcccatgatcgggattttcttgacccgattgccgataagatcctccatatagaacaacaatccctatttgagtacagtggcaactactcatctttcgaacgccagcgcgccaccaaactggcgcaacaacaggccctttataaaagtcagcaagagaaagttgcccatctgcaaagttatattgaccgtttccgtgccaaggccagcaaagccaaacaagctcagagccgtatcaagatgttagagcggatggaattaatcgctcctgcccatgttgataacccatttcatttcagtttccgtaaaccggaaagtctgccaaacccactcctgaaaatggaaaaagtcagcgcaggctatggcgaacggaccgttttaaattccatcaaactgaatctggttcccggctcccgcattggcctgcttggccgtaatggtgcgggtaaatccacgttaattaaactactggctggcgaactgcaatctcagagtggaacggtagaattagctaaagggattaaactgggatatttcgcccagcatcaactggaatatttacgtgctgatgaatcaccattacagcatttagtccgcattgcgcaacaggaaacagaacaacaacttagagattatctgggcggctttggtttcaaaggtgatcaagtgactgacccaagtgggcgtttttccgggggagaaaaagcacgtttggttttggcattgatggtctggcaacgccctaacctcctgttactcgatgaaccaacgaaccacctcgacctggatatgcgtcaggcactgacagaagctttgatcgactttgacggtgcattggttgtggtttctcacgaccgacatctattacgttcaacaaccgatgagttgtatctggttcatgatggccgggtagaatcattcaacggcgatttagaagattatcaacaatggctgatagatcaacaacgtcaacaaaatcagcaaatacgtgaaaacaacgataaggaaaaagagacatccagccaaagtgctcaggaaagaaaagatcaaaaacggcgtcaagctgacttccgtaaccaaacgcaacccttgcgtaagcaactggctaattttgaaaaacagatggagaaactgggtggcgaattggttgcactcgaaaatcaacttttagacagcgctatctatgatagcagccgtaaagtcgaattaactgaatatctgcaaaaacaaaatcagaccaaattaaaattggaagaaattgaattagcatggatggaaattcaagaacagcttgaaaaaataacacaagagtttgaaggataa

SEQ ID NO: 8460 - DNA, 573 bp, Photorhabdus luminescens
atgaagaaacgtaagttcttaaccagacatgaaattgatgcgattttagaaaaagcacgtcaggggcgtcatgctgagcgggattattgcatgctactcatgtgttttattcatggatttagagttagtgagctatgtaatctgacactatccgatcttgatcttagctcggaaattattcacgtaaggcgattaaaaggaggactatcaacaacacatccattggtgcctgaagaacttaatgcgttaaatcaatggattaatatccgtaagagctggagagaatcagacacatcgtgggtttttttatcacaaaaatcaggtgcgatttcacgctatcaggtttatagtttgttaaaacgttatggcaggcaagcattagtcgatatttcacctcatccacatatgttaagacatgcctgcggctatgctcttgctgatttgggaagagatacacgtcttattcaggattatctcggtcaccgcaatatatcccacactgttatttacacagcaagcaatgtaaaacggttctccaatatatgggaaattccttcaaaaggattcagttaa

SEQ ID NO: 8461 - DNA, 567 bp, Photorhabdus luminescens
atgaaattgaataaattggttatggttctcggattgggtgcaaccctagcagcaggttctgtcaatgcggcccccgagccttcccccaaaactaaaagtactaaccaaggccacggaaaagtgacttttgaaggttctattatcgatgcgccttgttcaatccaccccggtgatgacgatcagactgtgaaactggggcagatttccaacaaagcactggcaggaggcggtaagtccaccccggttccttttaatatccgtttactagactgtgatgctaacggcttggaaaagaggactgtaacggcgactttctctgggacaccctctgctgtgaataaggacctactggcaattgttggttcggcctctggtgcggctattggtatcaccaacgataacgccaagctgatcaaactaggacaaccgagctcacccacaatcatcaccgatgattccgactctaccatgcgcttcgctgctttcttacaaggtgacggggcttctacgactatcgttcctggtgatttcaccgctgtggctaacttcactctgacttaccaataa

SEQ ID NO: 8462 - DNA, 597 bp, Photorhabdus luminescens
ttgccggtaaaccaaattttggagagcgagatgactcttcttagccgtccaacctgttctaagatgttaccttccctgctgacgttgttagtgctaaccagtctgatattgtcatttatggcaaccgctatcaaccaagagcacggccgcgtcaacatgcaaggctccatcattgatacaccctgtacaattgctttgggcaatcaagatcagaccatcgacatatcatctattttggtcggacaaattatccgcagtggtcacgggccggtacggcttttaagtatacagttgattaattgcctgttggctcccgtattactgaatcgcctgagcaggtcatactttcaagtgacttttgatggtgcggctgctcgtaacgacctatttagcataaatggcgaggcgagtggtgtgggattacagatatcggacagtacaggagcggtagtcgcgccgggcaaacccatgcctgtagaggatctgcaaataggctcaatgcggctggattatactttacgtctggtaacagctcaccaagtgttacgcgccgaggtcctccacaccatgatacgtttcaaactggattatttctga

SEQ ID NO: 8463 - DNA, 2589 bp, Photorhabdus luminescens
atgccatcgttactttgtggagcgagggatagctcggtggcactgtgtatcttgttggctctttgtcgcgtgcaggtggtcaaggctgccgatagggtggaattcaacacggatgttcttgatgtcaaggatcgggcgcgtattgacttaagtcagttttcccatgctggctacattatgcaaggtagctaccagatggtattacgcttgaataaaaacgaattgcccgagcagacagtgcagttcattgctcctgatcatgatccaaaaggcagtgaagcgtgcctgacgccgaagatggttgatcaactggggcttaaagcggatgcaatccgtcagcttacttggtggtataacggccaatgcctagaaatagcttctctgaaaggtatggaagttcgaggtgacttgggcgctggggcactatacatcagcatgccgcaggcttacttagaatataccgtagaaaactgggatccgccgtcacgttgggataatgggatctccggtatgttgtttgactacagcgtcaatgcacaggtgacaaatcagtcaggcgcaggcagccaagcgcaatctttaagtggtaacggaacagctggggccaacttgggaccttggcgtctgcgggctgattggcaagtgcagtacagccatactacgggacaggtaggaagtgcccagcaaagctgggagtggagccgctattacgcctaccgtgtgatagccgctctgcgtgccaagctgacgttggcggaagactacctcaactctgggatgtttgacagtttccgttacatcggagccagtctgatatcggacgacaacatgctgccaccgaacctgcgcggttatgcgccggaagtgacaggggtggcgaagactaacgccaaggtgaccatcagtcagcaagggcgtgtgatttatgaaactcaggtggcagcaggccctttcagtattcaggatctgaatactgcggtgaatggcaagctggatgtgaaggtacaggagcaggatggcagcgtacagacctttcaggtgaataccgctaatgtcccctatctgacacgtccgggtatggttcgttacaaaattgccgccggtaagccatcagatattaagcatcgcagtaaagggccgggctttgcaaccggagaattctcttggggggtgaacaacggttggtcgctgtacggaggcgctttgctggctaggggctataacgctctggctatcggtatcggccgtgacttgctggcgtttggtgcattgtcatttgatataacgcagtcgcgagctcagcttctgcatgatgacaccaaacatggaggttcgtatcgggttagctattctaaacgctttgacgaatacgacagccagataacatttgcaggttaccgtttctcagaacgtaacttcatgagcatgtcacagtatttagaggcgcgttattacggtgtcaataatggcagaggtaaagagttctataccatcacgtttaacaagcagtttaaggaattggggcttagtgtttatctgaactacggccatcagacctattgggaccgtccgaacaacgatacttataacctgtcactatcacgttatttcgacattggacgctttaaaaacatcagcctgagcctaacggcatatcggactcagtacaacggcactaatgatgacggtttgtatctgagtatggctgtaccgtggggtgaaaatagcacaataacctatgacggtcagcttagccgtaatagtagtaatactgtgggctactatgaccgtatcgatgacaacaatgcatatcggattaatgtcggtaacggtcagggtgggcgtagtattggcagtggttacttcacccatgagggggatatagctaagttgacagcgaatgccaatttccgtggaagtgaatatagcgctatggggctgtcacttcaggggggaatgacggcaacggcagatggcgctgcgctacaccgtatcaacatgatagggggaacacgcatgatgatcgacgctgatgggattggtggtgtaccaatacgcggttatggcagtgtgacccataccaacatttttggtaaagcggtggtgagtgatatcaacagttactaccgcagcagcgttaatgtggacgtgaaccaactggcggataacgtggatgcaactcgctcggtggtacaaggcacgctaacggaaggcgctattggttatcgcaagtttgggatgatcgccggcgagaaggcgatggccattattaaattgacagacggtacggctcctccattcggcgctatcgtgatgaacgaacgtgaaatgcaaactggcatcgtgaatgatgaaggaagtgtgtggttaaccggcattaatccaggcgagaacatgagtgtgcattgggatggtcgcatacagtgtctcatcacattaccgcaatctcttctagccaacttgatgaataatctgttgttaccttgtcggcgtgttaaagggaatgatggtagtgacgctgtagagacagttgttacaccagccaacacaggtaacgtagcgaggatcggcggcgaaaatggcaggtga

SEQ ID NO: 8464 - DNA, 759 bp, Photorhabdus luminescens
atgagtatgacaatgaaaaaaaacgcggcggcttctgctgtcatgttggccggtattctggctgttcagcaagctaatgcagctattgccctcgatcgcacccgcgcggtgtttaatggggaagatagatcaatgagccttagtatcagtaaccagaataaagagttgccctatcttgcgcaggcttggattgaggacgagcatggcaacaagattaacactccactgactgcactaccgccacttcaaagagtagagccgggagccaaaagccaagtgaagttgcaagtcactcagggcatcaacatgttgtctcaggataaagagacgctgttctatttcaacctccgggaaattccgccaaagtccaacaaacccaacacattgcagattgcgctgcaaacacgtatcaaactgttttatcggccaaaggctattactgttggccgcacggactacgaaaatccttatcaggagaagttgacgatgactcgacaaggggatcgctatgtagtgaacaatccgacgccatactacgtgaccatcgcatcagcatcgtccagcctaaatggaacagcggtatccggttttaatccgatgatgatcccaccaaaaggcagtgctgtgttgggtggcagtgcgtcagcaatgggtaacaatcctgtactgattttcatcaatgatttcggtggtcggccaaaattagtgtttggttgtagtggtggcacttgtaccgtgaaaagtagtaaacccggttga

SEQ ID NO: 8465 - DNA, 594 bp, Photorhabdus luminescens
atgaacaccatcctaaagccagatcgagatggactgataccgtccttgtgtcggcgtaaccgattacatgttcttaaagcgttgttgctcttgctttcgataagctcagtgtgtaatgcgaaggataaatttgaatccattgttcgtataaaagttaatgtgcttagagaagcttgtaatatccagcctggagatgatgcaattaccgtggacttcgatacagtgttcggaaaacacctttatcaaaatgaacgtagtcatagtaaagcgttttcaattcacctcataaactgtgatgtgacaagagctcgggaggtgaatataaaatttctaggtaaggaaaataatgagcttcctgggcttttggcttttcaaccgggaagtcaagcatcaggggcagcggttggaatagagtctctggctggagaacctatttcgataaacaagactgttaaaaaatatagtttaaataatggcaatgccacgctggactttaaagcctacgtgcaaggggaaccttctgctatcagaaatcactcaatagtatttggtaagttctcggctatttcgacgtttatgttggactatgagtga

SEQ ID NO: 8466 - DNA, 798 bp, Photorhabdus luminescens
atggcattggcaggtgttccatttatagaggcaaatgcgggagcctttgttatgcctattggaatgagcgaagataatgacaggacgccgcgtacaactcaagaaataatcgcctgggatgaaaatgatacagacccaaatccatgtcacggttctggtgtttgttatgttggcccagatgtgaagtatagatatcgcctgccggggatgcatggtagttgtattgaggggaagcattgtattgaaatctctcgcttgaagactaagaaagaggtagctgaggcttacaaaaaaacatttccgttgccatatcgatcagatttccgtttgatatccactgatgcgacgtgtataggattgttttttattagacaccaacctactttaggattttcagatgcggagctgtggccgggtagtacttgtggtcggttgccaccaactaatcaatcttgcaatatttttttgccacctgttattgatcatggtgatttgggggtggaaaatctcaacgggaataagaaaacgataacaggaaatgtgcagtgcacattgccagctaacctgactttatatacaaaatcctcaacgggtgaaaagtttatttatttaaatcctaaaaaaacactttactccgatgtggatatcaatggctcaaatgcttggaatggtgttccaataacggtaagtggaaataatctctattcattttccttttcatccagacttcaatcattgggtaaagttgatgcaggtgcctattcgggagatgttattgtgattatgacttttaattag

SEQ ID NO: 8467 - DNA, 540 bp, Photorhabdus luminescens
gtgaataacttgtttgttcttaaacatatatgtgtgatgttgcaggtttggaaaataacaaggcgctgcattgtaccttatggttgttatttctacctactattagcagccgcatttcttttaacaggatgtgctcaagagctcacaccaaagagagtgccgacatcaagtaaaataaaagcatcgtcaaccactaagacattggttcattcttcattaccccctgaatctggaggcggtgattgtcgttttaccggaaatgtgcagccctctgctgacaacaattccggtaaattggcacaatgtactcgcgagttggaggcattgaagcagttcagcggcactaaatacacacgctacaaagccgaatttgatcgcattgcccgtacgggtagtcaatatttggcggtggctaacgggatcagtgaggatatcaatgatttagtacgtcctaagtatcagtatgctcttaccagtttgtgttatcgtataaaaaacgacttatcattggcattaattaatcaggtagatgcacaatga

SEQ ID NO: 8468 - DNA, 1263 bp, Photorhabdus luminescens
atgagctgtatacgaatgcatcttcatcgctgtgcctggttattaattggttttttgggaacggttgatattgtaagtgcagcagaaagtggaaactatacacctcctggcggtacgccctcggtggatagcttgatggaaagcgccagtaattctgattatggtctgagtaccctaatggcgcaacagtccaaatctggtgagtcatcttcaaacagaagtgcatcaaagcatgcggttggaacatccattcttgttggtatgggggcctcgtccggtggtagcgaagcagcagcccgtaaagtattgcgtgcagagaatcgtaagcttaagagacaactgaccgatagtatcgccgagttgaagtcttcccagactgaactagagaagagccgtaagcagctatctgaccaccaatcagtcaggatagaaatgcagaagcaaaaggatacattacaaaaacagttaagtgaccatcagaccctactgacagctacgcagcatcagttcaaagaagcacaaacgcagttagaggccgtgcgtaaacagttcagagaagctgacattgttcgagagcagttagagacggcattggtttctactcgttatcaactagtgcaagccaatgatcgagcggtaaaagccagtaaatccgtgagtgtaccgctcgatagcgataaccgtaagcgtgactatgtcgtgggccaagcgatggcctcggggctaaaagagacactggcgagttatgcagaaagtgggttatctctggatcctgttcgagtgactgccggattaactgatggattacgcaatcgcatgcagcttaaacgcagtgatatggataaatattacctgacctttgcggagcaattacaaaaacaggtaaatgccaaggttaagatgggagaagcactgattgcgaagaaaactgccggacgcaagccagcaaagaaagtcaatggcttggtgtactttgtggtcaagaaaggtcaccctattaaggatcaggatgcaccggtttcactagctttgtctgagcagattgttgatggtgccactttaagcgctattccgacactgacacttaccgctgacgatgatatacccgccgtagtgcgtgaggcgcttccattgttgggtgaagaggccgaagttgatgcctatgctttagctaaggtcgtgtatggcaacttaccgatgccgaaaggggtaaccccgtttacggtcttggtctatcacctgaaagggattaaaccccagtaa

SEQ ID NO: 8469 - DNA, 891 bp, Photorhabdus luminescens
atggatatacgcaatctcaaagcttttatcgtgttagctgaaacacttaattatcataaggcttctcaaatactacatatttctcaacctgcactgactaagaaagttaatgcactggaagcggaatttggggctcttttgttttccagaggaccaggtggtaccagattgactgattttggacaaaaaacctttgagaatgctcagaaattactgggtcattttgagcaatttcagattcaggttaatcatgatttgcaagatgatgcgccacattacctttatgttagctcttgttttcctatttatgattctggaaaaatggaagagcggatttttctaggtaggaaggaaaaagctgtgctggtgctaattactggtctgacatttgagcagcaaatgaatctattaaactctggtttattacatatcgccattgttcctctaccattgacttcatcacttatgcctagaaagatttttactgaaaaactcgtttacctttttaaaaaagggagtgattggtttcggcattttacagaattaagtgctgaaatggcatcgttgtatcagcttattgacatggatgagaatgatatcccaattgattttattgatggtattaacgcattttctatttatgataatagtatgaatttaatgttaaaaacgaatgatattatggtaatgattgaactaataattaaacgtaatggtttttcattaattccggaaaaagttattcgctcaattccatcacaatatttggatttattagaagtgttaaaaaccgatatggagattgattttggtatcttatggagtccaattatcaattatgaattgataaatgaaacggagttattctcttcactgattgataatgtgtaa

SEQ ID NO: 8470 - DNA, 453 bp, Photorhabdus luminescens
ttgatattgttgtttttgacttcaattaattccttaagaactgggggaattatggaaaataaaaaaaagattatacatatcaccgttgctgctgctacttttgttttagtatcactagggttctttttgacaggagaaaatctggtttctttagttaatatggatgagaaaataacattctcaagtagtgttattattatgttatttttttctcctttgatttggtattgtatggtttctattattctttctaatataacaaaccgttgcccaaagtaccatgatagtttcataaaatactttggttcgatagccattatttcactttttttaagttttcctacatctttgtatgtgaattataaactgagaagtgagaattatttaatatgccaaaagatatctttgacgtcgccgaatacctatgtaaaagatatgaagctatgtgattga

SEQ ID NO: 8471 - DNA, 831 bp, Photorhabdus luminescens
atgggggatttcctgagaggtcatgttggggctaaccaattaaaacctcagcatgaattctttgatgccattggtctcgaaaagcagttaagagagaatacaacctatattgcgctgctatcgttagatgaagcgaaagatgtgctagaagatattgactcgccaaaacccaaaagtccatttataaagaaaatatttgagattaccgatcccatatcaccctatgcaggtaacattcatgattcttttgatctctttaatgttataggggaatttaaaagattagggattaaagcaacagagtatgtgggtaaggatggaaacagatatattaaaatatcaggttatgcgggagttagaaagatcatcactgcttcaagatacaaagcttctaatatgaaggtgatatctatggggattgggcagaaaggattaaatagcggcatagttaaaggaatgaagtttagtatattcttttctgcggcttatcgaacggttgaacttatgtttaaggatgaatacactctggctgattttctaggtaatattgcggtagatctggctaagacagtaataacagcctttgtttcttggactattgggtctttgatgttagttacatctattgctggtgccagtgtagttggtgttgctattattgtgttttttgtaggtgtcggtgttactgttgcacttgattctatagataagaaatataaaattagtgaagctgttattaatttaattaaaaaagaaatggagagaaaaccaagaactccagaaactggtctcaatcaaattttttataattgggggagatatgttaaataa

SEQ ID NO: 8472 - DNA, 207 bp, Photorhabdus luminescens
atgaacgatagagataggcaacagttattacaacagctcactgacgtattagtgaatagcccgttaattccagaagaaaaattggcaatgatgatgatgcagtgttttgagttattgttgtcaactcaagccagtgcgatcgacatgaagatttcagatggccgtgttctttctctcaaattggaaactccggcggttagacactaa

SEQ ID NO: 8473 - DNA, 480 bp, Photorhabdus luminescens
atgtcacatataatttatttatctttaaatggtaagaaacaaggtttaatttctgccggttgttcaacgctagactcaataggaaaccgataccaacaggggcacgaagatcaaatacaggtattgcatttgaatcacacgataactcgccaaaagaatgtcgatcatcacccggtacaatttatcaagccaatcgataaatcatcgccgctgttagcatccgcaatatcttcaaatgaactagtgaatgcgattttcttcttttacagaacaaatttcgctgggcagttagaacttttctatgaggtcaaattaacagaagcgagtgttgttgacatttcttgcgtctacccgcattcaataaatgataatgaaatgatgccgtacgaaaaagtctttctcaaatatagatccatatcctggaatcacataaccgccggcacatctgcctatagtatatgggatgatagaatttattaa

SEQ ID NO: 8474 - DNA, 906 bp, Photorhabdus luminescens
atgaaaatcaatctcaacaatatggttaccgaaagtcgtaatccagccagtgccaacattgatactttgccaacccttgaaatgttaaaactaattaatgacgaagataaaaaagtcgcattggctgtagaacaaactttgccaaaaatcgctgaaacagtagacaaaattgccgaagcatttcgtcaaggaggtcgtttaatttatatcggtgccggtacatcgggccgattagggattttggatgccagtgagtgtcctcccacttatggtaccaaaccggaacaagtggttggattaattgccggcgggcatcaagccattctacatgcggttgagaatgcagaagataaccaacaactaggcgcaaatgatcttcaagcgctacactttaactcaaaagatgtattggttggcattgccgccagtggtcgtacaccttatgtcttgggtgccatgacgtatgcgaaatccgttggtgcgaccgttgcctgtattagctgcaacccggaaagcccgatgacacaagccgccgatattgctattgcaccgatagttgggccagaaattgtcacaggttcatcacgtatgaaagccggtacagcacaaaagctcattctgaatatgctgaccaccggtgccatgatccgtacaggtaaagtttatagcaacctgatggtggacgtagaagcgaccaatgccaagctggttgaaaggcagaaaaatatcgttatcgccgccaccgaatgtaatcgtgaacaagctgagcaggcactggctgaatgtgatggacattgtaaaaccgccattgtgatgattctggctggcatcaatgctcaacaagcaaagactttactgaaaaagcatcacggttttattcgaccgacgatctcagccgttcggtaa

SEQ ID NO: 8475 - DNA, 1479 bp, Photorhabdus luminescens
atggcgaaaattaaccagtcagtcattgcccagatccttaaagctatcggcaatgcaaataatgtggcgcaatgtggcaactgtatgacccgtctgcgactaacactgcgtgacagtactcaggtggataaagtggcgttaaaacagatccccaatgtgttaggtattattgagagcgacgatcagtttcaaattgtgcttgggccaggaaaagcccaagcggcggctgagataatgaatgaattgctaaattcttctactcctacagcacaatcgaaaccaagcgacactcatttagccaatattgcttctgctaataaaaagcaacttaaagagaaacaagtcagtgcggtacacaaattcctgaccaaattcgctaccatttttaccccactgatccccggttttattgccgttggtctgcttctcggctttgctactttacttgaacagataactattcagggcgttgaacaccctaataccattttggttgaaatcatcggctatatgaaagttttcagtaaaggtatgttcagttttctgagtattctgatcggttataacgcgcaaaaagcatttggtggttcgggaataaacggtgccattattgcttctctgtttgtactcagttataacccggatgccaccagcggtttttattccggtatttctactttctttggttatagcatcgatccacgcggcaatattatcggcgttcttattgccgctattctgggagcatgggtagaacgacaagttcgtaagatcattccagacaatctggatatgatcctcacttcggctattactctgctaatcatgggagccattgcctttatctttatcatgccgctggggagttatctatttagcggcatgtcatggttattccttcaccttaacggcaatccttttggcacggcgatattggctgggctatttttactcgctgttatgtttggtgttcatcaagggtttgttcccgtctatttcgcactcatggaggctcaaggctttaattctctgttcccaattcttgcaatggcaggcggcgggcaggttggtgcagcgctggcactgtatgtcaaagcgaaaaaagactcgctgctgcgcacgcagataaaaggcgcgattattccaggcttgctcggcatcggtgagccgttgatttacggagtcacacttccacggattaaaccctttatcaccgcctgtttaggcggtgccgccggtggtttctttatcggtttaatagcttatttaggattacctgttgggttgaatacggtttttggtccatctggattagtagcactgccactgatgacctcaaacaatggcatttttgtcggaatggcagtgtatgctgccgggctagtggtggcttatatcagcggttttgtactgactctgatcttcgggagtaaaaaaatagaggtgcttaaagccgatgtccaaagccaaaaagaatga

SEQ ID NO: 8476 - DNA, 609 bp, Photorhabdus luminescens
atgacagcaagcctaattttttcattaacaacttttttatttatttcttccattacgccgggtccaaacaacatgttgttgacttcatcaggcgctaacttcggctttatccgctctttggggttactctttggcgttgttctgggcatgcagacgattttatatctggcggctttcggaatagccgcattgttgttggtctatcctgctattcacacggtgatgaaaattgcaggtagcctctatttgctgtggctggcatggaaaacagcaacagccagttaccgacgtctggataccaaagatagcgctgttatcaagccggtgcggtggtatcaaggttggttattgcagtttttgaatccgaaagcctggctgatggggttgggggcggttggcagctatagtattgccggtgatcattacctctattccatcatcgtgatcagcatcgtggtgatgtttattaatttcttgtgcggcatggtgtgggcgggttttggttcattgatagggacgttactccgtagtcgcaatgcttggtttctgttcaatattacgatgggtatattgacggcaacctgcgtgccattaatctggcttgggtaa

SEQ ID NO: 8477 - DNA, 885 bp, Photorhabdus luminescens; identical to SEQ ID NO: 7045

SEQ ID NO: 8478 - DNA, 978 bp, Photorhabdus luminescens
atgaccgatatctttcgtcctctaaccggagccagtaatccgcatttgcagacactcctcccgcgtctggtgcggcggtatcctgaactgcaaccctattggcaacgacttgatttaccagataacgattttgttgatctggcgtggagtgaagatcccgccaccgcagcacacaagccacgattaatcctatttcatggtctggaaggcagttttcacagcccttatgcccacggtttgcttcatatctgtcagaagaaaggttggcttggtgttgtcatgcatttccgcggatgcagtggtgaaccaaaccgccaaaaacgtctctatcattctggcgaaacaagcgatgcccgttattttctaagctggttaaaacagacttacggtgatgtccccacctcagccgtaggttattcagtcggcggtaatatgctggcctgctatctagcagaagaaaaaatagatgctcagatcaatgctgccgttattgtttccgcgcctctgatgctggcagcctgctccctgcggatagagaaaggattttctcatgtctatgaacgctatttactcaatagcctgaaacgtaatgccacccgcaaattgttacgctaccccggttcactccccatcaatctgtctcaagtaaaaggattgaaacatattcgggaatttgatgaaattgtgaccgcgaaaatccacggctttaaaaatgcagcggactattaccaccagtgcagtgctctgccgcgtctgcctgatattactgtgccactgctgattattcatgctaaagacgatccttttatggcaccggaagtcatccctgatctcaaaatgttacccaaaaatattgaatatcaaatgacagaatatggtggacatgtcggctttgtcagtggctcattgaagaagccacaaatgtggctggaacaacgcatcccaaattggctgtcatcttatctggagcaaccataa

SEQ ID NO: 8479 - DNA, 219 bp, Photorhabdus luminescens
atgattatcccgtggcaacaactggaacccgaaactctgctaaatttgatagagagctttgtcttgcgggaaggcactgactatggcgaagatgaaaaatcgctggagcagaaagtcgctaatatacgccatcagttggaacggggggatgttatgctggtgtggtctgaactgcatgagagcgtcaatattgtgccaaaagaaatgttccattcttaa

SEQ ID NO: 8480 - DNA, 870 bp, Photorhabdus luminescens
atgtctgtcaaacatccgattattgcaattaccggctccagcggtgccggaaccaccaccaccagtttagctttccgtaagattttccagcaacttaacatcagtgcagcgcagatagaaggagatagtttccaccgctacacccgccctgaaatggatgccgcaatccgtaaagccaaagaacaaggcaggcatatcagttattttgggccagaagccaatgattttggcatgctggaaaaaaccatgattgattatggtgaaaccggtgaaggccgccgtcggaaatatcttcatacctatgacgatgccgtcccttacaaccagcttcccggtacatttacgccgtgggaatctttacccaagcagaccgatgtactgttttatgaaggtctacacggtggtgttgtcacaccacaacataatgttgccagtcatgttgatctgctcgtgggcgtcgtgccgattgtcaaccttgaatggatacagaaacttgtccgcgataccggagaacgaggacactcgcaggaagctgtgatggattccgtcgtgcgttctatggatgattatattaactacattacgccacaattctcgcgaacacatatcaacttccaacgtgtccctaccgttgatacatccaatccattctcagccaaaaccattccatcactggatgaaagttttattgtcatccgcttccgtgatctgactcaaattgatttcccatacttgttagcaatgttacaaggctcattcgtttcaagcattaataccatcgtggtccccggtggaaaaatggggctagcaatggaattaattatgacacccttggtgcagcgattactggaaggggaaaagatttgttaa

SEQ ID NO: 8481 - DNA, 408 bp, Photorhabdus luminescens
atgcaagcacgggtaaaatgggttgaaggattatctcttttgggggagtcatcttccggtcatcagatcatgatggatggtaatgccggtgataaggcaccgagcccaatggaaatggtattaatggcagccggtggttgcagtacgattgatgtagtttctattttgcataaaggcaggtatgacatcagagattgtgaagtaaaattaacttcccgccgtcgtgaagagccgccacgcttgtttactcatattaatctgcattttattgttacgggtaaagatttaatagataaagcggttgaacgtgccgtcatgctttcagcagaaaaatattgctctgttgcattgatgttggggaaatcagttgaaattacccacagttttgaagttaaagatatagattaa

SEQ ID NO: 8482 - DNA, 633 bp, Photorhabdus luminescens
atggttctcggcaagccacaaacagaccccactcttgaatggtttttgtcacactgccatattcataaatatccatctaaaagtacgcttattcatcaaggcgaaaaagcagagacgctttactacattgtaaaaggttctgttgcggttttgattaaagatgaagaaggcaaagagatgatcctttcctatctaaatcagggggatttcattggtgaacttggattatttgaagaggggcaagagcgtacagcttgggtacgggccaaaagcgcctgtgaagtggctgaaatctcctataaaaaattccgtcaactgattcaggtaaacccggatattttgatgcgtttatctgcccaaatggcaaaccgtttgcaaacaacttctgagaaagtcggtaatctggctttcctggatgttaccggccgaattgcccaaactttactgaatctggcgaaacaaccagatgcaatgacccacccagacggaatgcaaatcaaaatcacgcgtcaggaaattggccagattgttggctgttcccgcgaaacagttggtcgtattctgaaaatgctagaagatcaaaatttgatctccgcacacggtaaaactattgttgtttacggtacacgttaa

SEQ ID NO: 8483 - DNA, 1212 bp, Photorhabdus luminescens
atgaaggagcatatcgcagtagatagaaacacatacgatcaagttatgttgccaatttattcaccagcgcagtttataccggtgagagggcagggtagtcgtgtatgggatcagcatgggaaagagtatattgattttgcgggagggattgctgttgtggctttgggccattgtcatcctacgttagtggatgttttgaagcagcaaggggaaaaactttggcatatcagtaatattttcaccaatgaaccggctttgattctggcgcagaaactgattgatgcgacttttgctgagcgggtgttttttgccaactcaggagcggaagcgaatgaagcggcatttaaactggctcgccactatgccattgcgcgtcacaatccctataaaaccaaaattatcgcatttcatcagggctttcatggtcgtaccctatttactgtctccgtgggcggtcagcccaaatatgctgatggttttggaccaaaacccgcggatattattcatgtgccttttaatgatttagatgcagtgaaggccgtcatagatgaccatacttgtgctgttgtattagaaccggttcagggcgaagggggagtcacggcggcagcaccggcatttattcatggggtgcgtgagctttgtgataagcatcaggtgctgttggtgtttgatgaagtgcaaagtgggatgggacgtactggtaagctattttcttatatgcattatgatgttacgccagatatcattaccacggcaaaagcattgggaaatggcttccctatcagcgccatgctgacgacagtgaatattgcttcagtgatgacaccgggagctcatggtacaacttatggcggtaatccgttggcttgtgcagttgcaaatgttgcttttgatattattaatacaccagcggttctggcgggagttgaaaaacgccataatttaatggtgaattttctgaatgatatcaatcagaaatattcgatatttggtgaaatccgtggaaagggtctgctgattggggcagaacttaaagcgccacatcagggaaaagctaaagatattctgcaactggcggctgaaaatggcttaatgttgttgagtgcgggaggcgatgtactgcgtttcacgccttcgttgattattagtgaagaagagattgctcaaggaatggagcggttagagcaggtaattaatcagttggtgtaa

SEQ ID NO: 8484 - DNA, 576 bp, Photorhabdus luminescens
atgttactaataatagataactatgattcttttacatataacttatatcaatatttttgtgaattgggtacagatgttttagttaagcgcaatgatgaattgcaacttgaagatattgagagattgacgcctacccatttggttatttccccaggcccttgtaccccaaatgaagccggcatttctctgtctgcgatttctcatttttcggataagttgccgattcttggtgtttgtcttggacatcaggcaattggtcaggcgtttggtgccagcgtggtaaaagccagagaagtgatgcacgggaaaacttctgctattcatcataatcagcaaggtgtgttcaaagggcttaaccggccattgaccgcgactcgttaccattcattggtgattgccgcagagacattaccggcctcatttgaagtcactgcatggagccagcataacggcaatgtcgatgaaattatgggcattcgtcatcgtactctaccgctagaaggagtgcagttccatcctgaaagtattctcagtgagcaaggtcaccagttactgagcaactttctgagatattaa

SEQ ID NO: 8485 - DNA, 351 bp, Photorhabdus luminescens
atgaagacaaaactgattatagcatctctttttttactgtccttccccacgctggctgttaccaaagccgccaacattttctttccggaaaaaggggtggtttgtgataaaaaaggaaaatattgttctgatcaacaagggctatcgctaaaattaaccgaaagatatttaggtaagaaagcggtaaaacgcctgaaaaaagagattggtgatggaaaagatgtcgacttttcctcttacactttaagtaacggcgtacactgtgagagtaaagagaagaaatgctacaaagacagatattatccacgaaccgaagtaaataaagaatttacccaaaagatgtatgaataa

SEQ ID NO: 8486 - DNA, 570 bp, Photorhabdus luminescens
atgtttaaacgtattttagtagcacttgtaactgcatgctctctgagcgcaatggcacctctggctttggcggtgggagaaacccacgtgaagctgacaacaacggagggtaatattgaactggaattaaataaccagaaagcgccaattacaacgaaaaactttattgaatacgtcaatgagggttattacaacaatacaatcttccatcgggtaatccctggatttatggtgcaaggtggtggttttaccaaagatttgcagcaaaaagcgactaaagctgctattaaaaatgaggcagataatggactgcgtaatttacgcggaactatctctatggcacgtaccgctgataaagacagtgccactagccaattttttattaatgtagcggataatgctttccttgatcacggtcagcgtgattttggctatgcagtatttggtaaagtcgtaaaaggtatggatgttgtggataaaatttctcaagtcaaaacggaaaacgttggtccatatcagaatgtaccggttaaacctgttgctattctgtctgcggagattatcccttaa

SEQ ID NO: 8487 - DNA, 633 bp, Photorhabdus luminescens
ttgaccatcaaaaaccacaactatcatatgacccgttttatcacgagcgcacctgatattcgccatctgcctcaagatatgggcattgaagtcgcgtttgccggtcgctcaaatgcaggtaaatctagcgctctgaatgctctgacgaaacagaaaagcctcgcccgcaccagtaaaacgccaggtcgaactcaactcatcaatttattcgaagtagaagaaggtattcgcctggttgacttaccgggttatggttatgccgaagtgccggaagagatgaaacgcaaatggcaaaaagcactgggtgaatatctgcaaaaacgtgaatgcctgatcggactggttgtactaatggatatccgtcacccattgaaagatcttgatcagcagatgatccaatgggcagtcgcaatgcaagtaccggttatggtgttgttgactaaagccgacaaactggcatctggtgcccgtaaaagtcaactgaataaggtgcgtgacgctttgctcgcgcttaatggggatattcaagtagaatatttctcagtcccgaaaaaaatcggtatcgataaactacatcagaaactggatatatggttcagccagaaagccgttcaagttgaaaaccatcgttaa

SEQ ID NO: 8488 - DNA, 1293 bp, Photorhabdus luminescens
atgaaccaacatgataatgcttcatcaggtataaatcacaatagtaactctccattagaatgggaagaaaacgtctattgcagcaataacatagctctcgcatccaccatcggagcaaccgctatgttattgcagaatggcagtgtaattacctggggacttacacatcttggcggtcaagtcccacctgacattgctgtattacgagatatcgttagcctgagctcaacacaatacgcattcgcagctttacgggcagaccgcagcgtggttgcctggggagattcagttaacggtggacagcttcctcccgacattgctcaactaaaggatattgttagcctgagttcaacggctaacgctttctcagctctgcgagcaaatggtagcgtagttgcttggggagataatcgctatggtggccaagttacaccagaagttgcccaattacaggacattgtcagtgtaacttcatcaggtaatgctttcctggctctgcgggcaaaccgcagcatagttgcttgggggcgtttagctggcgtgctcccacccgagattacccaactacaggacatcgtcagtgtgcttggcaaaaacgacatgtactcaaccttcgcggccttacgggcaaaccgcagtgtggttgcttggggatattcactgtttggcggtcaggttccaccagcaattgctcaattacaagatatcgttagcctgagtcaaacaggtactgcattcgcagccctacgggcaaaccgcagcgtggttgcctggggaaatgcaagcaggagcggcacagttccgcctgccattgcccaactgcaagatattattaatttaatcggttcgggcggcacatttatagctctgcggtcaaaccgtagtattgtcgcctggggagacacgccaatcccatcagaaattgctgcattaagcgatatcgttgacctcatcacaacaagttcagctttcacagccctacgaacaaatcgtagcgtggttacttggggaacaatagagagtattgagcaggtcccatatgacgcagcccaagtacagaatgtcatcagcctgagtgcatcaagtgatgcctttgccgccctacgagcagaccgcagcatagtcgcctggggagatatatacaatggtggaaaaattccacccgaaattgcgaacttaaaagacgttatcagcctgacgtcaacaccccgtagtttttcagccttgcgagcaaacggcaaaagagtcggctggggaggcggagattttgtatcacatggtgaatatgactaa

SEQ ID NO: 8489 - DNA, 219 bp, Photorhabdus luminescens
atgaaccaacatggtaatttcttgccgggtacggatgccgaagacagttttataacacagcaatggaaatctgccggacatagatattatagcaacaataactacgattatattgtcactaacaataaagcaacagctatgttattacaaaatggcagtgtagccgcctgggaaagctccaactgggacggagacttatgggggccaagtacctcctga

SEQ ID NO: 8490 - DNA, 222 bp, Photorhabdus luminescens
ctgagttcaacacgtggagcattcgcagctctgcgggaagaccgcagtgtggtttcttggggagatctttattcaggcgggcgaatgccgtccgatattgctaaattgaaagatattattagcctaagtgcaacacaattggcatttatagctatacgggaaaatggcaagagagtagcttggggaggtggggataccagagctcatggtgactatgattag

SEQ ID NO: 8491 - DNA, 2790 bp, Photorhabdus luminescens
atggctcagatagcagacaatcccctgattttggttgatggctcctcatacctttatcgtgcttatcatgctttccctccgctgacgaatagcgcaggggagccgaccggagccatgtatggtgtattgaatatgctccgcagcttgataatgcagtacaaaccaagccatgtagcggtggtatttgatgctaaaggcaaaacttttcgtgatgaattgttcgctgagtataaatctcatcgtcctcctatgccggatgatctgcgtacgcagatagaaccgctacatcagatggttgaagctatgggattaccattgctggtggtgcccggagtagaagctgatgatgttatcgggactttggcgttacaggcagaaaaagaggggcgtgcggtacttatcagcactggcgataaagatatggcgcaactggtcacgccgaatatcacgcttatcaataccatgaataacaccattttggggccggaagaggtcgttgaaaagtatggtgtgccgccggagctgattatcgattttctggcattaatgggagactcttctgacaatattcctggcgtacctggggtgggagaaaaaaccgcactgggattactgcaagggattggtggcatggatgatatctttgccaatctggataaaattgccgggctcagtttccgtggggcgaaaacgctggcggataagatggtgcagcataaagatgtcgcttatctctcctatcaactggcaactattaaaaccgatgttgagttggataaaacctgcgttgctttgtcagtcaaagagcctgatacggagaaactgcaccagttgttttctcgttacgagttcaaacgttggttaagtgatgtggcaaacggcgattggttggcagagaaaggcaaaaaaccggtatccactggtaatgatgaatcatctccgacggaggataaatctgcggcggccacactctcttctgataattatcagactattcttgatcagcaaagctttgatgagtggattgagaaactgaaaaaagcgtctgtttttgcttttgataccgaaactgacagccttgatactttgactgctaatctggtgggggtgtcattcgcaatttctgccggcgatgcggcttatctacctctagggcatgactatctgggcgcgcctgaacaacttgacagagaagttgtgttggctgcattaaaaccgctacttgaagatagtaacctgctgaaaattggtcagaatattaagtttgatcgtggcgtgttggcgcgttacggcattgaactgcaaggcattgcttacgataccatgctggaatcttacgtacttaatagcgttgcaggcatgggtcggcatgatatggatagcttggctgaacgccatttgaatcataagaccacgacttttgaagagattgctggtaaaggtaaaaatcagctcacttttaatcaggtcgcggtggaacaggccgcaatgtacgccgcagaagatgcagatgttactttattgctgcatcaggctatgtggccgcaattggagaaagcgccgacgctagaaaaggtattcctgaatacagaaatgccactggttatggtgctttcccgcatggaacgtacaggtgtacttattgatgccaatattttggctgagcattcaaaagagatcactgcccgtctggatgagttggaaaaagaagcgcacgaattagcaggtgaagttttcaatctggcttcgccaaaacagttacagacgatattgtttgaaaaattgcaattgccggtggtaaagaaaacgccaaatggtgcgccatccacgaatgaagaggtactggaagagttggcagatacccatgcattgccgaaagtgatcttagagcatcgtgggttggcaaaattgaaatccacttacaccgataaattaccgcagatggtccatccgctgaccaaacgggtgcatacttcctatcaccaagcggtaacggcaaccgggcgtctctcttcacgtgatcctaatttgcaaaatattcctgtccgtaataaagagggccgccgcattcgtcaggcatttgtggctcctgaaggttaccggattatggccgctgactattctcagattgaattgcggataatggctcatttgtctcaagatcaagggttgttgaaggcttttgctgaggggaaagacattcatcgggcaacggcggcggaagtctttggtttgccactggaacaggtaaccagtgagcagcgccgtagtgccaaagcgattaactttggtttgatctatggtatgagtgcatttggtctttcccgtcagttaggtattcctcgtggtgaagctcaacgctatatggatctctattttgagcgctatccgggggtattggcgtatatggagcgtactcgtaaacaagcggaagagcagggttacgttgaaacgctggatggtcgtcgtctttatctgtcagatatcaaatctcgcaatgccatgcgccgtaaggcagcagagcgtgaagctattaacgcgccaatgcagggaactgcggcggatatcattaaaaaagcgatgattgcggtggatgattggattgtcagtgaagaaccgaaagttcgtatgattatgcaggttcacgatgagctggtatttgaggttcatgaatcagaacttgaatatgcagaacagaaaattcgtgaattgatggagaagagtatggtgcttgatgttccattgaaagtagatgtaggtatcggtgacaattgggatcaggcgcattga

SEQ ID NO: 8492 - DNA, 1014 bp, Photorhabdus luminescens; identical to SEQ ID NO: 6455

SEQ ID NO: 8493 - DNA, 240 bp, Photorhabdus luminescens
atgagtgaaaacgagatttacagacgcataaagcttgcttttgacaaagcgccaagaaaccagtttacggttgagttacatttgcaaatgctcaaacatgccgacgaattaaaacacattatagcgagggagttttgtgaaggtgtaagtcttcacccgagcttcggcacggagtttagtaaaatgcgtaatttgacctctcatcttaaagctgctggtcttgacacgaatcttctttga

SEQ ID NO: 8494 - DNA, 2628 bp, Photorhabdus luminescens
atgagtgacgacacttttgaatatggcagccggtggctcaagacggattttcatctccatacccgtgcggataaagagttcaaatacacgggtgcagataacgactacgtaaatcaatatgtacattcgctaaaagatgccgatattggccttggtgtgattaccaaccataacaagttcgacatgtctgaatttaagagtctgcgcaaaaaggctcaaaaatctggcattggtctgctgcccggtattgagctctcggtaaaagatgggaacgcgggtgtgcataccctagtggtgttttccgatgagtggataagcaacaaggagcaaaaaaattatatccaggactttctcaatgtgacctttgccgggaaagctaattttgagcaggaaaatgcgcgttcgaatcacgatattctcaaaaccattaaaattttggatggttatcacaaagactactttttagtttttgctcatgtggaagcacccaacggtttatggggtggtttattgccgggtcggataaaagaacttttcgacaatgcttttgttcaatgcagagctttggcattccaaaaggttcgcacccgagatgagcgctctaagatccagcaagcactgggtgacttatatcctgctgaagtggaaggttgcgatgctaagaaccttgccgatatgtcggccagaaaggaagccagctatctcaaactcggcgcgttcagctttgaggctgtaaaatttgccttgcgggataagacatctcgcgtacaagctaagctacctgactatcaccattcgtttattcgtaaaatcagttttgaaggtgtgggcaccttgggtggcactgaaatctgtctatcacgggaactgaatactctgattggtattcgtggcagtggcaaatcttccgtattggaaggtattcgctatgccctgaatatcccgtttggcgataagtcctctgacgttgaatacaaagaaggtttagtaaagcacctgctatgtagtggcgggaagatcactatcgacgcgattgaccggcgaggccagccttaccaaatacgtcgtatattaggtgaacgccctgatgtatatgttaacgggcaattacagccgggtgtgtcgattcgagaaaccgtcctacatcaacccatttactttggtcaaaaagacttgtcgagtactggcgctgggtttgaaaaagacctcattgaaaagctggttggggaagctttaatttctgttcgccaaaagatagagcaaggccgtcagcgcgtagtggatgctattgatcaaattaaacgtttaacccgtgatgccttgcagaaacaagagtggctgcaaaaaaagcaggatgttgagtttaagttaaggttttaccaacaacacggcgtagaagccaaactgcaaaagcagattgattttgatcgggatgagcgcaaagcgcagcagatgatccaaggggcacagcattatctgaccgagctaaatagctttattgccagctttgaagatgaactgaaaaaccagattctgtataagtcagcacagaatcagcctttttttgatggcttttttgcggtctatcaacagttgctcactggctttgatgaaattaagcaagtggctggaagtgaccaagcgacagttcagcaattgcagcaaaagctggtgggctttcaacaacaaaaacaagcgttgaaagaagaatttgcagaaatcgagcgcaagttagccagtgagtttcaacaagcgggtgcacaagcaatcagtccgcaagagtttaagcagtttaaaagtcagctcgatcaggctgagcaaatgctggctgtattgaccaagagtgagcagcaatatacggatttgaatcaaggggttgaacgggaattagttcaactgaatagtctttggtttgaagaatacggcactattgagcaagtgctaaataaaatcaatcgagtggattcgccgttaaaaattgtgccgaaatttaaagataacaaagcggccatgctcaagcatattcaggatttataccgcggtagccgtattcgagaagctacattgcaaacagtggtggacgagttcagcgattttggcgcggtatggcgcgaaaaggataagttgaaagcgcagcttggtggttcattcgataccttctgtcagtattttgaagataatctagacgctttgctgacttggcaggtgccgaatgttttcaccattgaataccacggtaaggctctggctcatcattcattagggcagcgcgcatctgcattaatactgtttgttctaagccaacaagaaaatgatattgtgatcatcgaccagccagaagacgacttggataaccagacgatctatgacgatgttatcaagctcattcgtgagttaaagccaaaaacgcagttcgtctttgccactcataacgccaacattccagtgttaggcgatgctgagcaagtcatcgcctgtgaatatcaggatgataatatcaatattgtcagtggcagcattgactgcgcggatgttcagcagcgtatagtcggtattatggaaggtggtgcagaagccttcgagaaacgtaaacaggtatatgaagcatggaaacccaagagctcttag

SEQ ID NO: 8495 - DNA, 1077 bp, Photorhabdus luminescens
ttgggtgccgaaatggtagcgttttccaatggtactggaggcttaattctcattggtgttaacaatggcgatgggtctcgatctggattgacgagagaagatatcggtcgaattaatcaagtcatagcgaatgctgctacaaataatgttcgccccccaataaatcctgttactgaaaacattcaactccccgatggcctggtcattgctgtacatatagagcaaggcatcagtaaaccttatatggatactcagggctatgtttgggtgaaaaatggttctgataagcgaagggtgaccgctcgcgaagaattgcaacgaatgtttcaggaggcggcactgattcatgcagatgagacgctggtaagtggtacgtcagtagccgacatcgatcaggagttctttgattcgttttttgagggggaatacggagagagggttgaggagcaaggtgtatctcgctctcagcttttagaaaatatgaatttggctaaaaatggtcagttgaatatttgtggtactttgttgtttgcatcgcggcctcagattcgtcttcctgtttttatcgtaaaggctgttgccttccccggcgtagatattgaagatgagcactatattgatagtcaagatatcaatggcaagctgtcggatgtgttccaaaaggtgctggggtttgtattggcaaatatacgacatattcaaaataagcaaagctttaactcacttggcgagcctgaaatcccgaggattgttttagaagaactgatttccaatgcgcttattcatcgcgattactttgtgtcagcccccgttaaagtgctggtttttgcagatcgaattgaaattattagccccggccacttacccaataatttaaccattgagaacatcaagatggggaactctaatattcgtaacccaatcttggcttcatttgcttctaaggtattgccatacagaggcttgggaagtggtattaaacgtgcaatcaaagcatatccagatattgaattgattgataatagggaggggaatacattcaaagctatcattagccgaatgttactcaatgagtga

SEQ ID NO: 8496 - DNA, 624 bp, Photorhabdus luminescens
atgaagaagttgtggttagctttagtcggaatggttatggcatttagcgtatctgccgccaattttactgaaggaaaacagtatgttgaattgaaatcgccggtagcggatcaaccaccggtgctagaattcttctctttctattgtccccattgttatcagtttgaagagatttttaaagtgcctcagacggtgaaacagcatttaccggaagggacaaaacttgtccgttatcatgtggattttttagggccactgggtaaagaattgactactgcttgggctgcggcaatggcaatgggtgttgaagacaaagtgactccggtgctgtttgaggggattcagaaaacactggctattaagactccgaatgatattcgcaatgcttttatcaaagccggggtgactgctgaggattatgatgctgctatgagcagttttgtggtgaaatccttagttgttaagcagcaaaaagccgctcaggatttgcaattgcgaggtgtaccggcaatgtttgttaacggcaagtatatggtgaaaaatgacggcattgatgccacttctgctgataactatgcgaaaccctattcagatgttgttaacttcttgttaagtcagaagtaa

SEQ ID NO: 8497 - DNA, 993 bp, Photorhabdus luminescens
gtgctaacaaaccagtctgcttttaatttccgggagttaacgccggatttgattatggatgcattggtgcagaccgggctgtatgtcgattccgggctgacagaattaaacagttatgagaaccgtgtttatcagtttacggatgaagatcgtaaacgttatgttgtgaaattttaccggccactacgttggaaccagcagcagattcaggaggagcacgattttgctttggcgttacaacaggctgatttacctgttgcggcacctttggtatttaataagcaaactttactgacttttaaagatttcttttttgccgtttttccaagcattggggggcgtcagtatgaatccgataatctctttcagttagaggatgtagggcgtttgctagggagaattcatcagattggccgtcggcaaaaattcacttctcgtccaactatcgggttaaatgagtatctgcatcaaccacgacagtatttggctgcatgtgagttggtccctgcgggacagaaaaggcaatttttggcagtattggatgatttgataaatgctgtagcatcaaattggcgcgatgattggcaaatattgaggcttcatggtgactgtcatccgggtaatatcttgtggcgtgacgaagcttggtttgttgaccttgatgatgcgcgtaacggcccagcaattcaggatttatggatgttgcttcatggctctcgtcaggaacagctattgcagttagatacactgctggaagcctatagtgaatttgcagattttgatccgaaggaattgtcattgatagaaccattgcgtgctatgcggatgatctattatttggcatgggttgctcgacgttggcaggatcctgcttttcccaaagcatttccttggatggcagataccgatttttggttaaaacagacgtcacttttttctgaacagattaagctgttgcaggaatcacctttgcagcttaacccgatgtattaa

SEQ ID NO: 8498 - DNA, 600 bp, Photorhabdus luminescens
ttgaacattatgcaaccaaaaataagcggcgcgatccttgctggaggtcgcgccacccgtatgggcggcaatgataaagggttaatttttttaaataaaaaaccactgtaccaacatattgcagataagctatttccacaagtggatgaattaattatcaacgcgaaccgcaatctggatatttaccgacaaagtggttatcacattgttccagatttaacaccagacttctctggccccctttcaggcatgctgacagccctaaaatcagctagttacgattgggttatatttgttccttgtgatgtaccagatctccctaccgatttggtcattcgcttatggcagggaaaacagcaagcattggcagcctatgtaaatgatggcagccgggctcaccctaccatcgctttactacaccgcagtctgacttctcaattagaaaattatctggctaacggtgatcgtaaattgatactgttcatgcataagatcagagcgatagccgttcaatttgatgataatcccatcgtctttactaatctgaatacaccgcaagattgccaacattgggaacatatacaggagatcaaaaaatga

SEQ ID NO: 8499 - DNA, 519 bp, Photorhabdus luminescens
atgagagccaaaccgcttccgctactaggtattacagcctatagcggaacaggaaaaactacacttctcaaacaagtgatcccactattacgtcaacagcaaatccgggttggtctgataaaacacacccatcacgatatggatgtggataaaccgggcaaagacagctatgagctgcgcaaagccggcgcagagcaaactctggttgccaaccagcaacgctgggcgttaatgacagaaacgccagatttgatgaaaatagatttgaactatcttgccagccgttttgatccagattcactggatctgattctagtggaaggttttaaagatgagccaatcaacaagatcgctctataccgcaacactcttaaccaccgattaaacgatcttcttgatcaacatgtgattgctgttgccagtgatgaacaattggagactattttgccacaattgaatatcaatcaacctgaacaggtagctgattttattgtcgaatggctgaatatggaacgttaa

SEQ ID NO: 8500 - DNA, 1653 bp, Photorhabdus luminescens
atgagaagcatctactttaaaagtgctcacatattatcccttcgtgataagaaaggcttctttttcgagttctcaccagacataaatatcattactggtgagaacgacacagggaaatctagctttatcaagagcctatatcatacattaggtgccgatgttcgactggataaaaagtggaaggatgataactttgtttcaaaagttgttatttgcgttaataatcgtgactatgcatttattcgtcacgaaaaacgtatttccatcttcgatattacagaagaacaagagcacctcttagtgacctctaattctcgtacagatattgcattgactgtacgagatatctttgactttaatttagaattagtcttaaaggaaactttagttcaagggcaagcacaacctgcaagtctttatcttccattctatatcgaccaagataacggatggggtacagtattagattcattcagtagtttgaaaatgtacaaagattggcagaaaaatattttaaacttccatgctggtgtaaaacccaaggagtattacaaacttcaagggaaaatcaatttaattgatatcgaccttaaagaaatcagagcaacattaaaagctctggaagcagctaagaagcgtttcgaagaatcattcggaagagtactttttgatgttgatgttgaatattatgaagaattattagagcgttttcttcgtaagtgtcaatacttgcataaggaagaaacagggtacagaatcaaactaatcaaagtcttatctcaacgagacgaattagtggcagagatagaagagtcaaaaagacaactttatgaaaataacatcgattctctatctacatcggcaagtttagaagctaagtatgctgtacttgaaaatagagagaagcttttgcaaatcatacctgaattgtatgaccaaaagtcagtatatgatgagcaaattgccagtatcaaagaagatttgaaaaatgctcaaagattaagctctgagcttaaaggtatgcttcaagaagttaaagaacagttaactcttcaagacgttataaaatctcaagcaagtaagcaggttgaattcactttcgatgagcaaattaatgagttgctacaaaaaataagtgaattagatgttgccagaaccaaactctcgaaagaaatagcagagttcgatgataaaaaacgaacaagtgaaatcaatgaaaaatttaaagaatcattgaagttcgcacaaactgagttaggtattaaagacccaaaagttggaactattctccagtatggtccgatatctaagagtgaaactggcagtcgtgctcctagagcaatattggcttatcactatgctcttcttaaaacgatagaagataagtcaacaagccctatgcttcctgtggtaattgattcgcctaaacaacaagaccctgatccacatacgacgaaaaaattattcgatttatgtattgatggtctatcgactaataatcagctaattatcggttcagtttcttttgagagagaaacagatggatttaaaacattgacaatgactgaaaaatacagcttgttaaaagtaaatctatacgataaggtttaccagcaagttatgcctttataccaaaaagcatcgttgtcttaa

SEQ ID NO: 8501 - DNA, 1089 bp, Photorhabdus luminescens
atggggctagctgaagctttgattagtattccacagtctgaaagaggtggtgagattgctcaacgagggtttgactatcagacctgttgggctttgtctcaaatgttggaatatgaactggatggaaaaaactatgtatttatcttcgagtatcatgatgatgttctaatattagatgatgaatactctccaacagacctcacttttgctcaggtaaaaaccagtgaatcacattggactgcttatgatttacacaaaagcacaaagagaaaaccaatatctataattggcaagctatttattcaccatagaaacttttgtaactactcgcctcagctattgtttgtgactaatgcgtcatttaatttatgtgagaagaatggtggtaaatctttatttagtgcaagtgaaataaaagatgagcataagattagcttcaaacaagcaatcaaagaccaagtgaagctcgatgatgaaaacattgatctttctatattgaagtttgttcaatcctcattaagcctagatgaccacatcacacacttaaaaggtaaactgtgcgatttcctttgtaataaattcggtgatgacactacattaagtgtaaatgtgctagcagctttgcttgaaaaagaatgtagaaacaaatctaaggtaaaatcagctgatatcgttgatttttcagaccttatatctcgaaaagggttttcatcccgagcatttaatggtgttctagactcattgaatgtaagtaatagtatgaagcctgattggaaaatggcggaaactatattcaacaacctcggtaagactctttttgagattattccgctaaaagcgacgttctcacaagtttgtatcgaccttaaccaaaatacaaagaatccgtcgactgtatatctagaatatgcaattaacctttacgatgaggcgagcgtttattcggatttgaaaatgtatgtaactggaattattcacaaaattgatgcactttgtccggattatacattggccttaaagtcaggaaagaaagaatgtattgttgtttactcaataatccagaagctattagagggaggtaaggtatga

SEQ ID NO: 8502 - DNA, 1371 bp, Photorhabdus luminescens
atggaaacaatccggatgagcaaacattacgactatatagcgattggtggtggcagtggtggcatagcatcaattaaccgtgccgctatgtatgggcagaaatgtgccctaattgaagctaaggcattgggtggaacgtgtgtcaatgtgggctgtgttccgaagaaagtgatgtggcatgcggcgcaaattgctgaatctatccaccaatatgggccagattatggctttgatgcgacaatcaaccgctttaactggaagacactcattgccagtcgcacggcttatatcgatcgtatccaccagtcttatgggcgtggcttgggtaacaataaagttgatgtgatccaggggtttgcccgttttgttgatgcacatactgttgaagtgaatggtgaaaaaatcaccgcagatcatattttgattgcgacaggtggtcgtcctgtgtggcctgatataccaggggcagaatatggtattgattctgatggtttttttgcattggaagagatgccaaagcgggttgcggttgttggcgcaggctatattgccgtagaaattgccggtgtattgcatgctcttggtagtgaaacccatctatttgtgcgtcaacatgcaccgttgcgttcttttgatccgatgattgttgaaacactcttggaagttatcaataccgaaggacctactttgcatacagaatcggtgccaaaatcagtaagtaaaaatgcggatggtagcctgaccttgcaactgcaaaatggtaaagaacaaaccgttgatacccttatctgggctattggccgcgaaccagtaacggataatctgaacctgtctgtagccggtgttgagttgaatgaaaaaggctacatcagagttgatgaatatcagaacacaaatgtgaaagggatttatgcagtaggtgataacaccggtgcagtggagttaactcccgttgcggttgccgcaggtcgtcgtctgtctgagcgcttgtttaacaataaaccagaagaacatttggattacaccaatattccaactgtcgtattcagccatccgcctattggtactgtggggctgactgaacctcaggcgaaagcgcaatttggtgaagaacaggtgaaaacttatcaatcttcttttactgcaatgtataccgctgtcactcaacatcgccagccgtgccggatgaaattggtatgtgtcgggccggaagagaagattgttggcattcatggtatcggcttcggaatggatgaaatgctgcaaggtttcgctgttgcattgaagatgggagcaacgaagaaagactttgataacacggttgcaattcatcccactgcggcggaagagtttgttactatgagggggtag

SEQ ID NO: 8503 - DNA, 843 bp, Photorhabdus luminescens
atgctaagttatcgtcacagttttcatgctggcaatcacgccgatgtgctcaagcatactgtacaaagcttgatcattgaatctcttaaagaaaaagagaaaccttttctctatctggatacgcatgccggtgcgggccgctatcaactcagtagtgaacatgctgaacgtaccagtgaatatttggaagggattgcccgcgtttggcagcgtgaagatttaccgcaggagttgaacgcttatatgagtgcagtagctgcactgaatcagagtggcaacttacgttactatccaggatcgcctttaatcgcccgccatttgttacgacaagatgataagttcaatctgacagaactgcatccgagtgactttcctttattacgtaatgaattctcccgcgataaccgcgccagagttttgcgtgaagatggttatcagcaattaaaatcacaattgccaccactgagtcgccgcggattcattctgattgatcctccttatgaactgaaatcggattatcaggcagttgtacaggcaattcaggaaggttataagcgttttgcaaccggtgtttatgcgttgtggtatccggtggtattacgccagcagattaaacgactggttaaagagctggaagcaacgggcattcgccgtattctacaaattgagttggctgtccggcctgatagcgatcaacgaggcatgaccgcctctggcatgatagtgattaacccaccttggaaactggaacagcagatgaaatcagtgttgccgtggttacatcaggttctggtgccagaaggaattggtcacaccttggttaaatgggtggtgccagaatag

SEQ ID NO: 8504 - DNA, 153 bp, Photorhabdus luminescens
ctgggatgggtttttagttgtcaggtactccatctggcaatcaacctattctctgctctggggtctgaaattaatgctaagttatcgtcacagttttcatgctggcaatcacgccgatgtgctcaagcatactgtacaaagcttgatcattga

SEQ ID NO: 8505 - DNA, 519 bp, Photorhabdus luminescens
atgccaactccatgttatatttctatcaccggaaaaacacagggtaatattactgcgggttcattcactgctgaatcagtgggtaatatttacgttcagggccacgaagatgaaatgctagttcaagcatttgatcatgtcgtcaccgtacccactgatcctcaatcaggtcagccttcaggtcagcgtgctcataaaccattccgttttacagttgcattaaataaatctgttccattgctttataacgcattggcttcgggtgaaatgctgacgagtgtagtattgaaatggtatcgcacttctgttgaagggaaacaagagcatttcttcacgacgcagttggaagatgccactattatcgacattgattgccaaatgcctcattgtcaggacccaacaaaagctgaatttactcagctggttcgtgtttctctgtcttatcgtaagattaattgggagcatacaaccgcaggtacttccggcgcagatgattggcgtgcacctattgttgcctga

SEQ ID NO: 8506 - DNA, 498 bp, Photorhabdus luminescens
atgagtaaaaatagttcaggtagcgtagcgccaaaagaaaggattaatatcaaatacgttccgaataccggtgatcaagtagccgagattgaattaccccttaacctacttatcgttggtgacctcaaaggaacaaaagaagatacgccaattgaagaacggcaagctgtttctgtgcacaagaataactttaatgccgtgatgaatgaagccaatatcaatctcacctttagtgtccccaatcgcctcaacgataataacggagatgacctgccaattaacctggaaataaaatcactcaatgatttctcacccgataacgtagcgaagaaagtgcctgaattaaataaacttttagagctgcgtgaggcacttgtcgcactaaaagggccattaggaaatattccggcattccgcacccgcttacaagagttattgggtgatgagaaagtccgcgaacaacttctaaaagagcttgaaatcgtcaatcaaaagtaa

SEQ ID NO: 8507 - DNA, 1479 bp, Photorhabdus luminescens
atgtccttgcatgaagagagcagtacaacattaaccccagggtccactacctctttgcttgacgagattatgtctcaggcaagaatgacgccggaaaatgatggctaccatatcgcaaaacaaggtgttgccgcttttatcagcagcattttggataccggtactaacgaagaacctgtcaacaagcttgtcgttgatagaatgattgttgagcttgataaaacactcagcactcaagttgatgaaattatgcatgccaaagagttccaagagctggaatcatcatggcgttcactgaaattgctggttgatcgtaccgattttcgtgaaaacatcaaaatcaacatcatccatgcgaccaaagaagagttactggaagatttcgaattttcaccagaaatcatccaatcaggcttatacaaacatgtctactcaacaggttatggccagtttggcggcgaaccggttgcggcggtcatcggtaactatgcgtttagcaatagctcacccgatatcaaactgatgcaatatgtcagcgcggttggcgcaatggctcacgcgccattcctctcttccgttgcacctgatttctttggtatcagtagctttaccgaattaccagcgattaaagatctgaaatctgtcttcgaaggcccggcacacaccaaatggcgtgcgctgcgcgaatcggaagattcacgttatctcggtctgacaacaccgcgcttcttgttacgtctaccttactcaaccgtcgaaaacccaattaaaaactttaactatcaggaagatgtcagcaaagatcacgaacatttcctgtggggtaataccgcttatctgctggcaacttgtttgactgacagcttcgccaaatatcgctggtgcccgaatattatcggcccacaaagcggtggtactgtcagcgatctaccggttcacctattcgaagcaatggggcagatccaagccaagatcccgacagaagttttagttaccgatcgtcgtgaatttgaattggcggaagagggttttatcactctgacgatgcgtaaaggcagtgacaacgccgcattcttctctgccaactcagtccagaagccaaaagtgttcccgaatacccgcgaagggaaaatggcggaaaccaactataaattgggtactcaactgccctatatgttcatcatcaaccgccttgcacactacatcaaagtgttacagcgcgagcagattggttcctggaaagagcgtcaggatctggagcgtgaactgaacacctggctgaaacagtacattgctgatcaggaaaatccaccaacggatgtccgtagccgtcgccctctgcgttctgcccaaattcaagttttggatgtggaaggcgatccaggctggtatcaagtggcaatgcaggttcgccctcattttaaatatatgggagccagctttgaattgtcactagtaggccgtctggataaggagtaa

SEQ ID NO: 8508 - DNA, 441 bp, Photorhabdus luminescens
atggctgcgctgcacagttggaatagagaaggctctgccagcctgttcgagcgtattcaggggaagaactctggttcttcccgccaatcaagaatgcgtgagctgctcaactccataaaacggcacctgaatcatgttctcaatactcatccgggtgcctgtcagagtgcggctgatcttggcgtcattgatctcaatgacgctacaaccacggcaactgactttaaacagagtattgagcaagcaatagagcactgcatcacaaattatgaaccaagaatatcgtcagtcactgtcaatgcaatccacgatgatagtgatccgctgttgttacgttttcacatcagcgcccaggtatccctggatgatattcatgacgctgttgaatttaatattcaactggataacaaccggcgttattgcctagagaggactcaataa

SEQ ID NO: 8509 - DNA, 1848 bp, Photorhabdus luminescens
atgtcacttgaaaaatattttagagaggaactggattaccttagacaattggggcgacaagccgcaattgaacatcctcacctcgcctcatttttgtctgaacaaggctctgacccggatgttgagcgtttactagaaggatttgcttttctcgcaggtaatttacgggcaaaaattgatgatcaattccctgagctgactcatggattgttacacatgctatggccaaattacctgcggccaacgcctagcatgaccattatccaatatacacctgatgatagtgccatcacaaaagcgacgcagatcccgcgtggaactcaaatcaaaagccgtccgctgacggatgatagcgaaaatgatgaggatgaagataattacttaagcaataccaatactcaaaaaacaggccaagacgatcatcgctgtactttcactttatgccgtgatgtttggctgtttccgatgtctatccgggacatttcggtcaataatagtaatgagcagggtgtcatcggtctgaatttcacctcaaaaacagaacttaacttacaagaactgcaacttgataaactgcgtttttatctaagcggcgatgattacagcagtacacaactctatttctggcttagttattaccttgaagatgcaaaacttgttgtaggcgataccacgatttcattaccggattttgacttcgttccagtgggttttaatcgggaggacgccctattgccttacccgaaaaatgcctatatgggttatcgcgtcttacaagagtacttctgtttttccgaaggttttctgtttttcgatgtcactggcatccctaaattaccggcaagtcttaaagccacagatttcacgctaaatctctatttctcagaagctctgccgccagaaatcaaaatccgtcaggatacttttcggttgcattgtgttccggcaatcaatctctttccaatggatggtgaagttattcgattggatggtagccgggacgaatatccattgagagcgagttatagccatcctaatcgctacgatattttctctattgataaagtagaaagctggctagtcgggcctgatggtaaacctaaactaagccgcgatggtagacgatcttatgtgccattcgaaagttttcaccatcaaatcgaacatgaaagcgaactcaatactcgctattttcgtatcagaatcaaggaatccccatttcgcaaagggcttgagcattacatctcttttgtccgtggtgatgaatctcaacttctattaagtgaggaaaatgtctctattcaactgacgtgcaccaatcgcgaactgccacttcaactccgggtaggtgatattgattaccctttatcgggaagctcgtcatttgcgacattccgcaacataacccgcccatccgttccactctatccattgatgagcggtgagtatcactggtcgcttatttccaatatgtcactgaactatatgacattattggacaaagacgcactaaaggcggtactaagaacttacgatctccccagccgatataaccgacaatcctcacgctcatcacaaaaacggctagatgccattgaacggattgaaacgaggcaaatagaccgactatttaaaggtctcccggtacgtggttcggaatcaacattgtatatccggcaacaggctttctgttctgaaggcgagctttatctgttctgcaacatactgtcacgcttttttgccttatatgccagcgttaactccttccacatgttgaaggtgatcaatttagataatcaggaatgttatcaatggccggaacagacaggtcaacatgcgttgatgtaa

SEQ ID NO: 8510 - DNA, 981 bp, Photorhabdus luminescens
gtgtcaaggtataactttcatcaattggtcgaattgttcaaccaattggcggtagcgtgggaaaaaactgggcaaaccaaccgtccggaccgtgaagcaattcagtttaaatccagcgccagcctggctttcccaaccagagatattgtctctgcgaaacgttctaaagagggacgtttccaggtggaagtctcttttctggggctacatggcagccaatcgcctatgccaggttattaccttgattcgttggcatgggaagacgcccaggatgaaaatcgactgactaacttccttaatatcttcaatcacagctctattgtcatgctccatcagatctggcggaaataccgttattacatctgttttgacaaaaacggacaagacgatttttctcagcgtatgtttgctttggtgggacttggcagtaatgtgaaccgttctcatttaaatatcaaccatagcaaaatgctggcctatgccggcttattagccagccccggtcgatcaccggaagtgatatgcagcttggtttcacactgttttgatctaccggatgttacggtacacggctggcaaatcagaaaaatcgctatcgagccatcacagcaaaaccgtttaggtggaatgctgaaaataaggggacagaaacaaaaagttaaacagtctgtaataggaaaaaactttttcctcggttcatgggtgagaagctgcaatagtaaatttattttatgtatcaataatctctctcgtgaacacttcttgtcatttctcccagacggcaagaatttcctgccattggtaatgtttctctgttttgtcctgcgtgatcagatggcttgggatctgcgtcttggcttggccgaaaaccaagcgggcggcatggtacttggcacgaaattaaacaataacctagggtggaccagctttcttggcgaaccggaaaagaaaccctttatcacgatttcagtgaatggataa

SEQ ID NO: 8511 - DNA, 1287 bp, Photorhabdus luminescens
atggaaaaacaacagccaactctctcattacgagtgatcaacagcgatcaattggaaagcggcaaagcggctagctgcctattctcgactcaaggtggcacagtcggcagcagtgaaagccatctttggtccgttcaagatcaacaaggtaatatcaatccatcacaatttactatccagtggcgtgatgacgcattttgcttacaaatgattgcgggtcccctgtttgtgaatcagtcacccttgacttctggcgccggtttcatccgcctgcaacaagcggatgaaattaccattggtaaactggtgatcaaaagctatatcagtttttccgacacagatcgtattgatccaatgacagtatcaccggaatcactggtctccagctatagcaatccactggacgctatgatggaaaaagatcctgctcaagattccgctttcactgatcatggttctttggcccccacgatcaaacacgatttcagccatgatccactcaaggttctcgatagcgaaaatctgaccactctggaccagacgtcagtgagtaacgaggtagaccaaagcctgcaacaagaccactaccgcaccccattatttttctcttccctctcagataacagaggcaatgctatggatcaggattttgttgatttacccggtatctcttcgccttttaatgaacagtatcaggacatggaacagcaacatgttgctatcacgccattgatgcgagggttgaacacacaattgcctttgcataacagccaacaagctaacgactttctggaagaaatgggtaaaaccatgaaagcggccattgaaggtctactggtactgcaacgtacacagcatgggctgcgtgataaacaattgcgccctattgaagataatccgttacggctgaacatggattacaacaccaccatgcaagtgatgtttgcggatcaaaaaagcccggtacatctctctgccccctccgctgtcgctgaaagcttacataacctgcaattgcattatcaggctaaccggattgcgatcactgccgcattgaacaccatgctggatgctttctcaccggaacacctactgaatcgttttgcccaataccgccgcagcaatgaaacacaggaaaaagatgcaacctgggcatgggaaatgtacaccagttactaccgcgaactggcttccagccgccaacaagggttcgaaaaactgttcggtgaagtctatgagcaagcttatgaccgtgctctacgtcaaggtttagaggatagccagtaa

SEQ ID NO: 8512 - DNA, 567 bp, Photorhabdus luminescens
atgaagcgctccggcggtaatacctcatggttcggtagtaataccgtatggtttgtattgctggcagcgctgatgttaagcggttgtagcagtgcatggcaggcaacgaagaaagtcggacaggtagtctgggacccatcaactccagttggtcaacctgcgaacttaccttccaccgtcgcgatcactttgctggcagaacctgatattaaccccaataaaaatggagaagccactccggttgaaatgcatctgctctatctcagtgaagattcccgtctacttgccgctgattatgaccaactggcgagtgacaagctggataaagcactggggaaaaattatatcgaccatcaggattacaccttattgccggggcagtacaaaccactgccagtcatcccgctggaaaaaaatagccgttacatcggcgttatcgttcgctatgccgatattaatcaatccgaatggaaaaaggtcatccgtgtgaaagacacaggacagcaataccacattctggtgcatatcagagcgaacgaagttgaacttagaaaagaggagcaataa

SEQ ID NO: 8513 - DNA, 1353 bp, Photorhabdus luminescens
atgccaggcaagaatcgggtgatttggcgcgaaggattattcatcaagccacaacactttcaacaacaacaaaaacataatgactatctggctcatagccgccagacgtccttaactagttatagttatggcttcagttctctgacactggataaagaccttctcgctctaggacgcatcagtatcatcgaagccagcggtatcatgccagacggcacagtgttctcgattcctaatcaggatgcaactcctcaaccgcttgatgttgtgaatattcacgagaacaacagtaaagatatctatctggcgctaccaatagctaacgatattctgaatgaaatctctcattcagaatccaatcatgcaggagctgtgcgctaccgtgaatacatggaagatatccgtgatttgcatacagatggcggtgatatctgtcaagtcatgctggcacaactgacgccggttctaaaacagggttcagaagatctcagtgctttttccgtactcccgctatgccagataatagaaaagcgccctaccggaactatcatactggatgaagatttcgtaccaacctgtacatccatcagggtctctactcaattaaaaaattatatggatgaaatagatagagcgatgacagaacgaggcagatcactcgctaaccggattggttctcccggacagcaaggagtcgctgatgttgctgaatttatgatgctccagctagttaaccgagttcagccgtggtttacccactacgcaggacaagccattttgcatccacaagattttttcactcagctgatccaaacctgtggtgaactgagaacattcactcatgaatcccgtcaggtcggcaatatgccaatttacaaacacgacgatctgacggaaacattcaaggaagtcatgatcctcatgcgcgaagcaatgggcgttgttctgaccccgcgagcgattccaattaagctacaaactcaagccaatggtatccgggtggcccacatccatgatcgcaatgttttgacgaacgcggaattcattctggcaatccgcgcacaagttccacatgatcaattactccgcaagtttgctcaacagactaaagttacatcggctgaaaggatccgcgaaatggtcagcatccagttgcctgccgtagcactggcggcgcttccctctgccccacgtcagttgccttatcatgctggttacacctatttccgacttgagcaacaaggcgacgcatggaaagacattctaaaaggtaactccatcgctttccacgtttcaggagaattccctggattagatatgcaattctgggcggttaggaatgggagtgcctaa

SEQ ID NO: 8514 - DNA, 771 bp, Photorhabdus luminescens
atgaaaactgaaaccataaatggcaatcctattccgacgcaggaggtcactgataatgccgtgcatcttcagtatcagttaccgctgcgcggagaaagcctaaacccgatgatcgatgccgctacaccgctgctcggcatggtcatgcgtctaaaagacatgggcgaacaaccgctgccggaccagctttatcaacaggtcgtcactgatattcaggcaatcgaacaacttctacaaaccaaaggctatgagccgggcgcaattatctcttttcgctatacgctctgtaccttcattgatgaaaccgcattgggtcatggttggaacagcaagaatgagtggttacaacaatcactactggttcgattccataatgaaacctggggtggcgaaaaagtttttcagttgctagatcgtttgatgggtgaacctcagcgctatcaacatctgctggagtttatctatctttgcttctgcctcggttaccgtggccgttataaagttgcttcgcagaaaagtgatgactttgaacgtttattccgtcgattacaccaacaactgcacgcgctgcggggagaagctccttccatcattctccacaataacgccaatgagcgtaatgatcgctatcgcctgggtaagcgtctgactattaaacatctgttctggagcggtattacgctgctcgctatcgtttatagcttctacgctatccgtctgcacaaccaaacccagaacatcttacaacagctaaataacttactgagctag

SEQ ID NO: 8515 - DNA, 2646 bp, Photorhabdus luminescens
atgattcagattgatctacctacactagttaatcgcttaaatccgatgactcggcacgctctggaagcggcggcagcgcaatgtgtcagccaacagcaacctgagatcacggtttcacagctattgttgcaaatgatcaacacccctctcagtgatgtcagagcgatcttcaatcaagccgaagtagacagcgatttgctgaaagaacaacttgatcagatgatccctcaccatcaagcaatggttcaggcttatcctaacttttctccaatgttagtggagtggttacaggatagctggctgttagcatcgactgagatgcaacatcaggaattacgcagcggcgtcatgctgatgaccttgctgttcagcccgctacgttacctgacaccccaatccgcacgtcttttatcgggcataaaccgcgaattgttacgccagaattttacccaatggaccgcgggctctgctgaacaaccggttgtggaaaacgataaaaacggacaaaacaaagctgccgccgggagtgatagcttgctcgcccgttttactcaaaatatgacagaacaagctcgtcagggaaaactcgatcctgttctatgccgtgacaaagaaattgacctaatgatcgatattctctgccgtcgccgtaaaaataacccgattgtggtaggtgaagcgggcgtcggtaaaagtgcgctcattgaagggttggctctgcgcattatcgacaaccgagtgccggaaaaactgcataacagtgaattgatgacactggatctgggggcactacaagcaggtgcggcggtaaaaggtgaatttgaaaaacgtttcaaaggcattatgaatgaaataaatcagtcatccgtaccgattattctgttcatcgatgaagctcataccctgattggcgccggtaatcaacaaggcggactggatatctccaacctgctaaaacccgctctggcacggggtgaattgaaaacaattgctgcaaccacttggggagaatacaaaaaatatttcgaaaaagatgcggccctctcccgccgttttcaactcattaaagtggccgaaccgaccgcggaagaagccatcattattatgcgtggcctgcgggcaatctatgaacaatctcatggcgtattaatcgatgatgaagcgctaaaagcctctgcggtattaagcgaccgttacctctctggacgccagttgccagacaaagccattgatgtgctggataccgcctgcgcccgcgtggccatcaacttgacgtcacctccgcgccaaatttctgccctgaaaaaccaactgcatcagcaacaaatggaatcagacgtgctggcgagggaacagcgcatggggctcaatcagcatactgatcgactggatgaactacgacaacaacagcaggaaaccacagagaaattggctgcactagaagccagttggcagcaacaacagcaattagttcagcaaattattgaactacgccgtcagctattaaccgacgaaacagaattcactaacgaaacaaaacagagcgaaacatcggccgaaatgacaactgaagagttgattgcacaattggctgaactgaatgaacagttggaacaattacagcaacaacaaacgctcatttctcctcacgtggataaaaaccagattgcaacggttatcgctgaatggactggcgtgccacttaatcgtctgtcacaaagtgaactttccgtggtgacagaactgcccatgcacctgggacaaagcatcaaggggcaggatctggctattcaatgcctgcatcagcacttgttgaccgccagagctgacctgcgccgtcccggtcgtccattgggcgccttcttgctggtaggacccagtggcgtcggtaaaaccgaaaccgttttacagattgccgaattgatgtttggcggacgtcaatatctgaccacgatcaatatgtcggaatttcaggaaaaacacacggtttcccgcctgatcggctcacctccaggctatgttggctatggggaagggggggtactcaccgaagctattcgccagaaaccttattccgtcgtcctgcttgatgaagtggaaaaagcgcatcctgatgtcctgaacctgttctatcaggccttcgataaaggtgagttggccgatggggaaggccgggtgattgactgtaaaaatgtggtcttctttttaacgtccaatttgggctatcaaactatcgtcgataatgccgataaaccggcagagatgcatgaccggctttatcctgaactggccgctttcttcaaacccgccttactggcgcgaatggaagtggtgccttatctgccgttaggacacgacaccctgaaaaccattattcagggcaaactggcgcgcctcgataacttattgcgtcaacgcttcaatgccgacgtcaccctgagtgatgaggtggttgaagagatactgcaacgggcaactcgtactgaaaatggcgcccgcatgctggaatcgatcattgatggcgctttgttgccaccgttatctctgctgttattgcaaaaaatggcggccggaaaacagatccgcactatccagctcaccgttaacgaccatcagttcaacgcggtggttgaggagataccatga

SEQ ID NO: 8516 - DNA, 801 bp, Photorhabdus luminescens
atgaaacaacggctgaaaagcgcattagcattactggaaaatgactctatcgagcaactggttcatcactttcttgaggtgaatcaccaacgccagcgttttgatgccttgctggtctctctgcttaacgtgaatgaaaaccgtctggaatgctaccggttgccggcgccaaaccagataagcgcgctgcaactggatgtcaatatcggtgatatcaaccatccactggtccaaatcttgtacaaaggcacccccacgacgtggggatccctcaatcaaggggtacgtatcgaccatcgaaactttcgcctcttcgtagaagaactccctcatcgctgcggcctgcatgctattccgttgtttaactgcaacgggcaagcgtgtggcgtgattgctgttttcgccaaagatgtccatcgttttgctgacgatagcaacatgttttacatctactgccatgtcatgcaacaccgattgaaaaaattgcaggaactggaacaactgcgtgaccaattacgccagatccgccaggtttttcagacacagcgccagaaagaaaaacagcttgatgaattgctggcttcgttaagcaccacagccgaaaacaaaacctcagccagcgtctctcacgattacagcaaaatcgacaatttacctcaggcacttgaagagttcgaatgtgcagtactgatacaacgccagcatatttacggcaacaacaccaaacagattgccgccagcctgggtattgcaccccggacactgacttacaaactggcgaaatacaggtgtaaattatga

SEQ ID NO: 8517 - DNA, 648 bp, Photorhabdus luminescens
atgaattttctgctactggtcagttcattaatcgcctctctgacaggcacccctgatactcagccagatcaggaaaccccaacagcgccttcactacccgctttgctgcaatgccgggcagaaccgtcaccgttggtcagagtcgattgctacgaccgtctattggataaagtcgataatattgccgttatcccgttagaaaaaaccggcccggtctggagacaggcaatggaacaggagatgaaacgcactgaccattcaaccggttttatcaccacccaatctgacagcctaccgactcgcgtcatactgaccacccccgcaatcggtgttccaccaccccggccagtcctgatgctgagttgtatcgataacattacccgaatacaaattgccctggctaaaccacaagatagcggcacggtgatgatgtcgacggaaatcacccaattcagtgctgactggttcttgcgggaaaacggctacctgctggaatccagccgtggactgccgggcattgaagaactcaaacgactgatgacaggaaaaaccctgaccatcaaaaccggcaacggaaaccgcatgacattcaacatttctcaactggaacaggcggtgaaacctttacgctccgcctgtcgctggtga

SEQ ID NO: 8518 - DNA, 1434 bp, Photorhabdus luminescens
atggatatcaggaaacaatttgactggcagggcctcctgctgacccccctgtcggatgaactcatcagccgggcgctggatgaaaacgaacccgcctgggaatatatcgacggggagatggttaagctgggatcactggcccattccagcctgaatattgaagagatccagcgtcaggcgctgcaactgttcagcgaaaaaagcaaagatttcagactgatggttcatttgctgcggacactgcaacacggcagtcatcccgctgaactcatcctggcaatggagctgttagccgattacatcccgcattactggcaggcagcctggccacacaaaccgcagctcaaacgccgcctggcgcaacaggtgattaaacggtttgacgctgcgcaacccggcttctgcgaacaggcggatgagacgcagcgcgaagaggcgcagggcgcactggcacatctggcacaatgctggcataccgatgaaccggctctggctaaagagatcgaccagttacgcccccgctatgcccgtaaacctcagcccaaaccggcagccgcgccggctgaaccggccgaaacgacagcaccatcggcaaacacttcagcactgacatccccccccataccggatgtcaccgtagacagtgccggtgaaaaagcctggaaacagacgctcctgaccgtggctgacctgctgtgcgaacgccagcctgattcccctgtcggttaccgtctgcgtcgttatgctatctggtacaccctgaccacagcaccgatggcgaatggcaccggcaaaacaccgctggcaccgacgtcggcagaccgcaccgccgattatctggcgaaactcccggcggcggataacgccctgctgcaacagatagaacagagtctgaccctggccccttactggctggacggacacgctctcgcggcgcaggccgccggcaaactgggttaccacgccgtggctgacgctatccgcgatgaactccgggcctttcttgaccgtctgccggtcctgcaaaacctgtctttctccgatatgagcccgtttatctccgacgccacgctgaactggctgcatcccccggcgaccgccaccgtcagcagcggctccacgccggaacaggacgccatctggcactgttttcagcaacacggactggaagccgccctccacgccgcggagcaatatcagcaacagctgaccgaaccgcgggatcaattctacggtcagttactgacggcccagttactggagcaggcgggcatgcacgcgctggcacaacaacattaccgccagctgcgccaggcaggacaacacctgtcactcgccgactgggaacccggcctgctggcggccctggcagaaaaagccccgatgaccgcccccgccaaggcgacgaccgcaaacaggagcgttaacccatga

SEQ ID NO: 8519 - DNA, 3546 bp, Photorhabdus luminescens
atgaactggctttctctgctgctcaacaatatcaaaaaaccggcgaggccgcgtctgccgcccctgaaagccaccgcctcgctgatactggccctcctgccctgtctggccctcatctggctctggtggtggggccccggctggcagtttaagcagacgcatccgctggacaccctgtctgcccgctggctggcgacggtgatcatcctcctgctggccctgagttttatcgggataaaaatctggcgccgcctgcgccagcttgaaaaacttaagctggagggggaactgaacaccgtcgatccggtgcgcgccgatatcacccgtcaggaccgttatctccatcactggaaagcgcaactgcaacgccatctggggacccgggattatctctaccagcgcccctggtacctggtgatgggtaacaccggcagcggcaaaaccgccctgattcaggccggctgccggctgactgacattgccgccccggacaccctgagcggggaagaggcgctgcccctgcatctgcgctgctggctgggggagaaagccgtcatcattgacccggacgggttccttatcgaccagatatcgccgccggacaccggcaaaccccagctgcccgcccgcctgtggcaggcgctgctcgtctggctcaccgaaaaccgtcagcgccagccgctcaacggcatcatcctgacggtggacattcaccgcttactgaccgacaacaaagcgcagcgggaacgggttattgccgcgcttcacctgcgcctgcaggatctgcgattaactctgcatcatcctctgcctttctatctggtgctgaccaaactcgaccggctgcacggtttcagcgccgctttccagtcgctggacagcgcgcagcgcgcccagatcctgggcgtcacctttagcctgaatgcgcgggatgagcagagctggcgcactgagctggcccagttctggcaccagtggatgcagcagctcaacgcggccatgccggacatgatgctcaacaaagtcgatatcagtcagcgcagtccgctgttcagcttcacccgccagatacaggggctgcacagctatctggtgccgctgctggaggggctcctcgacaacagcggcccggcacagccgggcctgcggggggtttatctcacctcgtctcaacaaatcggccagatggatgacctgtttacccagtctgccgccgtgcagtatcatctggggccgcaggcttttcccacctggccggtggcggacaccgtgccctacttcacccacgcgctgtttgaagcggtcctgctggccgaaccgaatctggcggctgaaaaccgccggtggttaagccgccaccgccacacactgctgaccttctccgccgtgggtgccgccgtggtgctggccctgtggagcggctggcactattactatcagcagaactaccgggccggtgacgaggtcctggcgcaggccaacatcttcctgtcggtgccgccgcccaccggcgaagaccgtctcggcaatttacagcttcccctgctcaatccgctgcgtgaggccacgctggcctacggggattaccatcagaaagggctgctggcggatatggggctctatcagggcgcagcggtcggcccgtatgtggaaaacacctacctgcaactgctgtctcagcgcttcctgccggccttaatgaacggcctgctggatgacctgaaccgggcaccgaaaggcagcgaagaaaaactggccgtcctgcgtatcatgcggatgctggaagatggcagcggccgccataaatcactggtcgaacactatctgcaggcgcgctggagtcaggcgtttaacggccagcgcccgttgcaggcgcagttactgacgcatctggactatgcgctggatcacaccgactggcgggccgcacgggaggcgggcgatcaggccgctatcagccgctttgcaccttaccaactgccgctcatcaatgccgagaaagaactgagtcagctctcgatttatcagcgggtctaccagaacctgcgcattaaagcccaggattcactgccgccgcccctcaacctgcgcgaccagattggcccgggctttgaccgcctctttatggccaataatgacaagcaactgattatcccgcagttcctgacgataaacggcctgaacaactacttcgtcaaacaggacgaccagctgatcgacctcaccgtcatggacagctgggtgctgaacctgtcacacaacgtgcagtacagcgacacggaccggcaggaaatccagcgacaaatcactgagcagtacctgggagactacacggccacctggcgcgcggccatgaacaacctggatattcgtgatttcaccgatatcccgcaggccctcagcgcccttgaacaggtcatcagcggcgaacagcccatcagccgggccctgcaaatcctgagcgacaacacccgtctgccggagattaacgagacgctgccggccaaagcccggcagccgttacgtgataccccggattaccgcctgcgggtgcgtattcaccgggaattcgcgccggaaaccgcggtgctggaggagtccggggacaaaaacagcaccctgcagggggtttatcagcaactggcggccctgcaccgttacctgctgggcattcagaacgcgccggtcccggggaaagccgccctgaatgccgttcagcagcggcttgaacagcataacgacgacccgattttcgacgtacagcagcgggcgaaaaccctgccggcaccgctcaaccgctgggtcggcgcactggcggaacaggcctggcgggtggtgatgcgggaagccatccgttcgctggaaatcgaatggcacgacaccgtcgtcagacagtaccagacctacctggccggccgctatccgtttaacccggacgcgacggaggaggtgccgctcagtgagttcgggcggttcttccggcccggcggcacgctggatgccttctatcagcagaacctgaaaccgtttgtggaaaacaacctgacccaccgcgcggacggccagcaacttatccgcccggatgtgctggaacagctgaaacgggccgaccgtatccgcgacaccttcttctcgccgcaaaacggtctgggggtccagtatgccattgagcccctcagcctgaccggcaataaacgccgcagcctgctcaatctcgacggccagctgctcgattacgcccacggccgcagcagcattgtgcacctcatctggcccaacgcgatgcgggccggggtggaaagccagctcacgctgataccggatgccggcggcaaatccccgcgcgccatccgcttcaccggcccgtgggcccagctgcgcctgattaacagcggcaaactgactaacgtacgtcaggattcgtttgatgtgcggttcacggtggacgggggcgacatgacctaccgtctctacgtggatgaatccgacaacccgtttgccggcggcctgttcagtcagttcagactgcctgacaccctgtattaa

SEQ ID NO: 8520 - DNA, 717 bp, Photorhabdus luminescens
atgcgtgaacgccctgaaaacctgattatccgtgccggcggcaacccgatgacgctgccggcgttcaccgccatacgcgaagaaattaacaaaatcaatcacccgtctcagccggcggtgaactggccgcttatcgaatccctggccctgacgctgtttcgctcccacggcgtcgatttgcagagcgcgatttactacaccctggcccggatgcagctcagcggcctggcggggtttaccgaaggctgtgaactgctggccggggtgatggtcagccagtgggatgacctgtggccgccgcagccggcggtccgcaccgacctgctggactggtttaacacccgctgcggccacgccttacgccagcacgattacaccgcccgcgacctgcggatgatttaccgggccgagcgggccttacagctgatagtcgaccggctccagcagtccgacctgaaacgcctgccgaaggtcgaaaacctgctgtggttcttccagaacaccgccaaaaaactggaacagacccgcatcctgcccaagcccgccgccaaacccgtgcagatgccgccgctggtttatctcgccagtactgaaccggcgccgtctgaaccggacaccggcgacgacgcgggatatgccccctctcagccaaaagtccaggtccgtttccctgaaccgccctgtctcttgatcagatctccaaatcaactgatttag

SEQ ID NO: 8521 - DNA, 1383 bp, Photorhabdus luminescens; identical to SEQ ID NO: 7510

SEQ ID NO: 8522 - DNA, 678 bp, Photorhabdus luminescens
gaaagacaggaaccgcccccgcggccgatgagtgccttacaggggttcggcctgggcctgttactgggtgcattcgtcctgaccgggacctggctgggattttaccggccgctgcaacagcaattcactgccctgactgacaccccggacggggccagactggcctggctgtcccacccagacctgacaacctatgcccggcagttaacccggttagcggacacctccccgctggtggtgctgcaacaggctgagcagctgaccgacagggcacaaaaaacctggccgcaggaccgccggcagcagcgggaaacgcagcgctggcagcagttacagtccatccggcgggaaaacgcgccggtctccggcagctggcagcagacccggcatcagctccagttactggcggacaatatcctgacccaggagcgcaaccggggcagtttcaccctctcttacctgaaaacggcgatttaccaaatccagcacagccacaaccgtgacgtcccgctggaagagctgctgcgccagctttccgtcgccgtcgaacagggtgagagcgtctcgccggcgctgataaaaaagaccgacgaccggtttaacgccctgctcagccagtattacgcgttgcagcaggccgccggcctgaccgcgctccctgagaaaaaccgcccgtaa

SEQ ID NO: 8523 - DNA, 1836 bp, Photorhabdus luminescens
ctgagtccgcaaagcgccggcgggttacagtttaccctcaccgccggcggcctgccgccgcacacctttgtggtggccggctttaccctgcacgaagccctctccaccccgttcacgctgaccgtcagtttagccagcgccgacccggcgattgatttcgccgccgtcctcgaccagagcgccaccctgaccatcctgcgcgccggcaaagtcgagcgcaccgtcaccggcatggtcgccagctttgtccagggcaataccggcaaacatcagacccgctatgacatgaccatccggcccgatatgtggcgcaccaccctgcgccagaatgcccggatttttcagcagcaggatatcaaaaccatcctcaccaccctgcttaaagagaacggcgtccgggatgtggcgttcagcctgcgcaatccgcacccggaacgggagttctgcgtccagtaccgcgaaaccgattttgactttctgcaacgcctcaccgccgaagaagggattttttacttctttgaattcaccggcaataaaaacaccctggtgtttgccgacgatgcgggctctgtcgtcaaaggcccggtgctgccctatcaccccgacgacgctgaacaggcccggcaactgtgcattacccggctgacccgccaggcgcaggtacggccggcggtggtcgagctcaaagattacaccttcaaaaacccggcctgggcggcggagttccgtcatcagatgcgggaacaggacctccagcataccggctatgaacatttcgattttcccggccgcttcaaagacgaacagcacggcgctgatttcacccgctaccggctggaagcgctgcgcaacaatgccctgaccggcgacggtgacagtaatgccgcgacgatgcagcccggcgtgctgttcaccctgaccggccatccccggcctgacctcaaccggtgctggcagctggtcggcgtcacccatcatggcagtcagccgcaggcgctggaacaggccgccggggagagcggcaccgtgatgcgcaacgactttaccttcattgctgataatcagcactggcgcccggccccgttacccaaaccggcgatggagggcccgcagattgccaaagtggtcggcccggccggcgaagaaatctactgcgacgcctacggccgcatccgcctgcaattcctctgggaccgctacggccggagcaacgacagcagctcctgctggatacgggtgacccagccctgggccggtcagggctggggcatgctggcaataccgcggattgggcaggaagtggtggtggactttcttaacggcgacccggaccagccgattgtcaccgggcgcacctaccatgccagcaatctcccgccaggagccctgcccggcagcaaaacccagatgaccttccgctccaaaacccataaaggggacggctacaacgaactgcgcttcgaggatgccaaaggcagtgaagcgctggctttacacgcccagcgggacatgaacaccgtggtactcaataaccgcgaaacccgggtcatgaacgaccacaccgaaagcatcggccataatcagatgctttcggtcagaaacgaccgccacaaagaggtgacaggcaatgaagtcagcgctatcaccggcctgcgtcaaatcacggtcgaaaaagacagcctgctgaacgtcaaaaataacatccagatacaggcccgggcggggggtatcgaaattgccacggccggcggcagcatcaccatcgacaatgccggcaatatcagcattcagggggccaatatcaccatcaatggcaaacaggtcaatgtgaactga

SEQ ID NO: 8524 - DNA, 420 bp, Photorhabdus luminescens
atggaaaacacaacctatcagatgaatgaaggctcactggctatcccgggcaactggcgggatgaatccatgaatgtatttgtgctgccggacgacagcggcatcaatctggtggtcagccgcaccccggtccccgccggcatggataaccccgcttactatgaacagaccctggagcagttctgcacccatctgcccgggtaccaggagcatcagcgcagcgaaatcaccctcagccagcaacccgcccgccgtctggattaccagtggacaagcccggaaggcgacatgtaccagaccgtgatactgcaaatccggggcccgctgctgctgaccttcaacctgacctcccccgcgccttttgaagccggccagcgtgataccctgctggcaattgtccacagttttcaggcagcctga

SEQ ID NO: 8525 - DNA, 4416 bp, Photorhabdus luminescens
atgtcacttggtgatgaaatcgtcacccggatagcgcgggttggcgcccggcacgcggtgcacgtctccccgccacagggctcccccggtccggccgccgcccgtgagggcgacccgattaaacatgccagcttcctgggggcgctggcgggtgccattaccggcgcactgataggggcggcggtctttgccgcggcatcggcactggtgggactgaccattctcaccgggggattagccaccgtcgcggtcattgcgctgggaaccgccgccacatttgccctgggcgatgtcatcagcgccgccagttcggccgtcacgaacatggtggacagcatcggcccgccgagcggcaccctgacgagtggctcccccaatgtctttatcgaaggccaaccggcggccagagccaccaccgatatcgccgtttgcagtaaacacccggcgccgcccctgattgcccagggcagtgaaaccgtgttgattaacggctcgccggcggcccgggtggatgacaaactggcgtgtggcgccaccataaaatccggggccaaaacggtgtttatcggctccggtcagggaacttacctggcagtcgccgacgagttttccgcctgggaacgggcgatactgatagcggttgaatttctggtgccgccgtcacgaggcgcccttaaggggctgggtaagctgtttaccaaacccggtcagggaattcagggggtattgaaaggcgcgaaggcgggtgctaaaaaggctaaggcgctcctctcaaatcgaatttcctgtgccaaaaaagctttcagagaaactgaaggggcaaaacgttaccgggaagcgacgaaaaaattctttaccggcgacccgattgacgtcaccaccggccagttgtttgaccagcggaccgacatcaccctcggccagaccctgccgctggtgtttctgcgcagctgggtgccggaggaacagggcttactggggccgggctggacggacagcttctccgaatgcgcccttgccaccggcgaccgggtagaaatccgcaccaccgaaggggcttctctctattttgccttaccggccgcttatacccacagtgttaacccggaccacccggactttaccctgagccggggagaacagggatatattctccgtcaccgtgattcaccggtcagcaaatattttaccctgccccatccgtcatccgcctcaaaagaggcaccccggcgctggttgctgacggaacaccgggacgtgtatgacaaccggctgcggtttatctataacaagcactgtcaactgacacaggttctccacagtgacgggccggagttgacgctgctttataacctgcgcggacaactgacagagatacgccgcaccgatgaaaggttacaggaagtgatggcccgttatcactaccatgacaacggccggctggcggaagcggacagtactcagaacttccacctgtactatgaatataacgcgcagggcctgataagccgctggtccgatggcgaccagacctgggtggattaccgttatgataaacaggggcgctgtactgacagtgtgggagccggcggcttctatccggtccatctggattatgcccccggcataacccgctccaccaccccacaggggcacaccaccaccgggcattacaacgaccagcagttaatcactgaaatccacaccccgtgcggcggcgtgacccgttatgaatacgaccgctggggcaatctggtcagacagatattaccggaaggggaaaccctgacgctgacttatctggccgataccggccgggtcacttcgctgacggaggcgaccggcgcggtatggcaatacagctatgaggctgacagcctgcaactgaccggcatgaccgacccgctgcaacgcacctggctgccccagtatgatgaacagggccagccggccggatttattgcgccggacggccggaaaaccacgctgacccgcaatgctttcgggctggtgacatccgaaacagacccggacggcaacagccgcacacaggaatatgataagcatcagcggctggtgcgggtgctggatgaagagaaccggaccgtcagtctgggttatgacagccaggaccggctgcgcagcctgaccgcggcaggggcgctgtggcgctggcgttacgaccgtcatcaccgggtggcggtcagcgaccggccggacaaccagctggaacacttcacccatgaccgccacgggaacttaacctgctggaccgatgcccgcggtgtgaaatggcaggtcgagtatggcccgtttgacctgccggtcgcccggcgtgacggcgaggggcatcgctggcagtatcgttatgatgccgacacgctgcaactgacgcaggtgattaacccgcagggggaaacctacagctacaccctggatgccgacgggcgggttatcaccgagcaggattatgccggcacgcagtggcattatcgctatgaccggtcggggaactgcattgaaaagcgggacggggaagagaacgtgacccgctatgactatgatgctgcccgccggctgacgacgctgcacaccccggaaggccccacccgttatcattacgacagcgtgggccggctgttaaccgtggactccccggacagcaccctgcattttgaatatgacgggcaggaccggatagtgcgggaaattcagccgcacggagaaattcagcgtcactacccggataaccgcaccgcagaacggcagttgctgaccggcgaaacagcgccggtcaccggcccggcccggtttagcggtcagacccaccccggccgctggcagagccggcgggaagttaaccgggtgggagaactgattacgctgacgctggcagggcaggcacccctgaccatcgaacgggatgacgccggccgggatacgggacgttatgtggacgggggatttattctgcgccagcagtacagcctgatgggccagttaaccgcgcaacgggccggccgcaatccctattttttccggccggctgaaccggacgagattgagggacccgcttacgcgggcgtggcccgccggtatgaatacgataccgcgctgaatctgaccgccgccagtgatgacgggcagcaggtcaattatctcctcaacggcaacggccaggtgatttcggtgggggagggccggacactgcgcgagcattatcagtatgatgaaacggggtacccgtcaagacggtttgacggggtgcaggagattatgggggaaaccctctatcaggagggccatcgcctgaactgggtgggctcgcaccggtttgtttacgaccgggccggccgcatgcaggagaaacagtttttagcggaagggtgccggctggcgctgacgaaataccggtggaacagccagaatcagctgaccgggcttatcaccccggacgggataccgtgggaatatcgctatgacgccttcggacggcggacagaaaaacggtgtatccagagcggtaagctgaccacctatctgtgggatgggaatgtgccggcggaaatccgcgaatatcagcacggccggctgaaaatgatccgccatctggtgtttgacggctgggaactggtggcgcagcagacgcaggcgtttacgcttaatctggataaccgggtggagctgatggccggggaggtgcagacccagtatgcggtcagcgccccgaccggcgagccgctggcgctgttcgacccggcaggcaaacgggtgtggcgacgaccgaagcagtccctgtacgggctgcggctgggcggatacggcgaaaacccgcagctggacccgggcctgagatttgcggggcaactttttgatgaagaaagtggtttattttataaccgatttcgctattatttgccggaagcgacgtgctacctcagccctgatccaactggcctctggggtggtgagaatacctatcgctatgtgcaaaatcccacgaaatttattgaccctctagggcttgctggtgaaaatgtatttattcactatacaaataaagcgggttttgacggcattatgaagagcggtgttcttcatccaaacgtcagtggaaaagtttatataacggatgtactaatgtctccaaaagatgtaatgagagatttattgataaacaaccccaatcatataggacgaggagactatgcgattattttcaaaatagatccaggggaaagaggaaatatccgctcaccttctagattagaatatactcatgaaggaaagttgaaattgaataatattctgtatgccggtaaaaacccatatgccatattagaacatcttgattatgatacgagactcaaactcactgataatcaagttaaaatcagaaagtgcggaggaaaataa

SEQ ID NO: 8526 - DNA, 336 bp, Photorhabdus luminescens
gtgcggaggaaaataatgaagcacgaatctattcaattagcaagggaagaggtgaatgcaataatcaagctgatcctttacataaagtttgaatgtgaagatcctggaacattgatatattcaagtagtcctttgataaattcagcattggaaaaaatgttgaatatgtatggttataaggatgattgggataaagttttttcaaaatttctagaagcagataagaattttgtaatcaaaagagtcgaatatttagaaaaacatgaaaatagtcctcttgatgagggaattaagcagcaaatcttatcaaatcatgcatatccatataagtggtag

SEQ ID NO: 8527 - DNA, 552 bp, Photorhabdus luminescens
atgggtgagacaataagttttcatatggaaccggttgaattttttaaaagttcgtattttttatccggttctattggagaatttaatgaatatgaaattattgataataaagatatggcattaaagcttcttttcgatcaagacataccatgtaactatatggtttggagtgattttttttctgatctggtatccgagttttatcttcatgaggattataaaaaagcagaaaaggatatccttgacagaataaaaatatctacccaggatcaagttaaagaaaacattagaaaaagaaaactatatcttacaagaaagaaacaagggttagttgataacatagaatacgataactttctaaatgaagtaaatgacgaatgtaattacatgttaaatatgataagcatttatcgatatttattttcttttaatcaagactctaaattagaagaaatattttctatatttaaaaaaggagttatgccgtgcggtataaaaaaagataaaaagacattagttattttcaatcctattcttttgaagaatagttaa

SEQ ID NO: 8528 - DNA, 198 bp, Photorhabdus luminescens
atgacaatagccattgaacatttgcaggacattcagttaactcaccttgaagcgctggctttggcccaactggtcaagcggctgaactgggcggagatacgcgcctgtgccgtgaatgacgaggaggcgtatcagattaaggatgccctcggtaagcttcaatctgctctggcttaccgagggtatgcgccacggtaa

SEQ ID NO: 8529 - DNA, 150 bp, Photorhabdus luminescens
atgaggaaagaggaatttcatacaagttatagggagatgattgatgctggcgtacctaaagctcaagcaagaaaagcccttggcgatgcttataaatattttgataagcttagaggcgctaataaaaacaatccattctttgatatctag

SEQ ID NO: 8530 - DNA, 381 bp, Photorhabdus luminescens
atgaagaaagaagatattttagagaaattaaattctattgaaaaagaattgaatattaaattacctaatttttatagaaagtttttatccgagaaaattcaaaatgaaccttatattgaaataaccggaaaagatcaagaaaatatatatgtttataattgtgaatatgttattaaaagaaataaaacatataacattcaagaggctaaaccaaattattttttaatcggtcaagatggtgatcttggttactttatatatgtagaaaaagataaggaaagtgatattatttatagcctagacttgggggctttaggtagcgtagaaatggataaggaagcggataaagaagcaaatgatatttatagtttaggaatataa

SEQ ID NO: 8531 - DNA, 228 bp, Photorhabdus luminescens
ttgaacataaagtcaccatcgggaaaaatattcattggtgccggggaagataccacaggaggagatttagaacctgatgattcagaatatatttcaggaaagaagatatctttagaaaaaggaaattatctgatcttattaaagaaaaatgaaaacaacatacagatatcatttataaaaagtcagtatttttcaaataaccttcaggagcctattagattaggttaa

SEQ ID NO: 8532 - DNA, 708 bp, Photorhabdus luminescens
atggtctggtcaagtatctacaaccaaatgtgggagagtaaattaatgaattattatgtattaatgaacgattataattcttcactaatgccaagatatcttcatgctatagtagataccgagaatcaaattaatgaaaaatgggattatgaaggctccaggcatgatataccttattatctattagataaggaatgccctaatactttatatttgttatgtaataaaaatattgggaaattgtggtttaattattatcaacacaatatggctcatatcctatctgatagatttttcgatattatcaatgagtttaaattaagtgatcatgttttaaaaaaattaattgcgacatctattaaagatggaaaaactatcaataactcattaaattatcttttttttactgacaaagagttatttctaaatgaaaaatattcaatattggaaaaagataaatatggaaatttaattcctcataaattatcttttcataatgaatcattaaattatgatattttttcaatacggactactttattagcaggatttatttttatttcagaaaaagtagctaacagattaattaaagaaaatatcaaaagaataaagctaattaaattagatgaagtcttgaatcactattgtgtagattttaagtacgacattaaagctaatgtcaaaaaagggaaaataaaattaccctaa

SEQ ID NO: 8533 - DNA, 1026 bp, Photorhabdus luminescens; identical to SEQ ID NO: 6127

SEQ ID NO: 8534 - DNA, 168 bp, Photorhabdus luminescens
ctgggtgagataataaatttttatatggaacccgttgaattctttaaaagctcggattttttatccggttctattgaagaatttaatgaatatgaaattatggataataaagatagggcattaaagcttcttttcgatcaagacataccaagtaactatatggtttag

SEQ ID NO: 8535 - DNA, 360 bp, Photorhabdus luminescens
atgtgtagcaaaattatgaaacgctatttagatttagagaggcagttcacaatcaccaaatcttccgatgttcttattgatctaccgtggcgcatacccacagtaagtcagtgcggattgaagcttagagtttaccaaggaaatgatttatttgatctcaatcatattgatgacttcggaaggacgaatattcaacgaatgaagaaagggattacacctattggtaaggatggcttagaaataaaccttcatcatgtcattcaaaatgaacctggcccaatgactgaaattttaagtagtacccatagtaaatacaaccatatgcttcatatgtattcaaatcaatgggataaaacatag

SEQ ID NO: 8536 - DNA, 471 bp, Photorhabdus luminescens
atgaattatatagatttaattgaaaaggaaatgatatcaagcggggaagaaattctttctagtggcggggttgatatagatactatccgtgaattcgaatcattgcttggtgttacttttcctgaatcatataaatttttcttacaaaaatatggaacactttctttcggcggagatgattactatggaataactaaaaagggaataaatggaaatcaagccccatgtattctgtatgtaacaaagcaggccagagattccggtgatatagatgaagggatgattaaaataaaatcatcgggatatggtccttcctattctattgataccaatattaaaggaaaaacaggagaagctgtagtagttgagactgaattatccttcaaaagagacggagctaaaaacataattgcagatagttatgctgagtttctcttagaagaaataaaacaagctatagaagacttataa

SEQ ID NO: 8537 - DNA, 243 bp, Photorhabdus luminescens
gtgtatgctaacgccagaaaagcattatcaaaattagatgatcaagacaaaacagctatttttgacttcttcaaggtagtaatacctgatacatcatcaactatatttggaaccattgatggttctcattttccccccaatatagatggtgattttacgttaatttatggagacgaagaaatacaaggaagtttacaagatttattcatagaaaaagctgagaataaaggtatttttaattaa

SEQ ID NO: 8538 - DNA, 1320 bp, Photorhabdus luminescens
atgactaataaactgataaatatagataaaatatcagttatcatgaaggatttgggagctaaaaaaattatagttaagccacttgcaaacaatgacaattctaaacaacagatatatttgggagcggatttttctgtcatacagggtattcctgttgatgaactgaaaagcgctggtatgtcaaaaaaaggtgcgagatttaaggccacattaaatttattttggataaatactgacagttgtaaagaacaggcacatggttctcaaattattttgtatcctaactatccagaaattcgcctgtcgggaattataaatggttgttcaatagcaccatctcatttaatgcaaccgccaacgaaagaggaaagaataaatagatgtgataagaatcgttatttaattcttggtatatgtaaagacatggtttttgcttatatgagttcttgggaagacgctctttccattgagctcagagaattaatagataaaaatttaatgaatcctgttttctctgttttttatgaatattactctaatattaaagacagccgtagtgatcttataactcgtttgaaggaaatttattcttatggttttattaaatcgcaaagactggataaaaatggtaatgtaattgaatatagagcaagaaatggggcaggttttaccctggaaagtttatttggaattataccaaatggcagatctggacctgatttttctggttgggaattaaaagcacattcaggaagcgttgtaactttaatgacaccagagccaaataaaggagaatacatagaaaatttacataaatttatgagtgattatgcatccagtaaaaaagaggatagagtcgattttgccagtatacataaaatcggattgttaaacgaaaaaacgaagctgactttatatctcgaaggatatgattttgataagaaaaaaattatagatcctgatggcggattagtacttaggagtataaatggtaatattgctgctggctggaatttcggaaaattattagaccactggaaacggaaacattctaaaacatgttttgtctcgtatgatgtgaaaaatggtgatttcccatactataagtttggtccccaaattgtattagctacaggtgctaatcttaataaatttataaatgcacttgaatcaagtaaaatatactatgatccaggtgttaatataaaataccaggaaggattgtctaaagtgaaaaaaagaaatcagttcaggataaaatggaaagatgtattaagtatttatgataaagctgagagcttagatttaaatgaaaattaa

SEQ ID NO: 8539 - DNA, 474 bp, Photorhabdus luminescens
atggctgatgttcacaatccatccacccgcagtaaaaatatgagagcaattcgtaactgtgatacagccatagaaaaaaagctcgttaaaattcttcatgaccttggggtaacttatagagtgcaggtaagggagcttccgggtaagcctgatttcgttattgatgaatatcaggctgttttgtttgttcatggatgtttctggcatgggcataattgtcatctattcaaaactccggcaacccgaactgaattctggttagataaaattgagaaaaatatcagaagagatcaatttgttatgagttctctttcggataatagctggaagatattagttatttgggaatgtactttgagaggacgtttgaaactgacagataatgagttgtcagaaagaattgaagaatggctatgtgccagtgaaactcatgcggaaattgatacagtggggatacataaaatacttttatag

SEQ ID NO: 8540 - DNA, 1437 bp, Photorhabdus luminescens
atgaaagaatttttttcgtatgcccaggatctccatgaaaaatcgaagttattgcagcagcaaaagttggcatcagataaaaagctgatgggacaactttttgagtcttatgatcaaaaaactattgcagaacttttgcgcagagtaaattataacgactggacccgtgaaactttaaatcgctggtttcacggaaaatcagtccagaagttgttaacagaagttgaagttgctatgctccaaaaaatgctacctgaaccacccaaaaatcatcctcaatacggtttccgtttcattgatctttttgcagggattggaggaattcgaaaaggttttgaagaaattggcggtcagtgtgtttttaccagcgaatggaacaaagatgctgttcgtacctacaaagcaaactggtattgtgatccggaatcccataaatttaattctgatattcgtgaaataacattaagtgaaaactcaaaaatagatgaaaaagaagcttataaaaatattgataaagaaattccagatcatgatgttcttttggcaggctttccatgtcagccattttcattagcaggtgtttcgaaaaagaactcccttggtcgtgctcatgggtttgagtgtgatacacagggaactcttttttttgatgtggccagaattattacagctaaaaaacctgctatttttcttctggaaaacgttaagaacttaaaaagtcatgataaagggaaaacattccgtattatcatgaatacattgaatgagctgggatacgctgttgctgatgctgatatcatggggccgaatgatcctaaaattattgatggaaaatattttttgcctcagcatagggaacgaattgtgttagttggttttcggaaagatctgaatattcatcaaggatttacacttagggatattagtcgatatttcccgaaagaacggccaacacttgcggatttacttgaaccagaagttgacagtaaatatattcttacccctaatctctggaaatatttatataattatgccagaaaacatcaggctaaaggaaatggctttggatttggccttatagatcccaacaataaggatagtgttactcgcacactttctgcgcgttaccataaagatggctcagaaatccttattgaccggggatggaataaaaagcttggggaacaggattttgataatccagataaccaggaaaatcgcccgcgtcgtttaacaccgaaagaatgcgcacggctaatggggtttgagtctcctcagggagaagcatttcatattccagtttcagatacacaagcttatcgacagtttggaaactcagttgttgtgcctgtatttacagctgttgctaaattattagctccttatatagcgaaagcagtgaaacaacagcagataaacaaagatcaggcggcatag

SEQ ID NO: 8541 - DNA, 684 bp, Photorhabdus luminescens
gtgactcatctaaccacagcaccgatggcgaatggcaccggcaaaacaccgctggcgccgacgtcggcagaccgcaccgccgattatctggcgaaactcccggcggcggataacgccctgctgcaacagatagaacagagtctgaccctggccccttactggctggacggacacgctatcgcggcacaggccgccggcaaactgggttaccacgccgtggctgacgctatccgcgatgaactccgggcctttcttgaccgtctgccggtcctgcaaaacctgtctttctccgatatgagcccgtttatctccgacgccacgctgaactggctgcatcccccggcgaccgccaccgtcagcagcggcaccacgccggaacaggacgctgtctggcactgttttcagcaacacggactggaagccgccctccacgccgcggagcaatatcagcaacacctgaccgaaccgcgggatcaattctacggtcagttactgacggcccagttactggagcaggcgggcatgcacgcactggcacaacaacattaccgccagctgcgccaggcaggacaacacctgtcactcgccgactgggaacccggcctgctggcggccctggcagaaaaagccccgatgaccgcccccgccaagacgacgaccgcaaacaggagcgttaacccatga

SEQ ID NO: 8542 - DNA, 3546 bp, Photorhabdus luminescens
atgaactggctttctctgctgctcaacaatatcaaaaaaccggcgaggccgcgtctgccgcccctgaaagccaccgcctcgctgatactggccctcctgccctgtctggccctcatctggctctggtggtggggacccggctggcagtttaagcagacgcatccgctggacaccctgtctgcccgctggctggcgacggtgatcatcctcctgctggccctgagcgttgtcgggataaaaatctggcgccgcctgcgccagcttgaaaaacttaagctggagggggaactgaacaccgtcgatccggtgcgcgccgatatcacccgtcaggaccgttatctccatcactggaaagcgcaactgcaacgccatctggggacccgggattatctctaccagcgcccctggtacctggtgatgggtaacaccggcagcggcaaaaccgccctgattcaggccggctgccggctgactgacattgccgccccggacaccctgagcggggaagaggcgctgcccctgcatctgcgctgctggctaggggagaaagccgtcatcattgacccggacgggttccttatcgaccagatatcgccgccggacaccggcaaaccccagctgcccgcccgcctgtggcaggcgctgctcgtctggctcaccgaaaaccgtcagcgccagccgctcaacggcatcatcctgacggtggacattcaccgcttactgaccgacaacaaagcgcagcgggaacgggttattgccgcgcttcacctgcgcctgcaggatctgcgattaactctgcatcatcctctgcctttctatctggtgctgaccaaactcgaccggctgcacggtttcagcgccgctttccagtcactggacagcgcgcagcgcgcccagatcctgggcgtcacctttagcctgaatgcgcgggatgagcagagctggcgcactgagctggcccagttctggtgccagtggatgcagcagctcaacgcggccatgccggacatgatgctcaacaaagtcgatatcagtcagcgcagtccgctgttcagcttcacccgccagatacaggggctgcacagctatctggtgccgctgctggaggggctcctcgacaacggcggcccggcacagcccggcctgcggggggtttatctcacctcgtctcaacaaatcggccggatagatgacctgtttacccagtctgccgccgtgcagtatcacctggggccgcaggcttttcccacctggccggtggcggacaccgtgccctacttcacccacgcgctgtttgaagcggtcctgctggccgaaccgaatctggcggctgaaaaccgccggtggttaagccgccaccgccacacactgctgaccttctccacagcaggtgccggggtggtgctggccctgtggagcggctggcactattactatcagcagaactaccgggccggtgacgaggtcctggcgcaggccaacatcttcctgtcggtgccgccgcccaccggcgaagaccgtctcggcaatttacagcttcccctgctcaatccgctgcgtgaggccacgctggcctacggggattaccatcagaaagggctgctggcggatatggggctctatcagggcgcagcggtcggcccgtatgtggaaaacacctacctgcaactgctgtctcagcgcttcctgccggccttaatgaacggcctgctggatgacctgaaccgggcaccgaaaggcagcgaagaaaaactggccgtcctgcgtatcatgcggatgctggaagacggcagcggccgccataaatcgctggtcgaacattatatgcaggcgcgctggagtcaggcgtttaacggccagcgcccgttgcaggcgcagttactgacgcatctggactatgcgctggatcacaccgactggcgggccgcacgggaggcgggcgatcaggccgctatcagccgctttgcaccttaccaactgccgctcatcaatgccgagaaagaactgagtcagctctcgatttatcagcgggtctaccagaacctgcgcattaaagcccaggattcactgccgccgcccctcaacctgcgcgaccagattggcccgggctttgaccgcctctttatggccaataatgacaagcaactgattatcccgcagttcctgacgataaacggcctcaacaactacttcgtcaaacaggacgaccagctgatcgacctcaccgtcatggacagctgggtgctgaacctgtcacacaacgtgcagtacagcgacacggaccggcaggaaatccagcgacaaatcactgaacagtacctgggagactacacggccacctggcgcgcggccatgaacaacctggatattcgtgatttcaccgatatcccgcaggccctcagcgcccttgaacaggtcatcagcggcgaacagcccatcagccgggccctgcaaatcctgagcgacaacacccgtctgccggagattaacgagacgctgccggccaaagcccggcagccgttacgtgataccccggattaccgcctgcgggtgcgtattcaccgggaattcgcgccggaaaccgcggtgctggaggagtccggggacaaaaacagcaccctgcagggggtttatcagcaactggcggccctgcaccgttacctgctgggcattcagaacgcgccggtcccggggaaagccgccctgaatgccgttcagcagcggcttgaacagcataacgacgacccgattttcgacgtacagcagcgggcgaaaaccctgccggcaccgctcaaccgctgggtcggcgcactggcggaacaggcctggcgggtggtgatgcgggaagccatccgttcgctggaaatcgaatggcacgacaccgtcgtcagacagtaccagacctacctggccggccgctatccgtttaacccggacgcgacggaggaggtgccgctcagtgagttcgggcggttcttccggcccggcggcacgctggatgccttctatcagcagaacctgaaaccgtttgtggaaaacaacctgacccaccgcgcggacggccagcaacttatccgcccggatgtgctggaacagctgaaacgggccgaccgtatccgcgacaccttcttctcgccgcaaaacggtctgggggtccagtatgccattgagcccctcagcctgaccggcaataaacgccgcagcctgctcaatctcgacggccagctgctcgattacgcccacggccgcagcagcattgtgcacctcatctggcccaacgcgatgcgggccggggtggaaagccagctcacactgataccggatgccggcggcaaatcgccgcgcgccatccgcttcaccggcccgtgggcccagctgcgcctgattaacagcggcaaactgactaacgtacgtcaggattcgtttgatgtgcggttcacggtggacgggggcgacatgacctaccgtctctacgtggatgaatccgacaacccgtttgccggcggcctgttcagtcagttcagactgcctgacaccctgtattaa

SEQ ID NO: 8543 - DNA, 894 bp, Photorhabdus luminescens
atgcgtgaaccccctgaaaacctgattatccgcgccggcggcaacccgatgacgctgccggcattcacggccatacgcgaagaaattaacaaaatcaaccacccgtctcagccggcggtgaactggccgctcattgaatccctggccctgacgctgtttcgctcccacggcgtcgatttgcagagcgcgatttactacaccctggcccggatgcagctcagcggcctggcggggtttaccgaaggctgtgaactgctggccggggtgatggtcagccagtgggatgacctgtggccgccgcagccggcggtccgcaccgacctgctggactggtttaacacccgctgcggccacgccttacgccagcacgattacaccgcccgcgacctgcggatgatttaccgggccgagcgggccttacagctgatagtcgaccggctccagcagtccgacctgaaacgcctgccgaaggtcgacaacctgctgtggttcttccagaacaccgccaaaaaactggaacagacccgcatcctgcccaaacccgccgccaaacccgtgcagatgccgccgctggtttacctcgccggcaccgaaccggcaccgtctgaaccggacaccggcgacgacgcgggatatgccccctctcagccgaaagtccaggtccgtttccctgaaccgcccccgcggccgatgagtgccttacaggggttcggcctgggcctgttactgggtgcattcgtcctgaccgggacctggctgggattttaccggcctctgcaacagcaattcactgccctgactgacacctgtctttcctacacaaatattttaacccgcccccgcgttattgaacttttccctcatagattgatctcaataaaaaacacgacttga

SEQ ID NO: 8544 - DNA, 1383 bp, Photorhabdus luminescens; identical to SEQ ID NO: 7510

SEQ ID NO: 8545 - DNA, 435 bp, Photorhabdus luminescens
ctgggattggcagggtgccctcttattaatcgcatcgttaatgatgcgaataaagttgcgtcaccgggagggcatataacgtctaagcaagcagaaatattgaaaagtaacttacctgttgttcaaaggcgtagtgctcttcaaaatcaggtatctcgaaaagagtttgtgagagatcaagattatctaatgaagcaatgggagactaatacaggtaggacatggccgattggtgcaactccgcatcatataattccgttggaaagtggcggagcaaataagtggtggaatttaatgcctactcatggaacattacctaatcactcactacctggaatacctggcccacatgctgcgggaggggtccttcgcactacaatccaacaaggaagaaaagctcttcctccgggaaccataactgatttgagattgtaa

SEQ ID NO: 8546 - DNA, 480 bp, Photorhabdus luminescens
atgattgatattaacgaagaattaggacaaattaaaaagacgagttttttctctaatatgggtttatctgatcttcaggatgaagatgtaattttgattgagagtgttgaaaaggtatttattaatccttcggatattgaatttaaaggttattataaaaatactaaatggcttccaacatcaccaactcaagaagatccattttataagaagcaagatagcccgaaagatcttgtagaaatcagagtgaagataaataaagcggtcatgagtatgactaaagagttggctaaaggtaaatttatatctggaccacatgattttaaccaagtagcaagaaatgctatatgctatgcatttagacaatatatatctgaaaaatatcttaatcttggtaataaatgggaaagaatagtaaaaatatattatgcaggacattggcctgttggaatttctaaagaaaaaataatagtaatttga

SEQ ID NO: 8547 - DNA, 708 bp, Photorhabdus luminescens
atggtctggtcaagtatctacaacaaaatgtgggagagtaaattaatgaattattatgtattaatgaacgattataattcttcactaatgccaagatatcttcatgctatagtagataccgagaatcaaattaatgaaaaatgggattatgaaggctccaggcatgatataccttattatctattagataaggaatgccctaatactttatatttgttatgtaataaaaatattgggaaattgtggtttaattattatcaacacaatatggctcatatcctatctgatagatttttcgatattatcaatgagtttaaattaagtgatcatgttttaaaaaaattaattgcgacatctattaaagatggaaaaactatcaataactcattaaattatcttttttttactgacaaagagttatttctaaatgaaaaatattcaatattggaaaaagataaatatggaaatttaattcctcataaattatcttttcataatgaatcattaaattatgatattttttcaatacggactactttattagcaggatttatctttatttcagaaaaagtagctaacagattaattaaagaaaatatcaaaagaataaagctaattaaattagatgaagtcttgaatcactattgtgtagattttaagtacgacattaaagctaatgtcaaaaaagggaaaataaaattaccctaa

SEQ ID NO: 8548 - DNA, 144 bp, Photorhabdus luminescens
atggttttgagtaattttttctctgatctggtatctgaattttatcttcatgaggattataaaaaagcagaaaaggatatccttgacagaataaaaacatctactcaggatcaagttaaagaaaagatgagaaaaagaaaataa

SEQ ID NO: 8549 - DNA, 495 bp, Photorhabdus luminescens
atgacaaatatcataggaaataagtccacttttgctgttgaatactctcttgaaaatagaaaaaagttaattggtcgggcaagactctggattaacgggatttttttgggaagtttaggcgatacaatattttttgatggatatttaattggtgggcttacagaaattttaaataaaaataagttagatgagagatatttacttgatgatcatcatttaatctatgatttattagaaaatgacatgaatctctttgatgatgaaaaatatgatttagcaaaatctttctctgttaatttaggtacatggtcggattattttgatatgtactcatataaattaaccgataatctcggtattattttgtggaaatttattggtcataatgatgcattggaagatttaataggctatccacgctgtgtattttccgaacagtttagatatgatgaattggttaacataataaataggcttcatattgtaggatcttaa

SEQ ID NO: 8550 - DNA, 885 bp, Photorhabdus luminescens; identical to SEQ ID NO: 6610

SEQ ID NO: 8551 - DNA, 393 bp, Photorhabdus luminescens
atgtggtttgatcatgctatttttaaagaaaaaattaagttcatgtttaataatgaactatcgatggaacatgttggatttgaacaatttttatattatgacacatctagattaaaaatttttttctgtagcaaaaatataccaaacgttattccagaaaaatggaggaggaaaaagtttaattgttttatgatcacattgacatgtattgatgtttctgtattggaaattaatgggggaggagttgcatttgaatgtacccccattattgaatcaacgaaggaaaaaacagaaattacaataaaaaatgatggcttttacctccattgttctaccagaacaatggtaatagaggatattacaccgcattgggatgtacgatggactaaataa

SEQ ID NO: 8552 - DNA, 1026 bp, Photorhabdus luminescens; identical to SEQ ID NO: 6127

SEQ ID NO: 8553 - DNA, 354 bp, Photorhabdus luminescens
ttgatgaagcgagtttattcaaatccaccatctatcaatgagatagatattttcagcattgatgtaaaaagggatgggccaacagtaattatgtcatttgatcttgtaaatagtcttcctgataaaactccagataaatggggtaaagattttaatagatgtagagcaggtatttactgctttggtgtttctaacttaaatatgcaaggaattggaaccgatatgcttacaaaaatagatattaaaatgatggataataacaatatagtgagtattaaaaataacgatatagatataaaagttatttgctcacatataagtcttactggcccttctgtttacataagaaaataa

SEQ ID NO: 8554 - DNA, 168 bp, Photorhabdus luminescens
ctgggtgagataataaatttttatatggaacccgttgaattctttaaaagctcggattttttatccggttctattgaagaatttaatgaatatgaaattatggataataaagatagggcattaaagcttcttttcgatcaaggcatactaggtaactatatggtttag

SEQ ID NO: 8555 - DNA, 198 bp, Photorhabdus luminescens
atgaaagtggtgattgaacatttgcaggacattcagttaacccacattgaagcgctggccttggcccaactggttaagcggctgaactgggcggagatacgggcctgtgccgtgaatgacgaggaagcgtatcagattagggatgccatcggtaagcttcaatctgctctggcttactgtgggtatgcgccacggtag

SEQ ID NO: 8556 - DNA, 135 bp, Photorhabdus luminescens
atggacggttgtctggtgctgattccagagagtgaagccacgcaacaacagcatcagcagtaccagcggcaacaggcccaactgcgggagattaagcagcagatgcgggcgctgataaccggttttgcgggttaa

SEQ ID NO: 8557 - DNA, 348 bp, Photorhabdus luminescens
ctgctcactcagaagaaacagaaaattacgctatgggaattcttccagagcttgggtaaaacatttatgttgcccgtggcgttactatcattttgtggaattatgctcggaattggcagctctcccagtagccgagaggttattacgttactaccgatattagatcacacagcttttcggttgttatttgcctggatgagtaaaatcagctccttggctttcagtttcctgcctgtgatgttcgcgattgctattccgctaggtatggcacgtgaaaataaaggtgtggcatcttttgctggttttgtaggttttacggtatttaatctggggagcaactcttattga

SEQ ID NO: 8558 - DNA, 729 bp, Photorhabdus luminescens
atgaatattaatcgaccatatgccttaccctataattttcataaattagatgtagatccccattttgtagctgaaatttgtgagcttattaacaaaatttcggggtttagtttgttctcccttttattaaaggcgcgctttcctatctctaaccgagaagtgtatttctttaataattatcatgaatcttggcgggacctttatatagaaaaaaagtattggatgattgatcccgttctaaatttccggcctgtgccaccttctttttcaaaaatatgggatttagattttttttccaaatctaatgggcaagagctttggtatgtgaatcaaaaatatggatttcgttctggaatcacctttggtcttccggcattttcaggaacttatggaatattttctgttgcgggaaaagatgggcctattgataacgagacaatgtataaatgtagtggagaaattttaggagtatatattaggataataagatacttaacatcacacacaaagtatttgcaatcgttctatattgatgaaacttcattttcaaacagagagttagaagtattaagatataccgcagatgggatgacatcaattgaaatttcatcaaccatttgtgtcactaaaagcacagttgattttcacttaatgaatatcgtcaaaaaactggattgtaagaataaattccaggcaatagctaaagctgcattacttggctatatataa

SEQ ID NO: 8559 - DNA, 1617 bp, Photorhabdus luminescens; identical to SEQ ID NO: 7120

SEQ ID NO: 8560 - DNA, 591 bp, Photorhabdus luminescens
atgagtgaagtcattcagggtaaagatgatattgctataaccaagaattctattacagctgatgtaacctttgttattgatgttgattcaattattgaatatcttcgtaataataatcttaaaagttctctggatcctaaagatccaacagttatccgtcagcatgtatatatagctaattatactccagagcttggattgaaagtggcgagttcatctggtgcccgtgtcacggttcccattaatgcgaatattagatggagggctacaactgtatctaataatttcgactatacgattatattgtataaattcaaaaagcttagtataggagacgatgtcatctctgtcccatcacaaatatggtcacagaaccctatgggcaaaaaagttccaatggtcccttcaggtattaatgcgaatgaggatgaacctaagataatttttgtcgaatctcaagatagttatttccaagcaatagctcataaacccggtgtagaacaatatacatggttctttgccgcttatgacggtaaaaagctcctaggttattatcgatacgatccatatgttgaagtaactaatagctaa

SEQ ID NO: 8561 - DNA, 1668 bp, Photorhabdus luminescens
atgataaaaagaatatctattctcatattaggttgtatttcctttcagataatcgcttcaccggcagagataaatgataatctgccaatgactgaggctagaagaactttgcaagatagttccagggaaattaaccagctgatagaacaacgccgatatcagcaactaaagcagcaggctaatacagtccctgagtcaactcctgcgccagttttgccggaatctaagcaatgtctgccgttaaccggtgtttaccttaaagggatctccctgctctctgttcgggatttaagtacgctcagcgctttgtccccggcgtgtatcagtagtcatgatatcaatcggctcagccatgaactgactcatctttatatcagtaaaggctatatcaccgcccgtgttcagtttattgcgcctaataccgatggagagttagggctaaatgttatcgaagggtttgttgaaaaaatcgaaggcggtgatcgctgggtgaatagtagtatgttatttcccggtctggaaaaacaaccgctcaatatcacgcagctcgatcaaggtttagatcaggctaaccggctacagtccaataaaaccaccctggatattttaccaggaacagtgaatggtggttcggtgattaagctgcataatcagcgcagtaagccttggttattgaatatcaaaactgataattatgggcaaaagagtactgggaaatggcgggtccgcaccaataccagttttgacagcccatttggtttatccgatttcatcagtctgaatgccagtagtacgttagatagcccatccaaccggtatagccgtgcctatactctgctttattcaatgccctatggcgcagcaacattcagtgggtttggtagttattcccaatatgccagccgcccccatttacaaatgagaacaataaagatttatggtgatactcagcaaatcggcatgcgttctgattttgccttctatcgtaatcaatctcagattaatagtgtcagcgggcaattaacttacaagaattacaataattacatcgacaatgccaagattggcgtcagtagccaaacattgagtgtctttgaactcggtgttaatcatttacatatcattccaaccggattaatcacgctcaatctgagtgttgaacagggtttgccttggtttggagcacaaaccggaaccgcttatctcgataagcagttcaccaaaggcaagttgatggtcaatctacatcagcgttttatgctgttcaactcgccttatcagctcaataacctgttttatgggcaatacaaccggcacggtctgcccggtgtcgaatggttaaatatcactgatcggaatgcagtccggggatttagcaaaaatacgctatccggggataacggctggtatctgcaaaatacactgtcccggacgttccccctcgccaacagcacattatcaatgcgtatcggtattgataccggtcgggttcaaggatatcgcagcccacaaggctggcaaagcagcgcaggaatcagttctggcaccacactgagataccaacgcatggtattcgatatagaaaccagtcgaggaaagctactttccaatcgccaagcatctgatgaacccattcaggtgctagtccgtttttcttacaccttttga

SEQ ID NO: 8562 - DNA, 4443 bp, Photorhabdus luminescens
atgaaaaacaaaaaattcaggttatcccctaccggcaagcttgccgcttctatggcaatcattcttgtttcttgttctaccagttttgccagtgaaatcgttggtggtggcgacccagcacaccatcccgatattttcgctgccgaaggtaaagcaacggttgtgaatatcgtgacgccctcctcttccgggctgtcacataaccaatatctggattacaacgttggccagatgggcgtcgtcctaaataatgggctagaggaaggtcaatcacaattggcggggcagcttgccgctaaccctaatttgaatggtcaagcggctaacctgattctgaatgaagttatcagcaggaacccttccctgttattaggtcaacaggaagtgtttggtatcgcagcagattatgtactggcaaacccgaacggtatcacctgtaatggatgtggttttatcaatactaaccgcgcttctctggttgtgggtaatccattgatagaacaaggtaatttgcaaggtttcagtacgtttaataatcagaatagcctgaaaattaaatcggatggtttaatcgccaatgcgatccttgatcttatcgcacctaaaattgacaaccggggctcagtcactgctcaaaaagagattaatgcgatcagtggtgaaaataaaatctcagccacaggagaagtcattgattctcagcaagcgttaaccggtgtgctggatagctattatctcggtagtatgcaagccgggcgtatccgtctactcaataccgcaaaaggcagtggcgttaatttacaaggtactcttactgccagtgatgagattattgttgattcccacggtaatctcaatttagaagcagcacatctacgcggtggaaatattgatctcttgggtaatgatattgaggtaaaaggtaaagtcagcgaatcatcatatagccgtgatggtagcaataattaccaaagctatttcagcggttcttataccaatgatagtaaaagtagtcagtcactcgctcgtactaagcttgaaggcaaaaatatttcattagtcgccaacagtaataaccgggttacagccacggatatcgtaggtgatgatgtgaatctgagtggtgctaatctcactttagatgggcagcaattaaagcaatccactaaaaatattaataaccaacagggttattcttggcgccacgaggtaactcaggaaagtgaaaaactgcatcaggcaggaaacaatatccaggccaaaggaaatgcgagcttaaatgcgacagaaggtgacgttaagatccttggcagcaaaatagatgctaaaggtgagctagcggttacagcgaaaaaaggtgttcaaattgccggtctgactgagacagaaaaaagcgcggaaacaggttacaaaaaaaatcacacggctaaattgcagaccggaagttgggaagagagtaaacagaccgagcgtttgattgccagtgaattacaagcaggaactaatcttaatattaaggcaggaactcgtgctgaaattcttggggcaaaagtccatgcaggtcaaaatctgacactggaagccggtaaacaactgcaaatcgatgttcagaaaacggctgatagccgggctgtacgtgatgataaaaaatactggggagggatcggcggcggtgagaataaagacaacagtgagttgaaagaaaccaaccatgcatctgaattaacagccaatgggcgtttattgctgtcaggcaatgagggtattgccattaccggcagcaaagtgaaggcggtccaaggtgcttttgtaaatgctaatagtggcgaattaaccatcgataatgcggtcagtcatatcaatcgcaaagttgatgagcgaacgggcacggtactcaatatcactagcggttcaaaaagaaataatagccagcaacagaaatctcacggcagcgagttggtttctgaggcggatcttaaattactcggtgatgaagatatcaatatcattggcagtcgggtgcaaagtaccggtgcgcttagcctgaacacgtccggtaatatcaaggtgctctcttatggcgaacagaaacaggttgataaacaaagcacctctctggagccacaaagccacttccaaccaaagggagacaaacagtatcgtgccggaataggtattgaacataccagtaacagtcaaaaaaatcagacggtaacacagcaagcttccacgttgagtggcggtagcatcactatcgatgctgataaagatgtcactctacgtggttctaatctggtgacgaccacaggtgatgctaaaatcaccggtgagaatgttcatctgttagccgaggataataaaaaatccgaagaaaaatctcagagtaaaaagtacgttggggcctatcttaccggaggaatcgataaagtcggttccggtatttatggtcgttatgaaggaaataacagtaatcataccagtacaactgctgttgtttccggttctcagatcgcaggtaatttgaacattaaagccaacggtgaattggttcaggaagggacgaagcatgaagtcaatggcacctataccgcagaggcaggcaaagtcagcaatctggctgtatcgaatacagaatcaagtaccaatcacaaactacaggttggtacagatattggtgtcaacgtagattatagcgctgttactcgcccgattgagaaagtggttaaagaaccggctaaatctgcactggatggcactttaaccaaaaaaggcacacctaatttcggcgcggatattgccgccaacggcagtagtatccagactgcgaacaaaaagtccgaaacggttgtgacctctattcaggccagcgatatcgtcattaaaaccaatggcgaactgtatgatcagggcactcaatatcgggctgataaaggtaacgttacattaaccgccggtaaccataccagtgaagcagcacaaaaccaccaccaaagtagccacagtgaaaccagcggcaatgctgacctacgtgtttataccactaccggtgaagatatttctgcgaatggtaaaggcaaaggtggcacgcaaagcagccatactacgacgaccacagcagtcactagccggattaccgcagcagatgacattaatatccgcgtcgaaagggatgctgaatatcagggtacctctctgaatgccggctcaggcaaagccaatatagatgctaaaggtgatatccgttttgataatgccaccaatagcacaacgaaaacagcaaccggttataacggagaagcatctgctaaagggggaaattcgccagagggcaagaatgttcatatcggtcttggcggcggttacaacatagatagcaaaaacagtaccacagctcaggtcagtgaaattggcggtaagcaaagtgtcactttgagtgcaggcaataacttgacgttgcaaggtgctcaagtgaccggtaagcaaatcgacctgaacgctaaacaaggtaatgttgaactggtatctgctcaggatcgcattaacaacgatggttgggaatttaacctgaaaggtaatggcggaaatgcaagctcgatcaagaaagcggaagatgacagtacaaccaccaccacaaaacagaactttggcggggaagtcaaagtcggtattgatcgcctgcaagcaacgacccaacgtaatagccatattaaaggtgaaaatgttgttatcaacagtggtggtgatacaacagttgccggggcacggatagaggcggatcaggtaaaaggcagtattggtggtgatctacaagttgaaagccgtaaggatactgaacatgggttaaatgtcggtgttgacgctggcatgaattacaccaaagaatccaaagtaaaaagtgacgatatccctaaggacgaatcaactaaggatgatttttccaaagacgatgtgtcgaacgatgaggaattgaaagatgatccatctaaaaacccaaccgaagaaccacaaccgaaaggatggcaggaaagattaacctctacgtttaatagtcttaataatattaaaggtattaatggggttacaggtaaacttaaaagcaatgtcgatattaaagatcgagaaaatgtcggtgaacaatcggttatttccggcaatcaaggggttaatttagatgtaaaaggaaatactcatctgattggtgggcagattggtagcgagaaaggccatgtcattcttaatacccaaaatgtggaacaacaatctgttaccagctatgacaatagtaaaggcggtaacgttgcattacctgattctgttagcggaatagttaaagcagttcaagaaggtgtattgtccggcaaaatacctttagtgaaaacgtatagtaatgaaaccgaaactagtacaactaatggcgaaataattaatcgtaaatctgattaa

SEQ ID NO: 8563 - DNA, 549 bp, Photorhabdus luminescens
atgaaattaatgaataaaaatttgtctattgttttaatcatatttgctatttttgtctctgtttattttgtttttttcaaaaaatgggatgttagagaggccattgccgattttgccaatgaacattgcaaaataaatcaggaatgcttaattgatttaaatgaaataacaccatttcattgggatcgtgcctatatcttttctacaggaactcgtcctaaatctatagaaaaggcgattggtatgcattatcaatttattgatgtcggggtaaaattcatttttatcaaaaacaaagaaattgtttattctgaagagtacttcccttatcctgattatcgtgacaaaaatcaaattgtacctaattttgccagtttactatatccagagaataattaccctgaatattattttttaacaaaagaaaacagtcaactgtttatcaaaagatatcatggcacatcgagcaaacgtaagcgtaatatgttctatgagatatctccctcaaatgaaaatcaatctgaaagaaacaactcatataggaaatag

SEQ ID NO: 8564 - DNA, 579 bp, Photorhabdus luminescens
atgcctgtacgtgaagtatgtcataacttctttaaagatgctttatcaccatttcataaatatcgtcagaatgcattaatcgatgccactatcgctttgattaatggtgcttctcttacgttaaccagcattgggcgctttttacccggaaacgctcacgtcaaacataaaattaaacgtattgaccggctactcggtaatgaagctcttcatagggatattcctgatatctttcgcaacattatttcaatgctcactgagtctctgtcgctgtgtgtcattgctgttgattggagtggatatccgtcacaagaacaccatgtgctccgtgcgagtttaatttgcgatggacgctcaattcctttgttaagtcaaatagttccctcatgtgaacaacaaaatgtaacgatacaaaatgcatttcttgacaggctagcgcgtgctgttaaccctaaagccagagtaattattgttacggatgcaggttttcaaaatgcatggttcaaacatataaaaacgctcggttgggattttgtcggacgcattcgaggcaatactcaactaagacttgaaaaatag

SEQ ID NO: 8565 - DNA, 711 bp, Photorhabdus luminescens
ggtgagctttggtttaaacggcaagctttaaaagccactacaaccccacagtttttagggtttggtacattatcaaaagcagaatatgcacgttgcgatggttatttttatcttcataaaagaccgaataaaggtagaaaattcaaaaaatcacgatatcgaatggtgcgaaaatctcaggtcaaagatgggcgttcggcagcaatggagccttggcttatttttattagtatggatgattttaaacctcgtcaggtgatgaaaatttacagccgaagaatgcaaatagagcaaaattttagggatgaaaagagtgaacgttttggatttggtcttagagcaagttatagccacggggctggtcgtttatcagtattgagtctacttgctacactgagttcggttgtactttggctgattggtttttatgccgaaaataaaggaatacatcttaattatcaggcaaatagtattaaatcaagaagagttatctctcatctgacattagcagagaatgtcttacgccattccccgctaatattatttgaaatagtgcttaataaaaccctcaagcatctcgccaaaatctaccaaaatatggttttgatttattacgctgatttgtggggatccttcagcgctatgcaggtggaaatcaagggttataccaagaaaaacacctttccgttacgatatagatgttcaagctaa

SEQ ID NO: 8566 - DNA, 456 bp, Photorhabdus luminescens
atgggaattaaagcacaaagctcagcacatacaaagtggctgtgcaagtaccctatcgttttttcgccgaaatacagacgaaaagtcatttttacccgtatccgttcgagtataagtgagattttacgagacctttgtcagtataaaggagtagaaatcatcgaagggcatctaatgccagatcacgtccatatactggtgagtatcccacctaaaataagtgtttcaagttttatgggatatctaaaaggtaaaagcgcattgatgatatttgataagcatgccaatttaaaatacaagtttggcaacaggaagttttggtcagaaggatactacgtgagtacggtagggctaaatgaagccacaatccgaaaatacatcagagagcaagaaaagtcagatttaatgcaggataagttaagtacacgagagcatgaagaccccttcaaggggtaa

SEQ ID NO: 8567 - DNA, 1395 bp, Photorhabdus luminescens
atgaaaatttcccctctgaacttcccgcctattaacgttactatccctggcaatgatggttataaatttcactttgaaggtcgtgtaacttcaattactcagggccacgtaattgcctcaggattggcagattttatagatgtgccgattaattggggggcaggttccatttctggtgctgaaagaaattttgatattcctttcatcaattttggcgattttaatattaaagtcgattcgataaactctgacaatattatcaatgctattcctggttttacacatgaacaaaaagccaaattagaaagcattattactgaacagaaagaattaactaataaaacccctcaggaagcgacaaaaaatttggcgggtatgacgcttggggaactggttttatatcaacgttacatctcagaatttcaaaaatccaaatctgaaaaagcaattgaatcaatgaataaagcgcttaatattattaacaatacacctgaaggattaacgttaatcgatgccaataagtacccttacgataagaaacatacgacaaatgtgggaataattgaattgacatcgagggtaatgattaactcccagaagaatttgaataattttttaaataacgagattaagaagtctgatgatttttggaatgagattgggaataaatatcaaagagctgttaggaatttgtttttatattatcgagaaatgaaagctaaattaagtagagcactcactacagaagtcgctcgattaaaaagaatcaaagaagatcttgaaaaatcaagaatagaaattaatgaagctattcatgacggtcaaaacacggcaatcccgccttcggtgaagcaattaatttttgccaagttgtacccaaaagaagcattggaaattggccttttcagtaagggttcgacaaatatcaccactaatgcagtgcgttttgcaacacaaggtgatgagaaaaaagggacattcactcaacccaaggaaatgcagggtgaaggaacgcaggtgaatgcttttcgacatatgatttggcaggcgactctggcagccagatatggggagaaaattgctaaacatgcaggtgatgcacatgaagttgaccctcgggttgatctgaatatccggcaatttgcagttctcaatgacgctgatcaaactattgatttacttaataaccaaataggccgtcatattgggttgaattcaaatacaacgtcaatgaaaacattagcgctcattgcattagagaaatttcataaagaagggttgtatgttgccgttaagaatgctcatggctacgaagttgttaaagaaaaaatttccaatgtacaatacgcttatatgaagtctgtatttgaaagccttgatgaaaacggtaaatga

SEQ ID NO: 8568 - DNA, 1053 bp, Photorhabdus luminescens
atgaagctcatggtatcagtcatgaaaatattcattaccgatgaacaaaaagccgaacttgaacacctccatcacacctgccgtgataagagagagtgtgatcgcatcaaagcggtcctgctggcctctgagggctggagttcggtgatgatcgctcaggccctgcgtcttcatgaaacgaccgttaatcgtcatatcagtgattaccttaatcaccgcaaaatcaagcccgaaaatggcggctctcagagccatctcagcgaaacacagactcaggcacttatcgcttatctgaccgcgaatcttctgcccaccacacaggctgttatccgccttgtcaaagaagcgtgggatatcagttacactgttcccggcatgaataaatggctgcaccataatggatttagttataaaaaaccgaccggcgtgccacacaagttcaacgcggagcagcaacgggcctttatggaaacctacgggaaactcaagcaggaagccggagaccatgagcctatcctgttcattgatggcgtccatcccacgcaagggacgaaactggcttatggctggatgcgaaaagggcagaaaaccgcagtgaaaaccacgggaagccgtacccgtctgaacctgatgggggccctgaatctggccgatattagcaaaacggtagtacgcgagtatgaccgtatcgacagttatcacatcgccgagttcttcattgccatccgtgagacctatccggtcagtcagaaggttcatattatccttgacggagccggttaccaccgaagcaggcaggtgaaagactgggcttatgtgatgaatattgagcttcattacttgccgccatacagcccgaatctgaacccgatagaaaggctgtggaaggtgatgaatgaacaggtcaggaataacccttatttcgcctcgacggccttgttcaggcaggcaatccatcgtttttttacggaaatattaccggaacttgccgggaacctgtcgtgccgtattaatgacaacttccaggttatgaatcctgcatcttcaagttaa

SEQ ID NO: 8569 - DNA, 192 bp, Photorhabdus luminescens
gtgaaatttaatcttccattaattctttctgagaaattaaataaaagtgaagtagctattattctacaacatgaaatagctaaggctgaaagggacaaagtactgcatgataaacatgagtttgatgatgtttatttatctcagccgatttataggcaaatgtattatgtaacattatatcaagaaatttaa

SEQ ID NO: 8570 - DNA, 993 bp, Photorhabdus luminescens
atgccaaagcgtacagaaaaacaggaaacaacccaacatcagccgaaaaggttatccaaaacgcctttggaaaagggaattcgtcacggtaaaaaagcgatttctctgacggtcagagtaggaaattatatccgcactattcctattatcgctcattttatccgtgcaacgctgcgttttaatgatcggatgggtaatcagtttggcgcggcaataacgtatttttccttcttatcacttatcccaattctgatgctctctttcgccattgccggttttattctggcctctaatcctgatttattggcaagactgattaacagtatcgccaacagtattagtgatccgactcttgccaatacgctgaaaaatagtgtcgataccgcaattaaacaacgtactaccgtgggattaaccggtttggcaattgcgctgtattccggtgtgaattgggttagtaatttacgtcaggccattcttgcccaattccatcctgtctgggtgcgaaatcaggaagataatgagaaaatctattttaaatattttcgtgattctatttctctgattgggctattattagcgctggtgatcacgctatcactgacctctatcgcaggctccgcccaagcaaccattgttaagatgttagggctagatggcattgaatggctgcgtccatcttggttcttgattggattagccatttctatttcagctaattatctgcttttcctatggctattctgggtgctacctcgccaccagccagaacgtaaggcgctattaaaaggaacattgatggcagcaataggttttgaagtgatcaagtatattatgaccatgacattgccgcgcctcgccaattccccttctggtgccgcatttggatctgttatcggcctgatgacatttttctacctattcgcccgtttaacgctattctgcgctgcctggatagccaccacagataataatcataaaaataccgaataa

SEQ ID NO: 8571 - DNA, 207 bp, Photorhabdus luminescens
atgccgtttgttaatatcagaattacccgtgaaggtgctacagcagaacaaaagaagcaattaattgaaggagctactcagttactggccgatgtattaggaaaaaatccggcgacaacttttgtcattattgatgaagtcgatactgataactggggaatcggcggtaagaatgtgactgagcttagagctgaagctaaaaaatag

SEQ ID NO: 8572 - DNA, 1491 bp, Photorhabdus luminescens
atgcagggtacgaaaattcgttattttattggtgggataatgctggcagttgcgggccagacgcaggcagaagccttgcagcctgaccctgcctggaaacaaggtaaactggaaaacggttttaactggcaaattttgcagacaccacaacgtcctaacgacagaatacagttgcgcttggtcgtgaaaacggggtcactggcggagaaaacccaacaaacgggttatacctggttgattccgaaagtcgtactctttagtagcaaaagcttatcttctaccaaattagagcagttatggaacagtgctattgatccaaaatacccactgcctccagcgattgtttcatatgatttcacactctatagcttgagtttgccacataatcggcctgaactattaaaagacgcgttgaactggctggctgatgctgcgggcaaagcggtatttacacctgagacactgcaacatgccatgaaaatggctgatacatccgttgcaacctatccacccgatatacaagatcccgtgtggcgtagacgtttgaaaggttcaacgctgttagggcacgatccggcacaaaacgcgcctcaacctattgatttggagaagcttaaacagttttaccggcagtggtatacccctgacatgatgacgttatacgttgcgggacatgtagatagccgtactctgccggaaaatatcagcctagcgttttcatcattgaaaggtaaacgtcatactccggctactattgcagcgttgtcaccaatgaaaccggagaccatcgggattatcagcgataaaaagaaagaagatactttatccttaatttgggatctcaattggcagccgattaatgattcgcatgtgcttaatcactattggatcagtgatatcacccgcgaggcactttatcgctatctgcaacttgggctggaaagaaaaaatgataaagcgttgaaattggggctggattgtaaagtccagtatcatcgtgcgagctgtgccctgaatctcaacacgacagccggtaatttaaaacccgcaatggagtatctggcggctgaattggtcacattacgggataaaggattgccgaagggacaatttgatgagctatatgcgcaaaaacaagcacaactcagccagttgtttgccatgtatgctcataccagtacggatattctgattaatcagcgccttttgtcccaacagagcaatgtggtggatatcgcccctgagcagtatcagcgtttgagacaagcatttttagcttccttgaccccagaaatgcttaatcgtgaattgaagcagatcctgtcgcaagaggtggcatttattctgattcaaccgaaaggggaagtggaaatggatgtcgaccagttaagaaacagctttaatcagattatgtcgctgacaccacataaggataaggttgatattccggcacaaccaccgatgtctaagtctgaggcaaaagcctcttaa

SEQ ID NO: 8573 - DNA, 714 bp, Photorhabdus luminescens
gtgaaaatgaaattgcgcgtcaaacgttcgttaaccattaaacagatggccgcagtgaccggcgtcacgctggtgaccattgctatttttattacgattcaattgtgtcattttatacagcaacgtaaagatgattatatcagccagcttaataatgcggcagttcaggtacaggcacctttaacggaagcactacttaattccgatctcagtaaagcaaaagagttgctgatagggctgcgcactgtaggtattttaggacgtgcggatgtggtgttaccggaggatatccgggtgatacgattgagctttgctacccatcgcccaatccccgaactggctaaacgtgtttttgggatccctgtggaagtgagtattcctcttcatgtttatggttcagtatcgacagatgctaaaccgctagggcatctgattttgcaagtggattccaaccgagtatatcgttttgtcattaatacgttggcactgatgctgacaacttatttattactggcccttatccttacggtgtcgataagctggtgtatcaaccggattattatgcacccattacgtgacattgcacgggatcttaataacgcgcaactatcagagccaatggcttgccctaaataccatcaggatgatgaactgggcctgctgatcaggggatataatcgtcaatttgataagcataaacctccgtcatcatga

SEQ ID NO: 8574 - DNA, 981 bp, Photorhabdus luminescens
gtgccgttattaaaagcgacagatctgaaaaaatattatccgattaaaggggggctcttttcacctgcgaggacggtaaaagcgttggatggcgtctctttcgaattggaaaagggaaaaacgttagccgttgttggtgaatcggggtgtggtaaatccacgctagggcgattgctgacgatgattgaaaagccaaccgacggggaactttattatcaggggcaagatctgctggtgccaaataaagactctgaaaagctacgtcgtcagaaaatccagattgtgtttcaaaatccttatggttcacttaatccgcgtaagaaagttgggcagattctggaggagcctctgcggatcaataccaagttaaacgcacaggaacgtaaagagaaagtgttgcagatgatggaaaaagtggggttaaaaaccgaacattacagccgttatccgcacatgttctccggtggtcaacgccaacggattgcgattgctcgtggcctaatgttggagccggatgtggtgattgcggatgaaccggtttctgcgttggatgtctcggtgcgggcacaggtgttgaacctgatgatggacttacaacaagaattggggctctcttatgtctttatttcccatgacttgtctgtggttgaacatattgctgatgaagtgatggtgatgtaccttggtcgttgtgtggaaaaaggcagtaaggagatgattttcagtcatccacgtcatccctatacacaggcgttattatcagcaacgccaaggctgaatcctgaattacgccgtgaacggataaaattgaccggcgaattgcccagcccaatgaatccaccgcccggttgtgcatttgccgctcgttgtcgccgggcacttagcgtttgtactcagtttcagccaaaattgaatcaatatggtgatcaactgatcgcctgttttgcggtcgatcaggatgaaaatgttacggtggaataa

SEQ ID NO: 8575 - DNA, 981 bp, Photorhabdus luminescens
atggcactgttaaatgtagaaaaattatcggttcactttggtgacgaagaggcaccattccgcgccgttgaccgcatcagttaccgagttgagcaagggcaggttgttgggattgttggagaatctggctcaggtaaatcggtgagttcattggctgtaatgggattgattgattatccgggtagagtgatggctgacaaactggaatttaaccagcgtgatctgaccaaaatttctgaacaggaacgtcgccaactggttggtgcggaagtggcaatgatcttccaagatccgatgaccagcttgaacccctgttataccgttgggtttcagattatggaggcgttaaaagtgcatcaaggcggcaatcgccgcacccgacgccagcgggcgattgatctgttgaccttggttggtatccctgatccggcatcgcgtctggatgtgtatccgcaccaattatcgggtggtatgagtcaacgggtgatgatcgcaatggcgattgcctgccggccaaaattactgattgctgatgaaccgacaaccgctttagatgtcaccattcaggcgcaggttattgaactgttgttggagttgcaacaacgggaaaatatggcgctaatattaatcacccatgacctggcattggttgcagaagctgctcatcatattatcgtgatgtatgccgggcaggtggtggaatccgccaaggcatcggaaatcttccgggcaccacgtcatccgtatactcaggcgctgcttcgggcattacctgaatttgctacggataaatcccgtcttgcctctttaccgggtgttgtgccggggaaatatgaccggcctatcgggtgtttactgaatccgcgttgtccctatgcaaatgaccattgtcgtcaggtggagccggaattaagaacggtaggagaacgtcaggtgaaatgccatataccgttggatgatgcggggaggccgacagtatga

SEQ ID NO: 8576 - DNA, 900 bp, Photorhabdus luminescens
atgtctcaagtgactgagcctgcaaacagtgcgcctaagattatgacgccgatgcaggagttctggtattactttaagcgcaataaaggggccgttgctggcctggtttatattgtgttgatgttgttggttgctctgttggcgggggtgcttgccccacacggtgcggctgaacagttccgcgattctttgctgacgccaccagcatggcaggaagggggaaattggcagtttattctgggtactgatgatgttgggcgtgatttactttcgcgtctgatgtacggcgctcggctttcattgctggtaggttgtctggtggtggtgctatccctattgatgggggttgttctgggggtgctggcgggttatttcggtggtgtggtggatattatcatcatgcgtatcgttgatattatgctggcattgccaagcctgttgctggctttggtgctggtggcgatatttgggccatccattgtcaatgcttcactggcgttgacctttgtgtctctgccacattacatccgtttaactcgtgctgcggtattagtcgaagttaaccgcgactatgtgacggcttcacaggtggcgggggcaggttccatgcgccagatgtttatcaatattctgcctaactgtctggcaccactgattgtgcaggcttctctgggtttttctaatgccattcttgatatggctgctttgggttttctgggaatgggggcgcagccacccacgccggaatggggaacaatgctgtctgatgtattgcagtttgcacaaagtgcctggtgggtggtgacattcccgggggtggcgattctgctgaccgtgttggcgtttaacctgatgggtgatggtttgcgtgatgcacttgatcctaaactcaagcagtag

SEQ ID NO: 8577 - DNA, 1020 bp, Photorhabdus luminescens
atgttgcagttcatactccgacgtctggggttggtaatcccaacgtttattggcattactttactgacttttgcttttgtccatatgatccccggcgatccggtgaccattatggccggggaacgtggaatatcggctgagcgttatgcccagctaatggccgaaatggggttggataaaccactttggcagcaatactttcattatgtaagtaatgtgttacatggtgatcttggtatctccatgaaaagtcgtatctcggtgtgggaagagtttgttccccgtttccaggcaacgcttgaactggggatatgcgccatgctgttcgctatttctgtgggtattcccgttggtgtcttggcggcagtaaagcgtggttctgtttttgatcatactgcgataggactttccctaaccggatactccatgccgatcttttggtgggggatcatgttgatcatgctggtttctgtccagttggatctgacaccggtatccgggcggataagcgacagtgttttccttgatgacagttatccgctgaccggttttatgctgatcgacacactattctggggtgaagccggtgattttaaagatgcggtgatgcatatcattttgcctgccgttgtcttggggacgattccactggcagtgattgtccgtatgacccgctcttctatgttggaagtactaggtgaagattatatccgtactgcacgcgctaaaggtttgagtcgtatgcgtgtgattgtggtccatgcgcttcgcaatgcattgctgccggttgtcactgttatcggcttgcaggtcggcatgatgctggcgggggcgatcctgactgaaactatcttctcttggccggggcttggacgctggctgatcgatgcccttcagcgccgggattatccggtggttcagggcggcgtattactggtggcgatcatgatcatcttggttaacctgatagttgacttgctatacggcgtcgttaacccgcgtatccggcataagaaatag

SEQ ID NO: 8578 - DNA, 1608 bp, Photorhabdus luminescens
atgacaactttctctaaaagagcgaagttattgaagctaggggtcagcttagttgcattggccgtaaccgccagcgttcaggcaaaaacattggtttactgctccgaaggctcaccggaaggctttaatccacaattgttcaccgctggcacaacttatgatgccagctccagaccactgtataaccgtttggttgagttcaaaacaggtacaactgaaattatcccgagcttggctgaaagatgggatattagcgatgatggtaaagtttacacttttcatctgcgcaaaggtgttaagtggcacgatagcaaagacttcaaaccaagccgagaatttaatgctgatgatgtgatctacactttcatgcggcaaaaagatgcaaatcacccataccacaaggtgtcaggcggcagctatgaatatttcattggcatgggtatgagtgagatgatcaataaggttgaaaaagtagacgattatactgtccggattgaattgagccgcccggaagccccattcctggctgacttaggcatggatttcgcctctattatgtcagcagaatatgcagataagatgatgaaagccggtacaccggagaaagtcgatctgaatccaattggtacaggaccgttccagttggtgcaatatcagaaagattctcgcattctgtataaagccttcaaagaatattggggagataaagccaaagttgaccggctagttttctctattactcctgatgcatccgttcgttatgcaaaattacagaaaaacgaatgtcagatcatgccatatccaaatccggcggatattgcccgcatgaaacaggataaagatatcgttttgctggaacagccgggtctgaatgtcggttatgtcgctttcaatgtcattaaaaagccattggataacgtcaaagttcgtcaagcgttgacgatggcagtcaataaagatgctatcgttgaagcggtttatcagggcgctggtcagaaagccaaaaatctgatcccaccaaccatgtggggttacgacaatgatcttaaagattatcagtacgatccagaaaaagcgaaacagctcctaaaagaagcagggatgggaagtggttttactattgatctgtgggcaatgccggtacagcgtccatacaacccgaatgcccgtcgtatggctgaaatggtccaggctgactggggaaaaattggtgttaaggccaaaattgtcagctatgaatggggcgaatatttgaagcgagctaaagatggcgagcatcaaattgtcatgatgggttggacgggagacaatggtgatccagataacttcttcgcaactttgtttagctgtgcagccaaagagcgaggttccaactactctaaatggtgttacaaaccgtttgaagatgctatacagccagcccgcatcgtttctgagcatgctaaacgtgttgagctttataaacaggctcaagctgtgatgcacgaacaggttccagccctgattgtggctcattccacggtgtatgaaccgatccgtaaagaggtcaaaggttacgtcgttgatcctctaggcagacatattttcagcaacgtgtctctcgaataa

SEQ ID NO: 8579 - DNA, 921 bp, Photorhabdus luminescens
atgtcttcatataatggcgtaatatatggggttattttttgcctcatcagtgcagcatttgatgtgtttgttgcgtatttaacgcaatcgataaattcagctattgttatcttttattgctttatatcatctactttattatttatgatgataagtattttcaaagggattgatcaattaattgtgaaggtccgcaagaacaccttattggtgttaattgttaatatctcaattctattaaattgggggggattaatcatttcgctacgttttcttgagcctgcaatagtgggggtagcttcagtggcttgtggtcctgcgataacaatcctcctttcatcttttatcgataaaaacgaggcaaaaacagaaaaattggaagtcgtcatatcttggttagttctcattggtgtaggtgtgatgctagtgaatgtatttttaggaaatagtggattatcatcaacctcaactcaggataggattattggcattgttagtgtgataattggtgctgtaggaacggtgttatacactattttttctaagaaattattcaaggaaaaatggcaaacatatgagatattgtctgttagaagtattttaatggtgatactttcattttgttatatttcactctccgatgtttctcttagtttgaatattgatatgattcttccgatgttgattcttgttgctgtcgggcacttacttccaatttatctcgtactgaaggcaattaatgccattaccccccttcatgtctctttattatttttactgatacctgtatttacgattcttttccaatatcttgattcacgtatcgcgttttctgttgaaagtttgattgcagcttcggttatagtttctttattaatcattcttggtgtgagtaagataaaaaagacaaatagggtataa

SEQ ID NO: 8580 - DNA, 330 bp, Photorhabdus luminescens
atgagcatcaaatggaatgtaaatatgaaattaaatgacataggtaacatagttttactagaaattaataagtttagaataaacgataatcgagtattttcgaagcgtgaatatcaaaattttatcagtaggcataaagacaggatatttttgcatatcgttaatacgttagaaaaagaaggtaagatacggctaaacatgacattgattgactgttcgacaggaaatattaaagatgaatccgcaataacaaaaggaataaaatatcggaaatttaatttttggaataagagaataataggtgatatatgtcttcatataatggcgtaa

SEQ ID NO: 8581 - DNA, 705 bp, Photorhabdus luminescens
ttgctgcacgagaattcaccatcatttactgtccaaggtgaaacctctcgttgtgaccaaattattcaaaaaggtgatcacgcgctaatagggataagcccctttaactcgcgtttttcaaaagactatgtagtggaccttattcagtggtcaagtcattatttccgacaagtcgacatattattaccttgtgaacgtgaagcttcacgccttttagtcgctagtggaattgataatgttaaagctatcaaaaaaacacatcgcgaaattagacgtcatttacgtaaccttgattatgttatttccacagcaacattgaaaagtaagcaaatcagagtcatccaatttagtgacttttcactaaaccatgactaccaatctcttaaaacacaagttgaaaacgcgtttaatgaatcagaatcttttaaaaaaagctgtcttgatatgtcctttcaagccataaaagggcgactaaaaggtactgggcaatactttggtcaaattgacctacaattagtatataaagcgttgccatatattttcgctgaaattcctttttacctcaatacccctcgattacttggggtaaagtattctacgttactttatcaccgcccttggtcaatcggaaaagggttatttaacggtagttatcctatacaagtagcagataaacaaagttacggaatcgtcactcaattataa

SEQ ID NO: 8582 - DNA, 1224 bp, Photorhabdus luminescens
atggctaaattaagctctttcaacattcacgatcccaaattcataaaaaatccttacgatttttacgacattttgcataaacaagatttagtttattttgaacaatcccaaaatagctattttattggcaaatatgaggatgttgacgctattttaaaatcctcaattttcaatactaagccattaactgcacttgccgaaccggttatgggggatcgcgttcttgctcaaatggaaggtgaagagcatgcgtgtaaacgaaaattcataatgcaaggactttcaagagattattttaatcgctactacgaacccatgattcgaaagattactgaagatctcttacaaccttatatggaaaaaggaaatatagatattgttaatgactttggccgcgattatgccgtattagtgacattaagtattctcggactgccaagtgataactatcgtgatatagctgaatggcacaagggtatcgccagttttattacccagtttgaccaaacagaactagaaaaaatgcacagtcttgaatgtagtcagaaattaattcgcttactaaagcctataatagatcagagacggcgtaatcccagtaaggacattatatctatattctgtcaagatacagcgatgtccatgagtgaaattacagcactgtgtttaaacattctattagcggctacagaacctgctgacaagatattagcaatgatgcttaatcacttaatatctaatccgagtatgcttgatgtagttctcaaagatcgcagcttagttcgagatgcatttgaagaaactttacgtctgacatcccccgtacaactcattccaagagaggcgagtgaagacgtcactatttctggtatcgatatacctaaaggcgctgtagtattttgtatgattggcgcagctaatcgtgatccatcggtttttcacaaaccaaatgaatttgatctatatcgaagaaaaaataccacttctccacagaaagcaaatcgaaaaagacatttagcttttggtgcaggtactcatgcctgtgctgcggctgcattttcactcagtcagttggaagtttcatccaatattattttggatctcctgcataatttacgttttgctgatcactatcattatcaagaaacaggcgtgtatacacgaggaccttctaaactccttttgagttttgatccaatagcatcttctgctatcaaggaatag

SEQ ID NO: 8583 - DNA, 129 bp, Photorhabdus luminescens
ctggtcccaaaccagttgcgctaccaagctgcgctactcgccgaaaacgagccgaatcttactgcgctcgctacaggccgtcaatacctttttgataaccagagattagttgctgataaaaacaactga

SEQ ID NO: 8584 - DNA, 165 bp, Photorhabdus luminescens
ctggagcgtatcaccttgactaaagttgcgaaggaaaaagcattaccgtttgaaatgcgagcacctaataaattgactgccgaaactttggctaagagtgatcgtggtgaagacattcgtcaggcaaaggatgctgatgatttattcgatcagcttggtatctga

SEQ ID NO: 8585 - DNA, 2070 bp, Photorhabdus luminescens
atgactcaacagactttcctggtggaaatcggcacagaagagttgccgccgaaggctcttcgttcattagctgaagcatttgctgctaattttgcggcggagttggataacgcgaatttagcgtatggtgaaatcagttggtttgccacgccgcgtcgtctggcactaaaagttgctaatctggatgaggcgcaagctgatcgtgaagtcgaaaaacgcggtccagcgattgctcaggcatttgatactgagggtaaaccgacaaaagcggctgaaggttgggctcgcggttgtggtatcacggctgctcaggctgaacgtttagtgacagataaaggcgaatggctgttgtatcgtgcgctggttaaaggccgtagtgtcaaagagttgctggcggctatggttaacagtgcactaaataagttgccaattcctaaattgatgcgttggagcgataaagagactcagtttgctcgcccagttcataccgttaccatgttgtttggtgatgaactgattgaaggcgaaattctgggtattaaatccgcacgtgtcattcgtggtcaccgctttatgggtgaatctgaatttgcgattgataatgcagagcagtatccagagattttgcagcaacgtggtagagtgcttgcagattatacaacccgtaaggtactcattaagcaggatgtagaacaggcggcgattaagctaggcggcgttgctgatatcagtgacagtttactggaagaggtgacttcattggttgaatggccggttgtgctgacagcgaaatttgaagagaaattccttgaagtgccagccgaagcattggtttacaccatgaaaggtgaccagaaatacttcccggtttacgacaatgcgggcaaattgatggcaaactttatctttgttgccaacattgactcttctgatccacaacaaatcattgacggtaacgagaaggtggttcgtccacgtttggccgacgcagaatttttctttaagacggatcgtaaacagcgtctggaagataatttacctcgtctggagacggttttgttccagaaacaacttggtactttgcgtgataaaacggatcgtattcaggcgttggccggttggattgcagagaaaattggcgctgatgtgaatcatgctacccgtgcgggtttgttgtccaaatgtgacttgatgaccaacatggtatttgagttcaccgatacacaaggtgtgatgggaatgcattacgcccgtcatgacggtgaagcagaggatgttgctctggcattgaatgagcagtatcaaccgcgttttgcgggggatgaactgccttctacaggcgtttcttgtgcgttagcgatcgctgacaaaatggatactctggcgggtatttttggtattggtcagcatccgagaggcgataaagatccgtttgcgctgcgtcgtgctgcgttgggtgctctacgtattatcgttgagaaaaaattgccactggatttgcagacactgacagaagaagcagttcgcctgtatggtgataagctgacaaatgccaaggttacggatgatgtggtggaatttatgcttggccgtttccgtgcttggtatcaggagcagggctaccgcgtcgataccattcaagcggtattagcacgtcgtccaacgcagcctgctgatttcgatgctcgtgttaaagcggtgacccacttccgtacactggatgaagccgcagcgttagccgcggcgaataagcgcgtttctaacattctggcgaagtctgaagagacattgaacgagaaagtagatgtttctacgttgaaagcgccagaagaggtgaaactggcaacgcatctgatagttttacaggataagctggcgcctttgtttgccgaagggcactatcaggaagcgttggttgagttggcatctttgcgtgaagttgttgatgctttctttgacaatgtgatggtgatggatgaagacttacaggtgcgagtaaatcgcttaactttgttaagtgagttgcgtgacttgttcctgagagtggcagatatttcgttactgcaataa

SEQ ID NO: 8586 - DNA, 915 bp, Photorhabdus luminescens
atgcaaaagtttgataccaagacctttcaggggctgatcctgacattacaggattattgggcgcgccagggctgcaccattgtccaaccactggacatggaagttggcgcgggtacttctcatcccataacttgcctgcgtgcacttggcccggagccaattgctgctgcttatgtacaaccttctcgccgtccgaccgatggccgttatggtgaaaaccctaaccgtttacagcattactatcagtttcaggtcattattaaaccatccccagacaatattcaggaattgtatctggattctctgaaggcgctagggttagacccgacggttcatgacatccgttttgttgaagataactgggaaaacccaacgttaggcgcttggggattgggttgggaagtgtggcttaacgggatggaagtgactcagtttacttacttccaacaggtaggtggtcttgagtgtaaacctgtcacgggtgaaatcacttacggtcttgagcgtctggcaatgtatatccaaggcgtagacagtgtttatgatctggtttggtgtgatggcccgctgggcaaaaccacctatggcgatatttatcatcaaaatgaagtggaacaatccacttataattttgaacatgcagatgttgatttcctgtttacctgcttcgaacaatatgaaaaagaggctcaggacctgctggcattagaaacgccgctaccgttgccagcttatgaacgtattctcaaagcgggccatacattcaacttgctggatgcccgtaaagctatctcggtgactgaacgccagcgttatatcctgcgtattcgcaccctgaccaaagctgttgccgaagcatattatgcctcccgcgaggcgttaggcttccctatgtgtaacaagaatcagaactaa

SEQ ID NO: 8587 - DNA, 573 bp, Photorhabdus luminescens
ttggaattaacacgtatggaattaacacgctgccattgggttacctctgatcctcaatatctggcttatcacgacaatgaatgggggaaaccgctacaagatagccaaaagttgtttgaaatgatttgtctggaagggcaacaatctgggctatcatggctgactattctgaaaaaacgcgaaggctatcgtaaatgttttcatcagtttgacccggtaaaaattgccgtcatggatgaaaatgatgtggcacggctgatgcttgatcccgctattgtccgcaatcgcgccaaaattaacgctattatcaacaatgcgcgggcatatcttaaaatgcaacaacagggtgaagaattcagcacctttatctggcgttttgttgataacaaaccgattattaatcagtggaaaaccatcacagaggtgccgataaaaacagatctttcagatgagttatcacaagcactgaaaaaaagggggtttaaatttatcggcagtaccacttgctatgcatttatgcaggcaactggcttggtcaatgaccatataactgactgtttatgtagaaaataa

SEQ ID NO: 8588 - DNA, 1254 bp, Photorhabdus luminescens
atgattttttctcaattcggtaacaagtttacacaagacgcaggtataacccgcctgatgaatgaccttaatcaagggttgcggacacctggtgcaattatgctgggtggtggtaatccggcacatatcccggaaatggatgactattttcagcaattactgacagagatggtcgcaagcggccaactcacggaaacactatgcaactatgatggccctcagggtaaagatacgctaattcgagcattggcagagatgctgcgcgaaaaacttggctgggaaattggtacacaaaatattgccttgaccaatggcagccaaagtgcgttcttttatctatttaacctgctagctgggcgcggagaagatggctctgtccgcaaagtgctgtttccactagcaccggaatatattggttattctgactcagggctggatgaaggcttatttgttgccaataaacccaatattgaattcttgccagaaggccaattcaaatatcatgttgattttgaccatctcaatattaccgaagatattggcctgatctgtgtttctcgcccaaccaacccaacgggtaacgttatcactgatgaagagttacaacggctagattatctggctcaacaacaccagattccattactcattgataatgcttatggcgtgccattcccgggtattatttttagcgaagctacaccattgtggaaccctaatactattctgtgcatgagcctatccaaattagggctgcccggttcacgctgcggaatcattatcgctaacgataaaatcatcaatgccgtcagtaacatgaatggtatcatcagccttgcgccgggcggtgtcggccccgcaatggcattggaaatgatccgtcgcaatgacctgcttcgtttgtcacaggaaattatccgcccgttctatcaacaacgggttcaagacgtgattcagattatccgtcgttatctaccggcggaactttgccttatccataaaccagaaggtgccatttttttgtggctgtggtttaaaaatctgccgataaccacagaaacgctttatcaaagactgaaaaaacgtggtgtgttaatggttccaggtcactatttcttccccggattggaacaagactggccgcatgctcatgaatgcatgcgtatgaattatgttcctgatccggaaagtattgccaaagggattgcgattttggcagaagaaattgagcgggcacatcagcaagcagcctga

SEQ ID NO: 8589 - DNA, 123 bp, Photorhabdus luminescens
gtgcgtttactgatggctaatgcaagagtacattacgcattaatgagacttgcagccgatatgccaaactgcttattcagtttacgaatcattggtagtgttagaagcaccaccaatacctaa

SEQ ID NO: 8590 - DNA, 456 bp, Photorhabdus luminescens
atgttgtataacctgattatagtgattgatgtcaaaactcttcatcaagagatttgggaaaataaaaattacccaacaagcttatgcaagagcaaactatttcagcggcttagccatacgagatcgatagaaccaatgaagaataataaattaattctattttgcgtcacattaggatggttgttaattagcgggtgcaccagcatcatgacacattcagggcctagccgcggttattatcccggagctaaagctaacattgaaatgttaaaagacaaagatacgggttgggtaatgaaaccattactcgcgattgatctgcctttttctgcgctattagatactctcttattaccttatgactatataaaatctgacgaagatcaatcaacaagttcaccaaaagagcgaattgaaaaaatagaaaaagcacagcgtcaaaccaaaaccaattaa

SEQ ID NO: 8591 - DNA, 1290 bp, Photorhabdus luminescens
atggcctttcaggaacggcaaatcacgttagataaccgtagccaccagcttactaatattaatgtctggacaccagacagccaatggttagcttatgatgttcgtcccaacggtgcttcttttactggtttaacgatagaaaaaattcatgtgcagagtggaaaaacagaaattatctatcaggcaaaggagggcgctcatgttggcgtggtgacagtcagcccaacagaacctgtccgatatgcgtttattcatgggccagaatgcccagatgagcaatggcactatgactttcatcaccgtcggggcgtcattgtcagtgaggattcttcgggaaaagcggttacgctggatgcaatggatattactgccccttataccccgggagcgttgcgcggaggcagtcacgttcatgtattcagcccggatggtagccgtctaagttttacttataacgaccatgttatgcataagcttgatccagcgctggatttgcgcaatatcgccgtggctgtgcccctcaaaccagttgaaccacctaagcaccatccccgtgaatatgatggtagctatttctccgttgtggttagtactactactttccggccggagccgggcagtgatgatattaaccgcgcctatgaagagtgttgggtaggtcaagcaggatatcgtaaagcggatggtaattggcagcgttgggcattggcatttattggcgatactatttctgcaacaggggaaaaagtaccggaagtctatatcgttgatttacctgaacaggatgctgattatgcgatagcaggggaaaaaccgctgcaaggtacggaaacaacgttacctgcgccgcctgccagtgtaatgcagcgtcgtttgacattgaccagccacaaacgctggccgggagtcgtgaataacccgcgtcactggttgcgtgtttcaccgaatggtgaacagattggttttctaatgaaagatgataatggtattgtgcaattgtggacaatatcgccaaatggtggcgagctccgtcaaataactcagagttactgtggcattcaatctgcttttagttgggaaaatagcggtcagtttgttgcttttatttgtgataacagtgtgatgctgtgcgatgtacaaaatggtcagatgcaacgtttgacaaagcgtacagaaaaagcgcctgctgcggatgcggtggtgatttcaccggatagtcatcatattgcatttatgcgtgaagtcgatggttatatgcaaattttcctggtggaaaccggattgaaataa

SEQ ID NO: 8592 - DNA, 618 bp, Photorhabdus luminescens
atgttactaagtgttctttatatcatcggtattactgctgaagcgatgaccggggctttagctgcgggccgccgtaaaatggatatgttcggcgtgattattattgcttccgtaactgcgattggcggtggctccgttcgagatatactactagggcattatcccctcggttgggttaagcatcctgaatatatcgtcaccgttgcctgtgccgccgtaatcaccacttgggttgcgccgatgatgaaacatttgcgccgcctgtttctgatccttgatgccattggcttgattgtcttctccattcttggcgcacagattgcgctggagatgaaccatggccctatcattgcttccattgcggcggttattaccggtgttttcggtggtgtgttacgcgatatgttgtgtaacaccattccgttggttttccagaaagagatctatgcgggtgtctcctttaccgccgcttggttatatattggcttacagcacacgccgttaccgcaaaacggcattgttctgattaccctgatcgccggtctgacagcaagattggttgctattcgctaccgtcttggattaccggtctttaattacgaacactccgatcactga

SEQ ID NO: 8593 - DNA, 1743 bp, Photorhabdus luminescens
atgcttaatttattgatattaattctgttcattgttttcagttcaccgatagttgcggctgaaatttttgtttcgaatacagaaaagaattgccccgaatggtcgcaggacaaattacaacgtgaaactaacagcttgatgcaacagatggcgcactgggatcagctctatcgtcagaaagggatcagcgagatcgatgatgaggtttatgatcaattaatgtcggagctgactcattggcaattctgtctgaaacaagcaccccattcagattttcctgtggaagtttttcccgataataagcttgttcatccggttgctcataccggattaagtaaactgaaagacaagcaggaaattaaccgatggttgcacggtagattacctgtctggttacagccaaagattgatggtgtagcggtaacattggtttatcagaacgggaaacttgtttcattaatcagccggggcaatggtgccgaaggggtaaattggacagcaaaaagccgatatattcccgatattccgcagaatatagaaaatgctccacctgatttggtattgcaaggagaactctttctgcataaagaggagcatagacagcaattattggggagtgatggcgctcgtaatcgggttgcgggtttgatgatgcgtaaggaccattcgtcagaattaaaacaaataggtttgtttatctggagctggccggatggccctgcggagatggaaagtaaattgcgcaaactggcagatatggggtttccattggcgcttcgctacagtcataaaatagaggaaccagagcaggtgcagaaactgcggatgcactattttgaacaacccatgctttttgctacagacggtatcgtgctgaaacaggaaattgaacctaaaggaaaccagtggcggtctggatctaacagttgggctgtggcatggaaacaccctttacgccatcaggttacacaagtcagggaagttaattttactattggcagaacgggcaaaatctcagtggttcttgggctggataaagtgaaactggatgatcggcagataagcagagtcaatattggttctgttcgtcgttggcggcagttggatgtattaccgggggatcgggtgacgctgacattggcaggccatggtatcccgaaattagctcaggtggtatggcggatcaaagagcgtcaggatattcagccaccggataagcagcattatcatgcactaagttgtttgacgttaacggtgggttgtgaacaacaatttaatgcacgattgaaatggcttggtgaaaatctgcaaatgacaggtgtcagtagcggtagttgggcaatgttgaccgaacggaagttagtcactgatttaaccggttggttagcgctttcagctcaacaaattgcggccttaccaggaatcggagataaacgggcacaggctatttattcgcaattcagcaaggcaaaaaatcagcctttttcctactggatgaaagggattggagtgccttatatggataagctgtctgataatgtttatcactggcagcaactggagcagaaattagccgcggcacaattaaaacaacagcttactgtcgggcagttgaaaaagttgtctgattttgtcagtgacgcgcagattaaagcgattgcagagaaactgtcagtggcagggataacgggttttgaccgggaaaacggggtcgtagttaaccccgctgatatggctcagtga

SEQ ID NO: 8594 - DNA, 90 bp, Photorhabdus luminescens
ctgtggggcatttatgtggcaaggaaaactgcctattttccgttcagttattgggtgataaataataaatcgctttgcaatttactataa

SEQ ID NO: 8595 - DNA, 456 bp, Photorhabdus luminescens
atggctgaaactatcgaccacggcaccctatcacatctagtggaggccggagccgttaaaggagcgcacatcgtaggccagccaggtggctgggccgtgatggtacgctatggaatgcacgagcgaccactggccgcacagcgcagccgcaatgtgcggctattccgcaagttcgaaacgctggtttcctaccttaaaaaaattggcattgcccgcttcgacgtggattcatcaaactacgcccccgctccccccaatacctcaacgcgcaggccagatcgtgccgaagcgctcaagcgtacccacgaggctgctgcatatgatgcgtggtttcgtgagcaggtgcagcaagccatagatgaacccggaccgggtatccctcacactgatgtcaaggccaaatttgccgccaaacgtgaagccttgcgtaaacgcattgtacagggtcgcgcatga

SEQ ID NO: 8596 - DNA, 318 bp, Photorhabdus luminescens
atgaaaatcatttggcgaaagatcgcggaagcagatcgagaacgtatctttgattacatcgcacaaaacaaccccagcgccgcgcttgagcttgacgcagactttgatgctaaaatcgaactcgctgcgcagcggcctaaactgtaccgccccggccgtgtgcacggtacccgtgaaatcgtcgtgcggcctaattatgtgattgtctatcgcatcaaggatgaaagtggtacggtagttgtgctgcgcgtgctccatgcggcccagcaatggcccctggccaagtcaagcgagagcgtttctggtgggaaagtctga

SEQ ID NO: 8597 - DNA, 279 bp, Photorhabdus luminescens
atgagcaacttaaaatccctaaaatccaaagcattagctaactcagatgtaaaagctgagtatgatgcgctagagacagaattcgagctaattaatactttattacgcatgcggcatgctgctggtctaacgcaaaaccaagttgcacagcgtatgggaacaaaagaggcgaatatttacaggcttgaaaaaggaaacggaaacccaacacttaagacactattgaactacgccagagcttgcaattgtgaattacattttggcttcaaaacaacttaa

SEQ ID NO: 8598 - DNA, 135 bp, Photorhabdus luminescens
gtgcttcatcagcttacgttcgcctttaccgatgaggatcgtctcaacagcacaaatgagcatcaatttgctcgctccattaggttttgcaatgattatcagttagcctgggagaaacctcgccattcgaactaa

SEQ ID NO: 8599 - DNA, 660 bp, Photorhabdus luminescens
atggcaaccggggagctatccccatcagagtattatcaacctaatcctgctgcaccctcttggaacccaacgtgggcagtcaaagctctcgggcaaccggtgataaatgggaaagacaacaggggtaagccaattcgttacccagaatcacgtaccagtcccttattgaatgtctttccgccagtaaaaaatcgtaattttccaaagccgagagtagacgatatgacgctggaacaaggcaggttctggataaatgcacaaaacagcatcttcaaggtcccacgtgtggtcacaggcacgtatatctgtcagatggttgccaaacgtaaagataaatctccagggaaagccacagtgaccctctatacggatgctaacgttgtaaattatatactctacaggttcaagggagacaaaaacgttatggaatctagcgtgaacgacctgatttacacagcaaactgccgagggaccggattttcatgggagcgtaaacccgaagagaaatttgaattggaaagtaagtgggaaaacgcggcactgacaattaaaatgcaagacacttgcgattggatttatgatgttgctttctggacgccaccaagcaacaatccaaatggtcagtttaaagacccagccatcctgagacctaatagctaa

SEQ ID NO: 8600 - DNA, 387 bp, Photorhabdus luminescens
atgtgttacccgcattcatgggatattcagatggggatagttccccagttgttacgtgagaaattttcatttattgctgtaatcccgtcccggccaaatgacatcggcctttcagagattcccctttttccggttattattttctgcatcgggtacccgtgcaggtcgtcactacaggttatctgtcttaatgacaggttttgttcaattagcctctggactccggctcttattcacttcctcttgatcggaggaaacccaagtcaaataccactttgcactgactgtccgcattactttatgttgctttccgagcctttaggtatatttgcctgccattttctgctattactattgccgctagatttatcagctattgctggctga

SEQ ID NO: 8601 - DNA, 741 bp, Photorhabdus luminescens
gtgtctgtaggggcgctcttttccacctcggtatttgccgctgctacacccaattggaacccaagctgggcaatcaaagctctcgggaatccggtgataaatgggcaagacaacaacggtaagccaattcgttacccagaagagggtaccagtaccttattgaatgtctttccgacagtaagaaatcataattttccaaaaccgataggaaaagagatgatgctaaaagacggcatgttctgggttagagcacaatacagaatcttcaaggtgccacatgtggttacaggtaagtatacctgtaagatggttgccaaacgtaaagatagatctccaggggaagccacagtgaccctctatacggatgctatcgttgtcaatccagacatctactggttcaagggagacaaaaacgttatggaatctaacgtgaacgacctgacttacacagtaaactgcctagggaccggattttcatgggagcgtaaacccgaagagaaatttgaattggaaagtaagtgggaaaacggggtaccgtcaattgaaatgcaagacacctgcaattggattcataatgttgctttctggacaccaccagacaacaatccgaataataggtttaaagacccagccatccagaaacctactagtacgggcagtgctaacctagcgaagccagatccctgtgataacccagataatatatccggggtgagaaaggcagatagccgcaataaataa

SEQ ID NO: 8602 - DNA, 690 bp, Photorhabdus luminescens
atgaaaacttctaaagaatattatgttcatacgtatacacaacctagtcgacctcaaatcacgagtaaccctcaaatcatagactgggttccagagaaagccattttagctctcggaaccccgaagatatatggaaaagagaataacgataaattggttcgttatccagaaagtgggacaagtaccttagtctttcctaaaggtgatccacatttcgattttccagggacacgtttacctgataccgcagtgttaaaagatatgatgttctggattaaaacgaaaaaccgaatcttcattgttccacatgttgttacaggaaagtacacttgtgagataatagcctcccgcaaagatggccagccaggaaaggccaccataacactttatacggatgcaatcgttgaaaataatgagccccaatggttcaaaggggacagtaacgtaatggagtctaagctactcgatctgtgttacgaagtatcttgcgaaggaacgggtttttcatggcagcgaaaacctgaagagcaagttcaattcgaaaataactgggaaaatggggtgccgttaattataatgcaagacagccaagatatgcaaaatgtgatctatagccttgtgctctggtctgcacccgttgatttaaatcccaattttaaagatcctgccattcttttacccaatgaataa

SEQ ID NO: 8603 - DNA, 1224 bp, Photorhabdus luminescens
atgaaccaaaatgaccatctctcatcaaacatggctaccggtgatcgttttatccagcaaaacctaaaatcaggcagagaaagtaactctggtggcaatacctccatcgtctctattgaattggcagacgattcgtttccgcaaaataacatttctattaaattgaaaaccgccatgttattgcaaaatggcagagtgatcacttggggaaaaaaacggtttgatacacaggaagccccgccaccaattgccgaatttgccgaattgcaaggtatcgtcagcctaagcgcaacacactctgcatttgcagccttgcaagcagatggcagcgtgtctatctggggtccattaatcaatggcctactccccttagaatcagtggataagatgaagaatattgtcagtgtgagtgcaattccaataagagatgttttcacgggcctacgggcggacggcagcatagcctcttggggagcagtggattttttaaacacggctctgccaagaatgtgtggattatcgctacacaatatcatcagcctaagcgcaacagagcaatcttttgccgccttacgggcagatggcagcgtcgtctcctggggattggattttttgccaaccccacccgaaattgccgcattaaaggatattgtcagcctaagttcaacaaataatactttcgtggccttacgagcgaacggcagcgttgtctcttggggtgtggaaattatcccgccagaaatcgccaaattacaagatatcgttagcataactaccaattataattatgccgccgccctacgggcagaccacagcgtcgtttcctggtggggaatagtggttccacccgaaattgccgcattaaaggatattgtcagtttaagtgccacaccgtatgcctttgccgccttgcgagccgaccgcagtgtggttgcctggggagatatagacattggcggaacattaccacttaagattgctcaactgaacgatatcgtcagcctgagtgcagcagattgtgctttcgcagctctgcgggcagatggcagcgtcgttgcctggggacaaccaagtcgcggtggttatgtgccaccggaaattgccaagttgaaggatatcgttagcctgagcgcatcaaactctgcatttgcagccttgcgagcagatggccgcagggcaggttggggaggaggagataccaaagcacatggtgaatacgattaa

SEQ ID NO: 8604 - DNA, 177 bp, Photorhabdus luminescens
atgagaactcgttatgttgattcatattgctctcctgataaggctgtatcggatttatttgtaggaattctgcgccgcaaaacctatttcttccccgtcaaactgggtttctgcttaaagggtgtaagcacctgtattgcggtatttgatttgctggcggtcaacgcagtgtgttaa

SEQ ID NO: 8605 - DNA, 1296 bp, Photorhabdus luminescens
atgaatcaacataacgagttctcattcagcacagagaccaaagacacttttatcaaacaacgatctggaagcaaagctatcagctatgatagcaatggcgtcatagactctaataactctggaaccgccatattattacaaaatggtcatatcgttgcctggggggatgcgcgctacggtggagaactcccacctgagattgctcaactgaacgatattgtcagtttaagtgcaacatatgctgctttcgccgccctgcgagccgaccgcagcgtcgttgcttgggggagtgcgggctacggtggcaaaatcccacctgaaattgctgaactgaacgatattgtcagtttaagttcaacatatgctgctttcgccgccttgcgagccgaccgtagcgtcgttacttgggggagtgcgggctacggtggcgaactcccacctgatattactcaactgaacgatattgtcagtttaagttcagcatatgctgctttcgccgccttgcgagccgaccgtagcgtcgttacttggggggatgcggactacggtggcgaactcccacctgatattactcaactgaacaatattgtcagtttaagttcagcatataatagtttcgtcgcctttcgagccgaccgcagcattattacttggaccagtagtcatagttatgtcccatcaagaaccgctcagctgaatgatattgtcagtttaagtataaatgataatgcttttgctgccctacgggcaaaccgcagcgttgttgcctggggagggggttatagcaattatgtcccatcagatattgctcagctgaatgatattgtcagtttaagtacaaatgatgatgctttcgctgccctacgggcaaaccgcagcgttgttgtttggggaaggagtgataggaatgatgtcccatcagaaattgctcggctgaatgatattgtcagcctaagttcgacaaattctgctttctcggccttacgggcaaaccgtagtgtcgttgcttggggagatctagataatggtggcatactcccactcgatgttgctcaactgaacgatatcgtcggcctgagtgcaacaaattctgctttcgcggccctgcgggcggaccgtagtgtcgttgcctgggggaagccaagtaccggggggtttgttccacccgaaatcgctaaattgcaggatattgtcagcgtagactcatcggggagcgcctttacggctttgcgaacaaatggcaaacgagttggctggggaggcggggatattaaagcacatggtgaatacgattaa

SEQ ID NO: 8606 - DNA, 213 bp, Photorhabdus luminescens
gtgctaaccgcggcaaggcccgattacgtctggcggcagtccatgagcgggcggatctggcaatgccctttctgtcgagtcgaacataaccgcgatatcaatgcggcgatcaacatccagcgcaagggcataacagcattacaggcggcgggacttgtcgtttctgcccacggaggccagcgtaaatccgtcataaagacggttgcggcctga

SEQ ID NO: 8607 - DNA, 162 bp, Photorhabdus luminescens
ttgccaatggatattttgtatcgccaagggttgacttctttagttaaaattttgctctatgtattatcacaactgttgttgaatgaaacaaaaatggtgtatttgctgttttatgtgtcaccatcgcttggtcgaaaaggaggcatggatgaaatacagtga

SEQ ID NO: 8608 - DNA, 624 bp, Photorhabdus luminescens
atgatccaaggcacgttatatattgtctctgcgccaagcggagcgggtaaatcaagcctgattcaggctttgttaaagactcaacctctgtatgatactcaggtttctgtttcccataccacacgtgcaatgcgtcccggtgagaatcagggtgaacactatttttttatcaccgaagaagcctttcgccagatgatcgataataatgaatttctggaacacgcccgtgtttttgataattattacggtacatcccggaaagtgattgaagaaacgcttgccagtggggttgatgtttttcttgatatcgattggcaaggagcgcagcagatccgcaaaaaaatgccctctgcccgcagcatttttatcctgccgccgtcaaaagaagagctctgtcgccgtctgcgcggtcgagggcaggatagtgaagatattattgaaaaacgcatggatcaagccgttgcagaaatggttcactataacgagtatgattatttaatcgttaatgatgatttcaatactgcattggccgatctgcacaccatcatccgttcagaacgcctgcatcgggagcgccaggcacaacggcatgatgctttaatcagcaaattattggcagactga

SEQ ID NO: 8609 - DNA, 276 bp, Photorhabdus luminescens
atggcacgcgtaactgttcaagacgctgtagaaaaaattggtaaccgttttgacctggtgttggtcgccgctcgtcgagcacgtcaactgcaaacaggtggtaaagatcctctggttgctgaagagaacgataaagtcacggttatcgctctgcgtgaagtggaagagggcctgatcaacggtaaaattctggacgtacgtgagcgccaggaacaacaagagcaggaagccgcagaaatgcaggcggtttccgctatcgcggaaagtcgtcgttaa

SEQ ID NO: 8610 - DNA, 2118 bp, Photorhabdus luminescens
ttgtatctgttcgaaagcctgaatcagcttgcccaaaaatacctgcccggggctcagattgagctcctcaagcaggcttactctgttgcgcgggatgcccatgaagggcaaacccgtaccagcggtgagccctacattactcatcctgtcgcagttgcctgcattttagccgagatgcgtctcgaccatgaaacgctgatggccgccttgttgcatgatgttattgaagacacgcccgccacctttcaggatatcgcccagcctttcggcccggtggttgccgggttagtcgaaggggtctccaaacttgataagctgaatttccgcgataaaaaagaggcacaagcggaaaatttccgcaaaatggtcatggcaatggtgcaggatatccgcgtcattttgatcaaactggcggaccgtacccacaatatgcgcacgctcggcgcgttacgcccagataagcgccgccgtatcgcccgggaaacgttagagatctacagccccttagcccatcgtttgggtatccatcatctgaaaacagagttagaagagctggggtttgaggcccttcaccctaaccgctaccgggttatcaaagaagtggtaaaagcggcccggggtaaccgtaaggagatgatccagaaaattctgtctgaaatcgcaggcaggctgactgaagccggcattgaatgcaaagtcagcggcagggaaaaacatctctattctatttaccagaaaatgcacctcaaagagcaacgttttcattcaattatggatatctatgcttttcgggtcatcgttaataatgttgatatctgctatcgggttttggggcagatgcacagcctgtataaaccccgcccgggcagagtcaaagattacattgccatccctaaggccaatggctatcaatccctgcacacttccctgattggccctcatggggtgccagtcgaggtccagatccgcaccgaagatatggatcaaatggctgaaatgggcgtcgcggcacactgggcttataaagaacaaggtgaatccggtaccgccgcgcaagttcgtgcgcagcgctggatgcaaagtctgctggaattacagcaaagtgccggtagctcttttgaatttatcgaaagcgttaaatctgatctgtttcctgatgagatttacgtttttaccccaaaagggcgcattgtggaattacccgccggtgccaccccggttgattttgcttacgccgtacataccgatattggtcacgcctgcgttggctcacgggttgatcgccagccatatccattatctcagtctcttaccagcggccaaaccgttgaaattattaccgcgccgggtgcccggccaaatgccgcctggctgaactttgtcgtcagttcaaaagcccgcgctaaaattcgtcaattgttgaaaaacctcaagcgggaagactccattgggctggggcgtcgcctgttaaatcacgcgttgggtagtgggaaaaaactggttgatattccaccggaaagtatcaataaagaattgacgagaatgaaactctcgacaatagacgatctgctggctgaaatcgggcttggcaataccatgagtatcgtcgtcgcccgtaatttgctaggcgcgccgccagaaaataccacaaatacctatcacaacaatggtgcccgtaaattacccatcaaaggcgctgacggtgtgctgattacgtttgccaaatgttgccggcccatccccggtgaccctatcatcgcccatatcagtcccggcaaagggttggttatccaccatgagtcttgccgtaatatccgtggttatcagaaagaacccgaaaaatttatggccgtcgagtgggatcaagagatcaataacgatttcaccgccgaaataaaagtggacatgtttaaccatcaaggggcgctggcaaatctgaccgccgccattaatgcagccaattccaatattcagagtatgaataccgaagagaaagacggccgggtttactgtgcttttatccggctcacgactaaagaccgtattcagttagcgaatattatgcgcaaaattcggatcatgccggatgtgatgcgagtcagtcgtaacagaaactaa

SEQ ID NO: 8611 - DNA, 492 bp, Photorhabdus luminescens
gtggctgtttggcgggatatgatgaagggcgagttttcatcgattttgtgtgtgatgccttatgggatgctgataagtcggatggtactggttatcgggatcatattgttggccgtctgtgggtttttattgggcaacaaaattcgctactcgcggtatccccgtatgctgttagcgtattggtgccgaacatggattttgccgctattgtttatcgctatcggattggtattgatgtttggtgtgggtgaggagggttggttagaccgcatactggatgaggttgattcagtattgattggtctgttctttgataaccgggatgacgtgctgtcagccccgtatccgccgccggtgtcttgtgggtcggcggtggatagcgctgttgattgttcacctgctgatttgcacgggctatccggtttagtttctgttacgactgactcgcatcacatccggcatgatccgaattttgcgcataatattcgctaa

SEQ ID NO: 8612 - DNA, 501 bp, Photorhabdus luminescens
atgacaatcaatgttaatgattcaatgctgcttcagataagcggtagccagaccgatttgcctggaggtcagactattaccggcaaacaaagtaatcatggggattttcggttgccggcctgtttgtctcatttgaaggatacaccgttgtacatggcagtcgcgtattggggattattgaaggggagtggatttaccaaaagtgaaatcagccaggtgttccgagtgacagaacgccgggcaacagatgtgatgaattatatctacaatgagcgacgtgatgtgatcgcctgtgaaaaagtcttctttcgtgagaagcagggaagtcgccggcagatgctaattgttacggccgtcgttgaacccatgcctcagaagggtcaggcgtcggtaacgaaaacggtgaagtcgacgcgctcccggacattatcacaagctaatcacatgtgcatttggcgcacttggtttttgcagcgggcttgtggtccgtttatctcctga

SEQ ID NO: 8613 - DNA, 1326 bp, Photorhabdus luminescens
atgaagacgaataagacatttattaacaagataaaacaggatatgagttggatggtggttcattgtcgctggtggtcgatgccgatatgggtggggatgatatgcctatccgtgggtatcttttcttctcccacactgttcgccgcgtcgacaataaattggaatgctgatcgcgccattgacgctctggggcctgctcgaaaggtaaagtggagtgacggaataatcacttatccggcaacgggtaaagcgaccttaaaagatgtgtttccaacactgtctatgcagtggggtagtagtaaaacgttggatcaggtcaagttccggctcaaagcagggcacggggaaatttttaaagtcccgagagtggtttcaggccgttacgaatgctcaattgaagccaaatttacaaatggtcgtccaggagtagccattcccaaggaaaacatggcggtggatatcgatggtacagggacaaagtattctaaatcaccagtagcgctcgtggcgagaactactggtaatcaggatgatgagagtgtagcaaaggcagaactaagtgacctttcttttgatgtgtcttgtcaaggggtaaatttttcatgggagcgaaaggccgctgaaaaagttgaattcgaaacccagaatgttaatgcacctgtgggtattttaattgatggaggggattttatgtggtggtccagaccaattcttccgactatcaaagaccctgtaacagtgatatcccctccagagtgtatttttgaaagtcagtctagtgagaattttgatttaggagagattcgccgggagccgtcggacgcgatattcccaaaagagttacaccgggcaacggtagggatatttgatctattgataagtgttgtatgcgatacacccaataaggacgatacaggcgtagccattgtgaatttttctactaagcatctcggtgttgatggtaaaagtatagtgatggacactaatgatgagactgggggtaaggacttcgataacgcgttggcgataaaagtgttgccgcgagttctaggcatacagactaagcttgtaggcggcaaccagattggtcagccagtaacatttggttcagcggctgaccctaaaagtgtgctggtttttaatgtagatgataagtcagccgtgaaaaaaattaaaaaggatgagcacggcaacgaaataggcgagtattattctcatcattctctcaacaggttttctgtgcagctttggcaaacgaaggcgatagaccccaagctttctggtgagttcaaaacgtctatggaggcaactctagtcatgaaataa

SEQ ID NO: 8614 - DNA, 2631 bp, Photorhabdus luminescens
atggggggttctctcgttttttgtcgggtgatgctggtatttctgacgggatggagcgctcatgcaacagcgcgtgattattttgatccggctttattgggctttggttcgaattccggtcaaccggtagacttatcacagtttgagaccgtaggaggtcaggcaccgggaacttaccgtgttgatatctacgtgaatggtactttttttgatacgcgtgatattacgttccagcgtcatggcgagggtaatgccgagctgacgccggtacttaccccagatttgttggaagcggctggtgttaatatcagcggcataccagcgttgaaagcattgccggtggataagccgatagagagtccgttgggtaaattgattccccaagcggcggcccgcttgaacttttcccagatgcggctgaatgtgagcgtaccccaaatagcgatgaagccttcaacgaatggcttggttgatccgacgttatggcaggagggcattccggcttttttactgaactacagcatcaatggcagccagaatcaacgctcacaatttggtaataaacagactaatcagagtctgttcggtagcttcaattctagattgaatctgggggcctggcgtcttcggaatacggcgacttattcttatagcagtcaaactgataaccggtatgactcattcgatgacgcagtgaaaaaaacgaccgaatcccagcaacgttggaactttcagcaaacctatttgcagcgggacgtggtggcgttacgcagtgatctgacgataggggatacctcgaccggtagtgtggcaggtcaggtatttgatggttttccttatcgtggtattgggcttgccactagtgacccgatgatgcccggcaggctgagtggttttgcgccgattatcagtgggatagctaaatccaatgctcagattacggtgacgcagaatggcagtgtgatttatcaaaccaacgtggcacccggtccatttcgtatcacagacttagtgggcagcagtgtcggaggcgacttgcaggtaacgataactgaggccgatggtactcaccatgggttcactcaggcttattccagtctgcctatgatgttgcggcaggggcaattcaagtacgaagtggccgccgggcgttattacagtagtggatatggcagcggcatacgtaagccggtgtttggtatggcctcgatgatttacggtctgcctggtaacgtcacgttatacggtggtggcctggtggcgcaatcgtaccaatccgcggcgctgggaaccgggctctctctgggcatgatgggggcgttatctgcggatatcacgacttcccggactcggttacaaaatacgcctgacatcctgcgtggggaatcttaccgcgctaaatattcgaaaagcatgctgaccactggcacgacggtggatttaaccgcgtaccgctattccacacgtaattacctgagtttttcggatgcgaacactcaaggctacagtgtttggggagaactcccttcttggatgtctgagcggcgacgcagtagttggcagatgcgactgagccagtcattgcccggtaactattctctgtggctcagtggtcagcgggataactactggggaagctctaaaactaacaccaccctatcgatgggattgaatggttctttctaccgtgtgggctgggggcttaattacagcattgatcgcatgcgcggtaacggcgactggcctgaaaatcggcaaatttcgttgaacgtaaacgttcctctgagtctgtttggctcctatgcggcgctgaataatgcgtatgctaactatagtttttcccgtgatagtacgggacgcagtaataaccagttgggcataggcggatcggtgctggatgataatagtctgtcttggaacgtatcgcagagtcaggcgaataaagggagagggcgcagcgggtcagtgtcaatgggatatcttggttcctttgggcaagccaacttgggatacaactacgattcatgggggggacgtggtgtgaactacgggtttagtggagggctgattgcacatcagcatggcgttactttggcatcgcgtattggtgatgctgctgtattagtgcggacatcgggggttgcaggtattcgtgtgatgaattccagttcggtgactactaatcgctggggatatgcggttgtgccttatgcccagacgtacagccgtaatagtatcagtttagatccgtcatcgctgccggaaggggctgacatggcacagggtagcaagaacgtattcccgacgagtggtgcggttgtgatggtggattaccccgtgcgtattgggcagcagttgctgatgaatttgacctataacggtaagcccgtgccgtttggggcaatggcggggcttaaaggggatacagacacaaatctggccgcgatagtcggggagggcggacaagtgtatctgagtggtatgccacccagcggggtactgaaagtgaagtggggcagtacaccggacaagcagtgcgaggtggcatttaacctggggccccctccggtaaaggcgaaggcagataaacgctggaatccaatgaggcaattgaacgaaacctgtcgttaa

SEQ ID NO: 8615 - DNA, 795 bp, Photorhabdus luminescens
atggtggagcgtaatatttcaataaaacagatcgttataactgtgtcatgtgttctggcaataatattaccggtattgccactcagggcagcagagagtctgaaggggttgcatctcaatgacactcgtgtgatttatcctgaatcatccagcaacggagtctcttcgacactcattaataacagcgacaacaattatctcattcagtcaatcgtacaagaactaaacccagagaccggtttaccgctgggggttaaggcaccatttatcgttattccgccgattgcaaaggtgggggcagatgaacggctggtgttgaaaatccttcgtattggtggggttttgccgaaagatcgagaatctctgttctttctgaatctgcatatgttgccttctgagaaccaattaccagtatctagagatggctctggcaagatgaaaatggtgacagctctggcggtgaaattgttctaccgtcctgaagggatactaaaagagggggttgccggtgcggtgaaacagttaagcgcgtcagtaaaagaggatgtcgtgatgctgactaatccgtcaccgttttggataacgttgcagactttgcaggtcagttcgtttgccgtaccgggcaaggatttgtttaggatggtgccaccctttggtcagcagagctggtcgctgccggcaggtaaagtgtctcctggtagtcatgtcactgtatcgtggcgtgctattgatgagtttgggttagacactgatgaagagagtagatctattgccgtatccggcagtggtcaatag

SEQ ID NO: 8616 - DNA, 720 bp, Photorhabdus luminescens
atgggaatgctggcgatatgggcggttatggcatcgtcaccagcacatgcgggtcttatgttgaggaagacacgtattatttatcatcagggcgacaaggtgcaaagcatgtcattgcagaattcaggcgatgaggtgtatctaatacaagctgctgtgactccgggagataactcaaatacccgttcatcggagtttaccgtgttgcctccgttgtttcgcatggagggtaatagcttgaacgtgatgcgagttatacgtaccggcggtgatttcccagctgatcgagagtctctgtttcgttttcgtattaatgcgattccggcgaagaaaacactagatgagagcaaggccaatggcaatggaaaaccaggagagattggtgcatctctgtctattgcgctggggatgaatattaaacttatctaccggccagataagctgccgatgacaccggagcaggcctatggccgactgacatttatacgagcaggcaatactgtcgtagtgactaacccaacaccgtattaccagacttttgcccaattgaaatttgatggcaaggcagtagatcttaacaaagccccgtcaatgttggcccctttcggccagatgactttttccttggcaggtacggcgggaagtaaagtgacatggtcgatgatcaccgatgccggtggagtgagtagactacagagcggtacgttacgggccgactaa

SEQ ID NO: 8617 - DNA, 657 bp, Photorhabdus luminescens
atgacatatcacagcagggcaaaatatgtgttgctcttcatgatgctgattggatggaccatcggttgtgtgacgactttcccagtgcaggcgaaggatccaaatacgaatcgtacaatcaatttcagaggcatgttattgcctccgacctgtgtgttgagtgtgaatgggtccagctttgccgatttttataattattatatcgctccggtctatgccagtgaacttagaaatagcaaatatatcgcaagagatcccttagaactgaactttatgtttagtgactgtgatctaggcgaatcaagacccgctctctacatatggagtgatgtgcctgccataacagatccggagcttttcatgcctgatgccaaatttaacagtactaaaggagtaggggttaggttattcgacgagggaactaacaagtttgtagaggtaaggaatgagactgacccgtatagggtagacctctcagacagtgtaaaaggaaatggtgggaaattggagggagcaatgaggaggttcagggcgtatgtgggaggtctgggcgatacaaataatccagtaacctgtaaaaccgggagtaacagcatcaatgtattatgcggaggagtagcggatgtgaatatacattttgagttcgtgtatcagtag

SEQ ID NO: 8618 - DNA, 723 bp, Photorhabdus luminescens
atgtttgggacagcgacagaacaaaaaaaaagcaggctgaatgacccgtcgaccttcctgcccaagggtagaaacccggtattgcaggttgtgatgcgctgcttctgctggagttctgtaatggttctgctgttcctggcaagcagcgtcatggctgatgaccccaatcccaagcccaagaccgggcccaagtacccaccgacgatcacgagtgggatagacgtacaggtgaatgtaactgtttatcctgatccttgtgacatagagatcgatggtgatgatattaatggttcggagctgaattttggttccctgctggcggcggagtttagtcatgaaggggatgtatcagccaccaagtcatttaagttgaaattaacgaattgtggcgatccggatagtgtgggctttgtccccaagctcactgtatctggaaataccatcgacgctgaacagggttcaatatttagtgatcctaattccggtgatcctggggcttctgaggggctggggtttattattttaatcggagaagaaaagaaggaaatagggctgaatgatgatttgataataaatcatcgcgaaatcaatgttccggttgaatttgatgagggcagtggtgagactgatgtaacggtagcaattgcacgtgggagagatagtaaggttattcaacccggcacgctgattgcgcacgtcacatttacattttcttatcagtga

SEQ ID NO: 8619 - DNA, 573 bp, Photorhabdus luminescens
ctgaattacatcggcatgggtggggttctgtggctcttttctggtcccttgtgggcagcgaattctgttggggccacatttagggccgaaattacgcaaggcacgtgtgatgtcattgtggacagcaataatatcgagctgggcatagtgcagtttgcagacttggtattaggaaaagttaacagggaaattcagattacgctgagaaattgcacgagtgtggtcaatagcaacagtattactcccacgattaccgttaccggaaatcatgttggtacgaatgataagagcttgtttcgtgataaaggggcagatgaaaaaaacgaagcttcaacggcagtgggcatcactgtgcaattgaagaagtttagtggaacagaatggtccccagatttaaaggacgatgaaccgtttcatctggctaataaaggcacaatcgtaaacgataaaacgcctactgtgccggtgaaattttcactggtatgtgctttggcaggcgggcagacggtagcggtctgcaaaaaggcaggaaaaatcaaggctacactgacgtttacgtttaattatcgttga

SEQ ID NO: 8620 - DNA, 741 bp, Photorhabdus luminescens
atgatcagtaaactccgacttcctaacatcatagtaaaaagccttgtattggccgcgtttttgtttgcgtcacagagctgggctgaaggcggatttggcatcaatgctacacgcattattttcttacaggataaagctgaagcaatagtctcggtgcgcaatacaacaaccaatatcccttacctagtgacaactaaaatcaccagcaccgttgatggcaagggtaaaacaccattttacgtcacgcctcctttatttcgtttggaccctaaaggaactaatgtcctgcacatcttaggtgataccagcaagttgccgactgaccgggagagtgtcttttattttaatgctgctgctattcccagcagtaagccttctgggcagcgtcttgaaggtgacaagattgcgggtggagtagtctatgccatcggcaataccatcaaactattttatcggccaacggggttggtgggtacgccagagctggcatacaaagcgctgcgttttacccatgctcccggtggcgttcaagttagtaataattcgccttatcacatcagttttacccagattaaagttgatggtgtgccggtgaagttttctgacagtcatccacaaatgttggcacctttcagcacccatgtttatcccgctcagaatagtcagaataaaaagaaggtggaatgggcggtgattagcgatctcggcggtggagagaacttcgatggtgaaattcagtaa

SEQ ID NO: 8621 - DNA, 606 bp, Photorhabdus luminescens
atgaaaagacagatattaaagataagcgtcgtggcggcgttggttttgggagcagcttcggctgctaatgcggcgaataatgccatagtaaatgttaccggttcgattgtgactgcaacatgtgatgttactaaccctggctcaaatgggacggtggatacggggaaccatataaaaacagcttttacagcccccccagatgggaaatttccaggcgcaggaatttcaaaatttataaatgatagtgaaaggcatttcactattggtcttgctgactgctcttcagacaataaagatgcaagtaaagttaagttgtatgtgacaggtaacaccttggagggatcagggggttatctctttaacaaagatattaataaacaggcaggtatagtactaagttatctagaaaataatgtattaacgcctattaaaagtgaaagcacggttgctatgatcgttcctaatgtaaaaaaagacaacaaagaggaacctgatatcaagaatagttatgcagaatttgttgtatatatagccacaaagagcacagatgctcctggaaaccagcggattactgcccccatcaccttctcctatgcgtatgactaa

SEQ ID NO: 8622 - DNA, 567 bp, Photorhabdus luminescens
atgggccaaagaaaatatctgactcaatcagaagtagaaagcatgttggaaatggcaaaagttgggcctaatccagaacggaattactgtctggtttatatgagctatatccacggctttcgtgttagtgaagccaggcatttacggttatctgacatggaattaaaagaaaaatgtttatatatcaggcggttaaagggagggttttgtactaaccatcccctgttgcagcgtgaggttaaggcgattaaggcatggcttaaagtgcgcaaaactttacagggcgcggatagtgattggctgtttttgtcgcgttgtgggaaaccgcttactcgccagcgtatctatcagattatcaaccagttagggcaacgggcgaatatcgcggtagatccgcatccgcatatgttgcgtcatgcctgcggttttgctcttgcagatcgagggatagatacccgactgatacaagattatcttggacataaaaacattcgccatacggtacgctatacagccagtaatgctgaacgttttcaaggagtttggagtataaaaggtagacgttaa

SEQ ID NO: 8623 - DNA, 2112 bp, Photorhabdus luminescens
atgcaatctaacggagataaaagaaaccttatgagaggcccattgcttgatgccatccctctgacttccctacgtggcgtcggggcaaatcaggccgcaaaattagcaaaaatagggctggttaatttgcaggatctgctgctgcatttcccgctgcgttatgaagaccagacacgcctttatactattaatgatcttttacccggtatttccgccaccgtcacaggtgaaatcctgcgtaccgatgttactgttagtcgtcgtcgaaccctgatctgcaaaattagcgatggtaccggcgtgctcacactgcgcttttttaacttttcggcggcaatgagaaacaatctcgcgaaagggaaacaggttgttgtctatggtgaaatcagaagaggcggtcagggtgccgaaattattcatcctgagtataagattcaaaatcatactggaaatgtacagcttcaagagacattaacaccgatttacccgacaacagaaggtgttcgtcaggcgacgctgcgtaatctcattgatcaagcactgaaattactggatacctgtacaatcaatgaacttttaccggaagaacttagccgctctattattagtctgccgcaagcactgcataccttgcaccgcccaacaccagatattgcgctggtggatctggaaaccggcaaacatccagcttatcgccgtctggttctggaagaacttttagctcaccatttgagtatgttagccgtcagagctggcgtacaacgttatcacgctcagccgttgccgactgaggacaagttaaaaccgcaattccttaatcgcctgccattttctccaacccatgctcagcaacgggttgtctcagaaattgaacaggatctggcaaaagatgttcccatgatgcgactgattcaaggcgatgtaggttcaggaaaaacgctggttgccgcattagctgcgttgcgtgccattgcacatggtaaacaggtcgccttgatggcaccgactgaactactggcagaacagcatgcaaatacattccggcgatggctggaacctttgggtattcaggtcggctggctggcaggtaagcaaaaggggaaagcacgtcagaaacaacaagaagccattgccaacggtcaagtcgccatgattgttggtacgcatgccatgtttcaggaacaagtgaagttttccggtctggcgctggtgattattgatgagcaacatcggtttggtgtgcatcaacgtctggctttatgggaaaaaggacgtgaacagggttttcatcctcaccaattgattatgacggccaccccgattccccgtaccttagccatgactgcttatgcggatctcgatacttctattattgatgaattgccaccggggaggacaccagtcacaaccgttgcgatcccggatacgcgccgtgaagaaattatcaaacggatcagaaacgcctgtcttgatgaaaacagacaagcctattgggtctgtacgctgattgaagattccgatgtgctggaagctcaagcggcacaagccaccagtgaagaattgacgctcgctttaccggaactgaaagtcgggttggtacatggccgaatgaaagccgcagaaaagcagcaagtgatggaagctttcaaatgtggagaattacagcttttggtcgccacaacggttatcgaagtgggcgtggatgtgccgaatgccagtttgatgatcatcgataacccggaacggctcggcttggcgcaacttcatcaattacgcggccgagttggccgtggcgctatcgcttctcattgtgttttactttacaaaacgccactgagcagtaccgccagaattcgcctgcaagtgctcagagacagtaacgatggttttgttatcgcgcagaaagatctggaaattcgcggccccggggaactattaggaacacgccaaactgggaatgcggaatttaaggtagctgatttgctaagagatcagggaatgttgccggaaattcagcgtattgcccggcatattcaccaacactatcctgaacatgcccgtgccttgattgaacgctggctaccggaacgggtacattatggtaatgcgtga

SEQ ID NO: 8624 - DNA, 279 bp, Photorhabdus luminescens
atgatttatgccaaaaatatttcagataatgtggttaaagttgcaattagtaaatggagtagtgacgaaggtgatgatgaatatattgatattcctccaggagaggtggctcaatggggtagatcagataagcgcggttatttaatgtcattagcacgtaaagatagtgccacaatgttgtattcaataaaatcaaatggctacataattatttatactagctatgttgaaaataacggtagccggatagactctttatattcgataccagctgtctaa

SEQ ID NO: 8625 - DNA, 261 bp, Photorhabdus luminescens
atgatttatgttaaaaatctctcaactgaaccggttaaagtttcggttaataaatgtggagaggaaggtagagaggaatatttagctcttgattgtgaagatgtcaaggtgtgggatctctccgatacgcatggttttatattgtcagtaatacagaaaggtattgaaaaatcatattctgcttctcataacagttttattattatttttgatgattatgtacaagatagcggcaccaatatatctcatcaagagaaataa

SEQ ID NO: 8626 - DNA, 216 bp, Photorhabdus luminescens
atgagttgtctggctcttctttacctttgttttacgataaaaaagtcattttgtttttatcgtcatccgcttactttagcctttactgatgaggagtgtctcaacaacataaatgagcgtcaatttacccgcgccatttggttccgcaatgattatcaattagtttccgagaaacttcgttattcaggacttaaagcacatagtgaatatgattag

SEQ ID NO: 8627 - DNA, 291 bp, Photorhabdus luminescens
atgatatttaatatcgatttcgacgaacgagccctgaaagagtggtacaaactggatcagagcatacgcgaccaatttaaaaagaagctacggaagttacagaacaatccctatattgattcagccagattacacggtaatctggctggctgctttaaaattaaactccgttcttcaggctttcgtctggtttaccaagtgatagaagaagagatcgtaatattggtgatcgctgttggtaaacgggaagatgcgaaaacttatgaaatagcttgtaaacgaattgtataa

SEQ ID NO: 8628 - DNA, 255 bp, Photorhabdus luminescens
atgagtactattcagatcagagttgatgaagaacttaaaaaaagtgcgtatcagacatttgagaaactgaacttatcgccatctgatgcgctacgtctctttctgcgatatgttgtggagaatgaaaagctgccgttcactgaagtttccgttatggtggcagatcatgatgaagatgcagacatcttagcagtggtacgtgaccgtcttaaaaatcccgctagacgtatcagggtaaaccttgatgatatttaa

SEQ ID NO: 8629 - DNA, 768 bp, Photorhabdus luminescens
atgaagcttttcaacgcattggggtttcgttgggaccggtctgcggctcctcttattgttcctattcattctattgagcgggtatgcttccgctttcatcggatgctgccagaatttgtttgggatgctggtgtacttgaaggcaatccctttactttccccgaagtgaaaacattgttggacggtgtcaccgtcggcggtaggaaggtttctgatcagcaacagatcttaaatcttgcagagagtgccaggcgcttactagttttagtgaaaaccggtcaatttgaattgaccaaagccacattcgcagaacttcatagcatcgttgcttgtaatgaagctttggagtggggaatgttccgtggggaagggcaggagacaaattacactccagatgtcagtttgggcaatcaggggcgtcatacgccgttgcctactgagtctggcgcaccagaattgaatcgtgtttttcacgagggtcttgctgcattgcgtgaatgtcggccttttgaacagggagctgcattctttcttttcggggcgctacagcaatttttctttgatggtaacaaacgcacttcacgtttcatgatgaacggtatcttgatgtcgaacggcatcgatgcaatcagtgtgcctgcggcaaaactgtatgagttcaacgaaaaaatggtccgcttctacctgagcaaagatgctactgagatgatgatgtttcttatggattgtcatccggataaagtggcaaatctcggtttttttaaatga

SEQ ID NO: 8630 - DNA, 270 bp, Photorhabdus luminescens
atggaaattattcccgcacaactagctaagaaccagtttggtgatctgcttatgaaagttcagcgtgaacctgtagaaattagtaagcatggtaaacgtgtggccgtggttatctctcccgaagagtatgatcagttcgcacagctcaagttacagaatttaaaagccgttctggctgaatctattgcacaagctgatcgtggcgaattgcacagtattgatgatgtatttgcaccgttgacagttgatgaacttgagggtagggcttaa

SEQ ID NO: 8631 - DNA, 408 bp, Photorhabdus luminescens
atgagtgtccggtttactaataaagccagagaacatattcgtgcaatcaaactctattctatgcgccgatggggggcgaatgttgcggaagcttattcaacttcgttacgtgtgactatgacggaaattcttgatcgtcacccatcccccggtcgtgatcgcagtgaggatctttattttggtgtgctaagtttccccgtagagagccacattatttactaccgggaagttccgacgggtattgaagtgttggcggtgttgcatcaaacgcaagatccacataatcatctataccctatggatttcaagatgcatcgcgacggcaagggagcaaatccccgggagcatagagaacgatgtgaccggggtgagcgagtgcagccaacaaagaggcaacttgaaagatga

SEQ ID NO: 8632 - DNA, 744 bp, Photorhabdus luminescens
atgaaagataacactttatatggccctattgcacatctttacgagagcttttcagatgctactgaccatatcaaagtagaaatcagaactatcttcaacctggcaggagatatacacgggaaatcagtgttagatttagcctgtggatatggtctctttagtcgagaatacagaaatcgtggtgcgtcgaaagtcattggagtcgatatatcagaaaacatgatagcgattgcgaaaagcaaatcacaacaatacggtgacgatatcgaatttcacgtaagaaatatctgcaagatggagtcggagtcatttggcaagtttgacatagttaatgcagcttggttattttgccatgcagaatctcttgaagaccttgaaactatgttccgtgtcattgccgctcatctcaagcctgccggtaaattaattgcgtatacctttgaacctgattatcgattagagaaagggaattatgagaattattgtataaaaattctgagtgaagagccggtgaaagacaccactctcgtgaaagctgaatttcttaccacaccacccagccctttcactatgtatcgttggagtcgtgaacaatatcaaacagcgatccaaaaggcggggttcaaacaatttaaatggcaaaaacccatgctgttagaaagagatattgaggctcatcccccaggtttttgggatgatttccaacgaaattgtcttgatacagctcttgtttgtcagatttaa

SEQ ID NO: 8633 - DNA, 225 bp, Photorhabdus luminescens
atgaagctttttaacgctctggggtttcgttgggaccgatcttcggttcctcttattgttccgattcattctattgagcgggtatgcttccgttttcaccggatgctaccggagtttgtttgggatgctagcgttcttgaaggcaatccttttactttccccgaagtgaaaacattgttaggtggattgtcacccggatgcagagcaaattcgaacggcgaatag

SEQ ID NO: 8634 - DNA, 1209 bp, Photorhabdus luminescens
atgtatcatcttgatgtttatggcacgctcgttgcgtctgcattagtactattacttgggcgtaaacttgtacaatccgtcccatttcttgaaaaatacaccattcctgaacctgtcgcgggtggcctgttagttgctctaattcttttagcggttaaacaaacaacaggctgggaaatcaactttgatttatctcttaaagaccctttgatgttaactttcttcgccactatcggcttgaatgccaatctttccagcctgaaagcgggtggtaaggtcctgttcacgtttgtcttcgtcgttgtgggtttgctactggttcagaacacggtgggtatcgctttggctgaactgttggggctggatccattaatgggcttactggcgggttctgttacgctatctggcggtcatggtaccggtgccgcttggggtaaactgtttagtgagcgttatggttttgaaaatgcaaccgaagtggcaatggcttgtgcgactttcggtttagtactgggtggtttgattggtggtccggtcgctcgtttcctggtgagaaatacaaaaactccgggcttgaggggcgatgataccgaagtgccgacagcatttgaaaaaccgtataccgggcggatgatcacagcactggtgatgctggaaacgatcgccttgatcgctatctgtctgatggcaggtaattttgtatctgaacttctgcaaggtacatggtttgaattaccgacgttcgtctgtgtgttatttatcggggttattctcagtaacagtctatcggtgttaggtttttaccgagtctttgaccgagcagtttctgtactgggcaacgtaagtctttccctgttcctggcaatggcgttaatgagcctgaaattgtggcagatggcatcgctggcattacccatgctggttattctcaccatccaggccatcgtgatggcgctgtatgcaatttttgtcacctatcgagtgatgggtaaaaactatgatgctgcggttttggcggcaggtcactgtggttttggtttaggggcgacacctaccgccattgcgaacatgcaggcgattactgatcgcttcgggccatcccatgtggcgtttctggtggtgccgatggttggggcattctttatcgatatcgttaacgcgattgtgattaaactctatttgctgttacccgttttcccggcggtgtag

SEQ ID NO: 8635 - DNA, 1386 bp, Photorhabdus luminescens
atgctcacctcatcccctaaacaagctgaaacaatacccccgaaaaaatcagctagtgaattgatttatcgcttagaagatcgaccaccattgccacaaacattgtttgctgcctgtcagcatttactggcaatgtttgtcgcggtcatcacgccagcaatcttgatctgccaagcgctagggctgcccactcacgatacacagcggattatcagtatgtctctgtttgcttcagggctagcatcattgattcagatccgcacttgggggccaatcggttctggtttgctttctatccaagggaccagttttaactttgtttcccccttgattatgggcgggctggcattaaaaaacggcggtgccgacatttctactatgatggccgcattattcggtactttgatggtggcatccgttacagaaattctgttatcccgcgtattgcatctggcccgaagaattatcaccccattagtttccggtgttgtggtgatgattatcggtttgtctctgattcaggttggattgacctctatcggtggtggattctctgctatcgaaaatcacacttttggttctccagagcatctgtttctggccggtgttgtattggtggtgattgttttgctgaaccgccagcgtaatccttatctgcgtgtggcttctctggtgattgcaatgacggtaggttatgttgccgcctggctaatgggtatgctgccaccagcaacggtacaggaaaatggttcactcatgacaattcccgctccactctattatggtctttcctttgactggaatctgcttatcccgttgatgctgattttcatggtaacttcgctggaaaccatcggcgatattactgcaacatctgatgtttccgagcaaccggtcagcggtcctctatatatgaagcgtattaaaggcggtgttttagctaacggcctaaattctatgctttctgccgtatttaatacttttccaaattcttgttttgggcagaataacggggttatccaattaaccggcgttgccagccgtcatgtaggttacgccgtggcgctgatgttgatgctattaggactatttcctgcggtcgcaggatttgtacaacagatccctgaaccggtattgggaggtgccactatcgtgatgttcggtacgattgccgcatcaggtatccgtatcgtttccagagaggcacttaaccgccgggcaattatgattatcgcgctctctttagcggttggtatgggtgttgcgcaacaaccactaattttacagttcgctcctgactggctgaaaacgttactctcttccggtattgctgctggcggtctgacagccatcactcttaatttggtatttcctcaggagaagtag

SEQ ID NO: 8636 - DNA, 1554 bp, Photorhabdus luminescens
atgtcagaaaacatgaaacaaaaatcgtcgaatgaaggtaatatccgcacaacccgcccacttacaggaacggaatttctggatgggctaaacgatggtcgggaagtctgggcttatggtgaacgcattcacgatgttgtcaaccatcctgcttttcaaaatccggcccgagctattgcgaaactttacgacgctttgcacgatcctgcttatcgtgacgtactgaccacggcgacagatacggggagttgtggtgtaacacacccttttttccgtataccgcgctcacagcaggatttaattgctgatcgtgatgctattgccgcgtgggctcgcatgagttatggctggttggggagaagccctgattataaggcttcgtttcttacctcgctcggcgtaaaaccggaaatttatggtgattttgctgataatgcaaaaagctggtatatccgttcgcaggaaagcgtgttttactggaatcactcgattattaatccgccaatagatcgtcatttatcacctgatgaaattggggatatttgtattcatgttgaaaaagaatgtgatgatggattaattgtcagcggcgctaaagttgttgccacaggatcggcgattagtcactacaactttattggtcattacggtttaccaataaagaaacgggaatttgcgttggtctttaccttgccgatgaataccccgggagtgaaattaatttgtcgtccctcttacgcaatggcggctgataaaatgggcagtccttttgattatccgctctcgtcccgatttgatgagaacgatacgataatgattctggataaagtgaaggttccttgggaaaacatatttatctatggagatgtagataaagtttcgttattttttgctgaatcgggttattttcatcgggctatgttgcatggtgtgactcgattggcggttaaacttgattttctttctgggttgcttattaagggggttgaagctacgggtacgaaggattttcgtggcgtacaagcacgggttggtgaagtattgtcatggcgtaatatgttttgggcactcagtgatgcgatgattaaatccccggagccttggagtggagatgccctattgcctcggtacgagtatgggatagcttatcgttggtttatgacgctgggttacccgcgggtaaaagagattattgaacaggatttgggcagtgccttgatttatattaactctcatgcccgcgatttttccaacccggaactgtctccttatcttgataaatacatgcgtggctccaatggttacagtgcagttgagcgagtcaagctcatgaaactgatttgggactcgatcggtacggaattcgctggcaggcatgaattatacgagcgcaattattccggcaaccacgaagctatcagagtcgatgtgttattggcttcccaagccacgggcttagtggatcaattgaaagggtttgctgagcagtgtatgagtgaatacgatcttgatggttgggttggtaacgattttatttggccttccaaccgctag

SEQ ID NO: 8637 - DNA, 1707 bp, Photorhabdus luminescens
atgaaatggttaggaaaatcgctggttacactgttattactggtaatactggcagtaatcacggtttatgtcgtgatgcagacaaactggggaacacatcagcttagtcaatggctgagtcatcacagccgttatcaggttcaaataggcaatatcgaacataactggtcacaaccgggcaccctgacattttccaatattgtcattagcaatcagcaacaaactttcattttagcggctcaagttgccgcattcgatttcaactggcagcaactgacttccccgcgccattttcatcgtctgctattgcaacagggccaattaacaatcaaaggccagcaacaatccttaccttttagcgccaacattctgcaacttaatcagatggctattcagtcagaaaatgcaagctggcaaattcaagggcaaaacatcactggcggtatcactccttggaacccacaattaaatacgttggcagggaatggggaatttcaattcagcgctgataaactgaatttcaatgatatttctctcgacaaagtcattatgcgaggagataaccagcaaaataccctcactctccgttcatttggtgcaacattggcacagggttcggtatcaggtaatgggcaacgtctgcctgatggtagctggcagtgggataatttacttatcagcaatattcgttggcaaacgccaatggcacttgaggagttattgcgaaaaacgaacaaattacctgcaatcagtatcaaagatctgagtctcactaatgccaaactggaaggtaaaaactggtctgctaactatctggatgtctcagtaaaaaatgtcgggttgactaacgggatctggcaggcaaaagagggcatcattgatttcaacgttatggatattacgctgaatgatcttcatttcaccgatgttattggtcaccttcttcttgcaggcaatgaactcactatttccaatctcacttcccgttgggaaaaggggttattccacgtcaaagggcaatggaatcaccaaacaaaacaattcaacatcaccaatgctacggttgccggtttaacttataccttgccacaaaactggcatcagttgctgaaaaaatcattgcctaaatggatatcgcgattttccattaacgagctgacaattaacaacagcttactgattgatattaaccccgattttccattccagcttactgccctcagtggttatatctatgacatggaattactgaaagaagggaaatggggaatctggcatggctcttcgaatctaagtgccactagcgcaacatttaacaaagttgaattacgtcgcccttaccttaaattacatacagaaggagatacactgatcctcgatcaattagatgcttctgttgataacggattactgaaagtgaagggtacagtagatcaacaggtacagaagccatttactttagatttccggggaatagatgcagatttaacgattttgcctcaatggcggtgggtgccgttgaaattacagggtaaaggcaatttcacgctgttaatacagggagatcttgctgctgataatattaaaagtactatcgatggttcattgactgccacggataaacaatcaggcagcgaaacgcaaatcatcaataaggggcaaatatccaccccaaactgtgaaacctgtccggttgttaagttatag

SEQ ID NO: 8638 - DNA, 423 bp, Photorhabdus luminescens
atgacgtgtatactgcctgaatccattgaaaacaaactgcaaaattatgaccgtattgttgtcggtggcatcatcagagatcaaaatggcaatattctgttcttacaacgagctcctgatgaatccccgccgaatctctgggaaattccctctggcggtgtagaaaaaggagaaaatctattacaagcactatctcgtgaaataggagaagagaccggactgtttcttgatgatgttattggttttatcagcgcagtggaatattctattaaggagactcgatgccttcagataaattttaatgtcatatgcactggtgaaattaagctttcgcctgaacacacgcaatatcaatggagcaatatagataatttccgcagtgaacttgatgactttatgttacgtgtattcaacgagtcgtga

SEQ ID NO: 8639 - DNA, 918 bp, Photorhabdus luminescens
atgtatcatctgcgagtacctgaaacagaacaagaactggaagcatattaccgatttcgttgggaaatgttgcggaagccactgcatcagcctgtaggctctgagaaagatggttacgacacgacggctcatcaccagatggttgtggatgagaaaggcaacccggtggcggtagggcgtttatatatcaatgcggatagtgaaggggcaatccgctttctggcagtgcatcccaacatgcaaggtagagggttaggaaaattaatcgcaatggccctggaatctgttgcccgtcaagagggtgttaaacgggtagtatgcagtgctcgtgaacatgcggtggagtttttcagtaaattggggtttgaaaaccgtgggccaattactagcccacaaacgacacctgttcgtcattttctgatgataaagccggttgcaacacttgatgatattcttcaccggccagattggtgcaacgaactgcaacaggcttggtacaaacatattccccttagtgaaaaaatgggggtacgaatttctcaatataccggtcagagctttattaccaccatgccggaagccgggaatcaaaatcctcaccaaactatctttgcgggtagtctattttctctggcaaccctgaccggttgggggttgatctggctgttgttacaggaacgtcaattaggtggtgatatcattctggctgatgccgatatccgttacaaaaaaccggttattggcaggccaaaatctgttgccgatcttaaaaatatgagcggcgatttggctcgtttggcacaaggcagtaaagcgagagtgaagctggatgtgattgtcagtggtgatcagggaatcggtgcggtatttactggcacctacatggtattgccgaatgcttatacggctatcgcttag

SEQ ID NO: 8640 - DNA, 438 bp, Photorhabdus luminescens
atgatcgcgttaatccagcgggtaacacaggcaaatgttgtggttaagaacgaagtggttggggaaattggtcacggcctgctggtgttgctaggtgttgagaaaggagatgatcaacagaaggcaaaacggttgtgtgagaaggtgatagggtatcggatattcagtgatgaacaggacaaaatgaacttgaacgtccaacaaatcggaggcagtttgctggttgtctcccagtttacactggctgctgatactcaaaagggcatgcgacccagtttttccggtggcgctgccccagataaggccgacgaattatatcgctattttgttgaacaatgccgccaaagtggtgtaaaaacagaaatcgggcggtttgctgccgatatgaaagtcagcctgacaaacgatgggccagtcactttctggttgcaggtctag

SEQ ID NO: 8641 - DNA, 627 bp, Photorhabdus luminescens
atgttatatatcttcgatatgggtaatgtgatcattgagattgattttaaaagagttttagcggtatggagtaatttgagcgggacacctcttgcgactttgactaaaagtttctctatgggagaaacgtttgaaaaacatgagcgtggtcaaattactgatctggaattcgctgatactttatgtcaggaaatgaatatttcactcagttttgagcagtttgctgctggatggcatgctatctttattaatattcggcctgaagtcattcagataatgaaaacattgcgtgaggcgggacaccgggttgtcgtgttatccaacaccaaccgtttgcacctcgattactggccacataattatcctgagattgcggcatccgctgattacctctatttgtcgcaggatttggcaatgcgtaaacctgaacctgatattttcaaatatgtgcttgagacagagggttattcaccggatcaggccgtgttttttgacgatgtgctggaaaatgtggaagcagccaaggcgttagggatcaatagcgttcatgttgttgataggcagacagtgccagattatttcgaagcaatcggtttttctgaacaaaatgagggattgaacggataa

SEQ ID NO: 8642 - DNA, 1455 bp, Photorhabdus luminescens
atgttgtggttcctcctctgtatcggccttcttctggctggatattttatatatggcaagattgtcgaaaagatattcactattcgaccagaaagaaaaacccccgctctttctatggctgatggtgttgattacgttgcgatgtctaccccaaaagtttggttaattcagttactcaatattgccggcgttggccctattttcggcccaattcttggtgccctctatggcccacttgccatgctgtggattgtattcggctgtatctttgctggtgcagtacacgattacttctccggtatgctcagtgtgcgtgcccgcggtgcatccgtgcccgttatcgttggtaacgaactgggcaaaaccatgaagcatttcatgaacatatttgcggttattctgctgatgctagttggagtcgtctttgttttgagtccagccggcttactgaataacttgctgaaagaggcaatgggttgggataacattgctatctgggtcggtgttatctttgcttactatattctcgcaacgctggtgcctattgataaaatcatcggtcgcctttacccactgtttggtgcattgctgctgtttatgtctgttgcgctgatggtcggtttagcgatgagcgataaacctttctattcacaaggattggatttcaccactaacttcaacccgaaagatctgccgatctggccattgctgtttgtcacgattgcttgtggtgctatttctggtttccacgccactcagtctccgctgatggcacgttgtatgcagaatgaaaaaaatggccgtttcgttttctacggtgcaatgattggtgaaggtattatcgcactaatctggtgtacattgggcctgagcttctatgaagatactaacgcattacaagccgtgattgatcaaggtacggcctctctggttgttcacgaagtgtccacgtctctgttaggtactgtcggcggtattctggcaatcctcggtgtggtgattttgccaattacttctggcgataccgcattccgttctgcccggcttattattgctgaattcctgaatattcctcagcaacaaatgaccaaacgtctgttattaagtgtgccaatgtttattgtcggttatctgattaccaaaaccgatttcaatattatctggcgttatttcggttgggcaaaccaaaccacagcaatggtcatgttatgggcggcttccgcatggctgctgcgccgtaataaattccattggattactaccctaccagccatgtttatgactgcggtgtgcttcacctatctggcatttgcaccagaaggttttgcgctaaactggaatatctctgttgttatcggcctggcagcaatggcggttgtcacaatgactttctttgcaaaagtccgctcccaatcagcttccgataatataaaagctaaagcattaaatgagtaa

SEQ ID NO: 8643 - DNA, 570 bp, Photorhabdus luminescens
atgaatcaggtattagcaacaaaacaacagatcagcttcggcatgatatttaacctcatagggttatttgctatcagtgctgtcctaacccttgccttctattatcaattggtcctttcagaactcccttgtccattatgtttgctacagcgagcaggcatgatcatgatagggtttggtttcctgtttaatctgtgttttggtatcaaaagtgcgcactatggcttatcacttatcggctgtgtcgtgactggcattgttgcgatccgacaagtatttttacatatcacacccggtgatctcggttatggttccgcgctttttggtatacatttctacacttgggcccttatctgctcagtaatcgcgattatcggcatatccgtcatgctgatattgaaaagcctggaaaaaacaaccgaagaaaagcaaaaaacatctgccatcggtcagattattatcggattatttgtcatattaattaccgcaaatttaatctccactattttggagtgtggcggtgggcagtgtgatgacaacccaacgttctatcaattgctcggtaaataa

SEQ ID NO: 8644 - DNA, 1821 bp, Photorhabdus luminescens
gtgatcgaaaaattgcgtaatatcgccattatcgcgcacgttgaccacggtaaaacgaccctggttgacaagctgctgcaacaatccggtactttcggtgaccgtgcgacaacgacagagcgtgtgatggactccaatgatctggagaaagagcgtggaattactattctcgcaaaaaataccgccattaaatggaatgactaccgtattaatatcgtagacactccgggacatgccgatttcggcggtgaagtagaacgtgttatgtctatggtcgacagcgtactcttgctggtcgatgctatggacgggccaatgcctcagacccgttttgtgacacagaaagcgttcgctcatggtttgaaaccgattgtggtcattaacaaagttgaccgtcctggcgcacgccctgattgggttgtggatcaggtatttgacctgtttgtcaatctgggtgcgactgatgagcaactggacttccccattatctatgcatcggcattgatgggaattgccggtactgatcatgaagatatggcggaagatatgacgccgttgtatcaggcgattgtcgatcatgtagaaccaccgaaagttgaccttaatggttcattccagatgcagatttctcagctggactataacaattatgttggtgttatcgggattggccgtattaagcgcggtactgttaagccaaaccagaacgttacaattattgatagtgaaggtaaaacccggaacggcaaaatcggtaaggtactgggtcatctggggctggagcgtattgagagtgagcaagcggaagcgggcgacatcgttgcgattaccggcttgggtgagctgaatatttccgatacgctgtgtgatactaatgctgttgaagcattgccacccttggctgttgatgagccgacggtaagcatgtatttctgtgttaacacctcccctttctgtggacgtgaaggcaaatatgtcacctcacgtcaaatccttgagcgtctaaagaaagagttggttcacaatgtcgccctgcgtgtcgaagaaaccgaagatccggatgcgttccgtgtttctggccgtggtgaattgcacttatctgttctgattgagaacatgcgccgtgaaggttttgaactggcggtatcccgtccgaaagttatcttccgtgagatcgatggtcgtaagcaagaacctttcgaacaagtaacgctggatattgaagagcagcatcagggagatgtgatgcagggcttgggtgagcgtaaagcggatctgcgcgatatgttaccagacggtaaaggtcgtgtgcgtcttgattatgttattccaagccgtggtctgattggctttcgtactgagttcatgacgatgacctccggtaccggtctgctgtatgcaacattcagccactatgatgatattcgtccgggtgaaatcggtcgccgtcagaacggcgtgatgatttccaatggtcagggtaaagcagttgcttatgcactttacagcttacaggagcgcggtaagttattccttggtcatggtgcagaagtgtatgaaggtcaagtgatcggtattcattctcgttctaatgacctgacagttaactgtctgacaggtaagaaactgactaacgtccgtgcatctggtactgacgaagcgacaaccctgtctccacatattaagaaaaccctggagcaggctttggagtttattgatgatgacgagctggtggaagtgaccccggtgtctattcgtctgcgtaaacgccatttgacggaaaacgaacgccgtcgtgcgtatcgcagtaaagaagcataa

SEQ ID NO: 8645 - DNA, 234 bp, Photorhabdus luminescens
ttgcaaacttatagttgtgaaagtcaaatagttgtgaaaatcaattcaatcacgaaaagcttttgcgaaaagcatgccaactttttaacgccttgcaatatactgtatcgtgggtataccggtgatgggatatctgaatatttgggaaaattgcactatattggtgcaattgtattactgaggcgcacaatattagtgcgtttatgtcaaaaatgcgtctatttatgggtgtga

SEQ ID NO: 8646 - DNA, 1410 bp, Photorhabdus luminescens
atgtccgttgaacatgttttaaccatgattgaagagcatcaggtgaagtttattgatttgcgtttcactgataccaaaggcaaagaacaacatatgaccattcctgctcatcaggttaatgcagacttctttgaagatggcaaaatgtttgacggatcttcaatcagcggttggaaagggattaacgaatctgacatggtactgatgccagacccaagcacagccatgcttgatcccttctttgacgatgccacactgactctacgttgtgacattttggaaccaggcactatgcaaggctatgaccgtgatccccgttccatctccaagcgtgctgaaaacttcctacgttcaagcggcattgccgatactgtcctgtgcggaccagagcctgagtttttcctgtttgatgacgtgcgcttcagcagtgccatgtctcattcttactatcacatcgatgatatcgaagctgcatggaattccgggacgcagtacgaaggcggtaacaaaggccatcggcctgcggtaaaaggcggttatgctccgctgcctcctgttgattcttcgcaggatttacgttcagcgatgtgcctgacgatggaagagatggggttggttgtagaggctcaccatcatgaagtgggaacagcaggccaaaatgaaatcgccacccgctttaacaccatgaccaaaaaagcggacgaaacccaaatttacaaatacgtcgtacataatgtcgcgcacaattttggcaaaaccgcaacctttatgccaaaaccactggttggtgataatggttccggtatgcactgccatatgtctctgtctaaaaacggtactaacttgtttgctggtgacaaatacggcggtctatctgaactggcgctattctacattggcggtattatcaaacatgctcgtgcgctgaacgcgtttaccaacccgacaaccaactcttataaacgtttggttccgggctatgaagccccggtgatgctggcctactctgcccgtaaccgttcggcatctatccgtattccggttgttgccagcaccaaagctcgccgtattgaagtacgtttccctgatccggcggctaacccttatctggcattcgccgctcaattgatggctggccttgacggcatcatcaataaaatccatccgggtgatgcgatggataaaaacctgtatgacctaccaccggaagaagctaaagagatcccaactgtcgcctcttctctggatgaagcactggcagcactggatgccgaccgtgaattcttgactcgtggcggtgtattcaccgatgacgccattgatgcttatattgacttgaaaaacagtgaaatagagcgtgtccgtctgacaccacatccactggagtttgaactctattacagtgtgtaa

SEQ ID NO: 8647 - DNA, 1050 bp, Photorhabdus luminescens
atgaaaacggaaaatctgcccgatagcgggcaaatattaaattcgctcattaacagtgtactggtactggatactgatctcgtcatccgctatgccaaccatgcagcactacaattattcgctcagagtgcccgtaaactattcggtacacctcttccagtactgttcagctatttttcactggatacagaactgatgcattctagtctggtcagcggccagagttttactgataacgaagtaacattagtggttgagaaccgctttcacattatgtcgctcagtgcccaaccgatttccgagcagttcatcttgctggaactggcacctatggatagtcaacgccggttaagccaagagcaggtacaacaagctcagcagacagccgcacgggaattggttcgggggctggcacatgaaatcaaaaacccccttggtgggttgagaggagccgcgcaattgctgtcaaaagcactgcctgatcctgctttgcaggaatacacccaggtgattattgaacaagccgaccgattgcgccatctggtagacagattgcttggcccacaacatccgggtgaacgaattaagcaaagcattcattatgttgctgaacgagtttcccagttagtctcgctggaaatgccggataacgtcacactggtaaaagattatgatcccagtttgccagaactggcccactatcctgatcaaattgaacaggtactactaaatatcacccgtaatgccttgcaagcgctaggaaaacaggggggaaccattaccctccgcactcgtactgcttttcagattaccttgcatggtaagcgctatcgtctggcggccagaattgacgtggaagataacgggccaggtatcccgccacaaattcaggataccttgttttacccaatggtcagtgcgcatgaaggcggaacaggtcttggtctatccattgctcgtaatttaatagaccaacactccggcaaaatagaatttaccagttggccggggcacacagcattttctatctacttacccattaagaaatag

SEQ ID NO: 8648 - DNA, 1473 bp, Photorhabdus luminescens
atgcaacagggaaaaatttggatcgtcgatgatgacagttcaatccgctgggtactggaacgggcgttaagtaacgcggggatggaatgtaccagttttgccgacgcggatagcgccctgaccgcgctggcccaaaacacacctgatgtactgatttcggatatccgtatgccgggaatgaatgggctaaacctactgaataatatcaaacagagcaacccgttgctgccagtcatcattatgaccgcccattctgatctggatgctgcggtcaatgcttaccaacaaggcgcttttgattacttaccaaaaccctttgatattgatgaagccgtcgcattgctggaacgagcgcttagtcactcccgcgatcagaatcaatcaattaaaagtccacaggttgtcacacccgtttctgacatgataggagaagcgcctgccatgcaggacgtttaccgcattatcggccgcctctcccgttcctctatcagcgtcctaattaatggcgaatccggtaccggaaaagagctggtggctcatgcgctgcaccgtcacagccctcgggccaatgagccatttattgcccttaacatggcagctatccctaaagatttaattgagtcagagttgtttggtcatgaaaaaggggctttcactggcgctaatcaagtacgtcatgggcggtttgaacaggctaatcgtggctcactgtttctggatgaaattggtgatatgcctctggacattcagacccgtctgttacgggtattggcggaaggtcagttctaccgagttggcgggtatgctcccgtaaaagtggatgtgagaattatcgcggcaacccatcaggatctagagcgcttggtacagaaaggcaaattccgtgaagatctctatcaccgcctcaatgttattcgtatgcaattaccgcccttacgtgacagagtagaggatatccctcgcctgacccgccatttcctacaacagaccgcaaaagaattgggcgtagaaacaaagattctccatcctgacgcagaaatagccttaatgcgtttaccttggccgggcaatgttcgccagttggaaaatatctgccgctggctgacggtcatggcggcaagccaggaagtattagtgcaagatttgccatctgaattatttgaaactcatcataataccgaaagcggtatgacaacatctgtaaatacagtatctataaataccgtacccgcaaatacaacacctacaaatacaataccgaaaaattggtcgcagctacttgcccagtgggcaacaactgcattggaacatggtcagcaggatctgttatcggaagcattaccgttattggagcgtaccttacttgattgtgcactgaagcataccaaaggccataaacaagaggctgcacgattgctaggttggggacgcaatacgattacacggaagttaaaagaactcgggttggagtaa

SEQ ID NO: 8649 - DNA, 1410 bp, Photorhabdus luminescens
gtgtcacgacaaaacagaacgccagaaaattatcaagcgaataaaatcggtcgcggaggatgttttgatcacctggagtgtaacgctcgtagaataactgacaaagataagttggctattatggcaaacatccttaactggcctgattatatcgtcctgtctgtctccgaactggagcatgattaccgggtacatgtagggacggccaacccacctactcactgcatccactgcaagcatcctgaaatcgttggctttggccgtcgtgatgaggtgatcatggatactcctgtcaatggcaagcggacagggattatactgaatcgccgccgctaccgttgtcaaatatgttgtaagacgtttatggaaccagtaccacacaaggatggtaagcggcaaatgactcaccgtttgatccaatacattgagcgtgagagtctacggcgcaccttttccagcgtagcagaggacgtaggtgtggacgaaaagacggttcgtaatatatttcacgactcctgcgagagactggaaaagacctttaattttgaaatgcctaaatggctgggtattgatgaaatccatatcataaaaccccggtgtgttatcgccaatatcgagctgcaaaccattgttgatatgcttgataacaataacaaagccactgttatgcgctacctaactaaacgaaaagatcgctatcaggtgcgctatgtcgctatgaatatgtggcgaccatacagagaagcagtggctactatgatccctgacgctacggttatcatagataagtttcatgttgtccgtatggcgaatgagtcactagaaagagcactaaaggccatcagaagcggcttgacagctcagcagcgtcgaagactgatgaaaaatcactttgtgttgctgaaacgtcgccatgagcagacagatgctgaatatatgcgattctctgactggatactcaactatcccgacttgggttatgcttacgagttgaaagagtcatttttcggcatatgggactgcaaaaataggtacgaggcacagcaagcctactatgtttggcttagacagataacacctgaaatgaaggtgtattttgacccactcgttaaagctatagataactggcatgatgatgtttttgcttacttcgaccacccgatcactaatgcttatatagagaatctgaacaatttgattagagtggtgaaccatgttggtcgtggttacagttttgaagcattgcgagctgaaatactgtttactaagggctttcagcagagcaagaacccccactatcaacatcaacggattcctgagcaggcatgcggaccagagtcggaaacgtcaataaattacggtgtagatatatcagcactggtaagagagatagaaatggggcgattatag

SEQ ID NO: 8650 - DNA, 3207 bp, Photorhabdus luminescens
atgggccaagaggcatacgaagctattcaggaaaagcgcctaaagccttggaaaggtgaagaggaagttcgatacatttggatgaaggcgatagaagatgctactggatttcatttgaatgctaagcgcgggcgtaaagactcaagccataatcacgtaatcattgaattcaaagcgccgggtttgtttcgtggcaagaaggagagcgctggcttcaaaaatgccatagaagaacgacttctgccatatatacagtgtgagtcaacgaaaacaggaattcccgaatctgatttcattggaatagctattgacggtgagcacatttgttttgctcaggtccatggtgatcagattcatactcaacacttgattcccttttcaacctatgcggtcgatttggtgattgacgcttttgtctccgatacgcgaaaagccttaacaactgagaacctattagccgattttggacatgggtcagcaaatgcccgtgaatttatgcaagctatgtctgatggtttgctttactacttaaaacagcaaggcaacaacaaagttaaaatgctttttgaggagtggagaactttgtacggccaagttgctgatatgtcgatttcacaaacagaggctattaacaaagagattgcatttatctggaatggttggccggaagattctacatccgcacggctatttgtcattcatacttacaattcgattctcatcaaactgttagctgccgagattgtatcagcacacggattaacatcatcgactcaacctgctcagagtatgtcggcgcaaaaagatgatgatgagctggttaattatttggactactctgtcgagaaatcggccattttcagggaagcgggcattaacggttttgtcgaagaggctatttttagctggtatattggccttgctagaaacaaggttgttccggcgttactaccttccttgaggcggttgctttcggttctatcgttatatcggcttgatcatttatctaggacaagggatgttttgcgagatctataccaaggtcttgttcctggcaaactccggcagagccttggtgaattctacaccccagattggttagttgattttacgcttcagagagctgctgacgacacattattggagcagcgtgtgttagatcctacctgtggatctggggcattcttactggcggtgatccgtaaaaagcgtgagctggcggcaatacaaggatggagtgtgtctaaggtcatcaaaaacctatgtgatagtgtatggggttttgatttgaacccgcttgctgttcagactgctcgtgtaaatttcctgatggaaattgcagaccttctcgctgcatgcccaggaatggatattgaggttcctgtactaatggctgatgccatttattcacctgcggagatcccctctggaaaaaatagagttgttgaatacaacatcggaagtcaggtagccaaactgaatattcacttgcctgttgagttagccttaaacagggaacgtctcgattttgtttttgaacgaatgggcaaagacgttgtgcagggattagagtttgataaatccagtcaaaaactgatagcagcaagtatagtcacccaagaagagttattaaactggtacaagccactccgacacacctatgatcaagtgttaaatctacacagaaagcaatggaacggtatttggttccggattgtcaggaacttcttctggtcagcggcagcaggtaaatttgatttagttattggcaatcctccttgggttagatggtcaaagctacctgacctttatcgtgaacgtgttaaaccaacgtgtgaagactatggtattttttctaagaccaagcgtcatggtgggaatgaacttgatatatctgccatgataacctacacagtctccgacaaatggctggatataggtggcaaactagcgtttgtcatcactggcacactttttaagaacccatcgtcagcaggttttagaacatttaaattagattcacagcgagaggattctctttatcttcaaccattgtctgttgatgacatgaaggaattgaaaccatttgaagatgcaagcaatcacacgtctgttgctctgtttcgaaaatccatcgtctctgtacaataccccgtggcttacaaggtatggtcagctaatcctggtcacaggaaagctattaggccctgcacacctcttgatgacgtgctgaaagctatttctcatacgacaaaagaagcatttccggttggtgatgaaggttctccgtgggcaattcttgctcctgggcgcttcaacgcgattaaatatctatcatcaccgtgtaaatggactaaaggacggaaagggatcaccacggatcttaacggagtttattttgttccaatcttgcaaaacaacggcgctctcgttcagattcaaagccgcccggaggctggacggaaagacattgggccacagaaaactcagtgggtagagcccaatatgctttatcctttaattaagggagcgagtgattttgatgaatgttacttgaaacttgatgctccagattacgatgatgttgaacaaagactgtttacgttcgtaccaaacacaggtatttcaaatgcagagtacgagagtgcggatgtacagttgaattcccctaagatgaaaaaaaccttagcatggtttaaagggttcgagagactgttactggagcgttctacctatcgtcgccaaatgaaaggcgctccttaccatgctgtttataatgttggcgattacaccttcaaaccatggaaagtgatatggccagaaatgtcctcatcgttttatgcagcggttgcaagctttcagaatgtacctgttgttggtgaacgtgtttatattccagatcacaaagtatactttgcgtcctttgataacaaagaaacagcatattatttgtgcggattattgaattcattaactgttcaggaatggattaacagccacaatgtatccattcaagttgcggatgtattcaaacatctatcattacctaattttgatattactaacacgatgcatactaaccttgcagagcttgttgaagaggctcatcagtgtcacgacaaaacagaacgccagaaaattatcaagcgaataaaatcggtcgcggaggatgttttgatcacctggagtgtaacgctcgtagaataa

SEQ ID NO: 8651 - DNA, 1374 bp, Photorhabdus luminescens
atgtctgagcaagccatcgtttgggatctgcctttgatccagaaatacaattattccggccctcgttatacttcgtatccgacggcattggaattcaatcaacagtatgataatgcagcatttatccaggctgctgcccgttaccctgaacgaccgctttctctctacctccatattccgttttgccataagctctgttatttctgtggttgtaataaattggtcactcgtcgaaagcataaggcggatgaatatttgcaatggcttgaacgggaaattcgtggccgggcaaagttgttttctggtcgtaaagtgagtcagatgcattggggcggtggtacgccaacttatcttaataaaaaccaaatcagtaaattgatgggattgttgcgtcaccattttgattttctgccagatgctgaaatttctattgaaattgacccacgtgaaattgaactggatatgattgatcacctgcgtagtgaaggttttaaccgtctgagcatgggcgtgcaggatttcaataaagaagtacagcatttggtgaaccgtgaacaggatgaagagtttatctttgctttggtagctcgtgcccgcgaaacgggttttaattccaccagtattgatctgatttatggcttgccgaaacagacaccagaaagttttgctttcactctggaacgagtattagcgttatcaccggatagaatgagtgttttcaattatgctcatttgccgagtttatttgctgctcaacgtaaaattaaggaacatgatttaccgagtgctgaacaaaagctggatatattgcaagaaacaatcgcaacgctgacaagtaatggctatcaatttatcggcatggaccattttgctcgcccggatgacgaactggcggtggctcagcgggaagggaaattacatcgcaattttcagggttataccactcaggaagagtgtgacctgctaggcttgggagtttctgctatcagtatgttgggcgatagctattctcaaaatcaaaaagagttaaaaacctattatgcggaattagaaaaacaggagcatgctttatggcgtggtttaacgctgtcccaagatgattgtattcgtcgtgatgttattaaagcgctaatctgtaattttcgtctaaattttatcgatattgagcagcaatatgagctgagttttacccgctatttcgccgaagatttgcaattattaacgccactggttgacgatggactggttgaagtgaatgagaaacagatctgggtaacgccgcgaggccggttactgattcgtaatatctgtatgtgttttgatatttatttgcgccaacaggttcgccagcatcagttttcaagggtgatttga

SEQ ID NO: 8652 - DNA, 165 bp, Photorhabdus luminescens
ttgatcctaataaccatactaatagtatgttatttgttatggttattgggtaaactgtggcgattatcgcggcgtaaaacccggctgcgcggagccaccatagcgcaacatattaagcatatgaaagtgttacgttttgatgggcaaaaacatcggaaggaatga

SEQ ID NO: 8653 - DNA, 510 bp, Photorhabdus luminescens
atgaacccgttaaagaaaaaagcaccagccaaagtatccgctagtaaacagaaaagaaaaaaccgcgaagaattgaatgcggaagggcgtgcacgtaagcgtgagaaaaaacatcgtggcaatccgcccggtaaccgcaatcaggaacagagcggtgataaacatccgtcaggcaaacagcaacgtgatccacgtcttggtagtaaagtgcctgttccgctgatcgtcggggaacaaccgacaaaacctgtcgttgctaataaagtcgagacaaaaccacgtctgtcgccacaggaagagttagcaatgttggaaaacgacgatcgtctggatgcattgttagagcgtctggaaaatggcgaaagtctgtctaaagaagagcatgcttatgttgacactacgctggatcggattgacgctctgatggaagagttaggtattaaactggatgaggaagagcgtgaagaagagaagcaggatgacattatgcaactgctgaaaggtaactaa

SEQ ID NO: 8654 - DNA, 1464 bp, Photorhabdus luminescens
atgcctatttttgatacttcttgctataaatccgtttacttgtgggtagttggttatgctttgttatggatgatagtgagttattcattcgacccaaccgtcccttatgatgccgtcgaagcattgaactggggaaaaaacggcgaatggggttcacctaaaaatccgtggttagtgggtgtaatgatgctgcctgctatccatataagcggtgtttcattgagtttttactggtatttcattcactttattgctatcgcgattagcatgctcggtgtatggcatctggcatttcgactgacaggaaaaaaagagctggcatggctcgccatgctgacattgaatctgtctggtattattaacttcgatattatcccatataacgataattatctgctaattatgctctggccgtggattatgttgttctttctacgagccgtatatgacaatccacattggtggttggcgtttgcccttagttccgggctggcaacaatgggaaaatattccacattggcattggttggttcagtttttctattgaccctgtttgtacctaaaattcgccaatgttaccgccaacccgcgctttatctcgcactggttatctggtttgtgctggtcctgcctaacttctggtggctgtggaataatgattttgccgccttcaaatgggtaaattcacaaatagatagcgggtttaatttacagaccacccgatcgttattatcagtattttatccactgattatcgttggcattattatttatcagcttggcggccgtattagctggccgaaagagcaaccgaaccgattggtaaacattatcatcttgttgccattactgattatctactgctggttctcattcaatcaaggcggaagaatgacagaatggctgcacccctttatgtctgtttcatcagcgctgttggtcggttctattacccgatttccacaaaaatcattacgcagcactttgagagggttgattgtcgttgcggtattgattttgatgggatatgtactgattatggcagccaatgttcgcggtgccggccataaattcgaaggtattaaagacttttcttggcaactggaacaacgctggcatcaacactattcgacaccgctccattatgtcgggggcgaatacttacatcagtggctgactgtctacgcgccaagtcagccagagactatccaaccttggataccgggaaagcaggcacccaatatctacaaccgccatgttaaagcaagcgatattgtacgtagcggtgctattttggtaggcgaaaaaggtaaaacttgtgaacaggaagattttcacagcgttctgcaatactggccaaaattaagaataagtagcacggaggaattccttttccagcctgaacctgaaactaagccaatattggtttgtgtaggttttgtgtcaccggagaaatatcaatag

SEQ ID NO: 8655 - DNA, 111 bp, Photorhabdus luminescens
gtgcagtatctgcgcgagtattatctgacagctgcgctacgtaatggaaatgtacaagtcatcatgcaggatgatgctaagttagccggtctattggctaatagcgtatga

SEQ ID NO: 8656 - DNA, 1680 bp, Photorhabdus luminescens
atgggaagccgttttctttatcaccgacgcctgacagggcttatcctgctgacaatctccgaactggtctatgcttcaacatcgatcagccctgcggatcaagaaaccatcacgcaacaacaaaaagcattgttgcaacaagccgagcagcaacgggaaacgctgcgcaacaacatcaccttatctccatcccctgatgtagcgccgggtacagcagaatctatctgccacaccattcaccggattgaatttgacggtgccaaaagcctgcctctaccgatcaaacagcacttaatacacccttatttatcccactgcttatctttgcaggacattaatacattggtacgacaaaccactaatgcctatattgaacggggttatgtcacttcccgggccggactcaacgcacaggatttatcctccggtattctcattattacggtcaatgaaggcaaagttgaatccgtcagtctggacggagaaacacctctctcgttgaaaatggtttttccgagcatagtgggtaaaacgcttaacctgcgagatattgaacaaggcatggaacgtttgaaccgcctgccttcccaacaaatgaccattgatattcagccgggcaaacaaccgggttattccacggttatcttaaaacgaacgtcgattcgcttacccgttagtgccagtttgggggctgataatagtggtcaaaaaagtaccggcaccgagcaaatcaatgccagcataaatttggataatccattacaccttgctgaccagtggtcattatctgccagccgcaacagtgacttccgcaatagccatcaaagccgtagcctctccgccaatgtgacggttccttacggttactggttattcagttatcaatatgcatggaatgactcttttcagaatatcccggcatgttcacaaacctatcgctacacaggtgacagccagactcaccggctggcagtaaaccggacgttatatcgtgatggagagcagaagctggcattggatatggggctgacacgccgtcgaaccaccaatttactggcgggagagacattatccatcagcagcccgacactgagcaccatcaacctcggcgttaattacagcaccgtgctggcggggagctatgtcacctttaacccgatggtcagccacggtttacaaacatttggtgccaccaaagatgatccgcgtttctccgatgcgccgcgtagtcaatttcgcaaactcagtctgagcgccagctatttcatgcctgtcacagactccgtttattacctctcatcgatttacggccagaccacgccagacaacctttacgccagcgaacgtctctcactggggggacaatattccgttcggggattcaaagagcaatatctcaccggcaaccgcggcggatattggcgcaacgagctgaactggcggatatcagaactgcctatcccaagcgagctcactttaaccggagcgctggatactggctggttacaggaaaaaaccggacaaatcgagggcggcaatgtcaccggtacggctctgggcttatcactgactcaccctagattcaaccagaccatcactattgggaaacccctcattcaccctgatcacctaaaaccggatcactgggtcgcttattggtcagtatcactgactttttaa

SEQ ID NO: 8657 - DNA, 5214 bp, Photorhabdus luminescens
ttggtcagtatcactgactttttaacacttaaattaaacaaaagggatagtacgatgagtaaacgcaacaactcggtggcgagaggcacgagttatcttttaatttacctgacggcaattcagccgctacacccggcgattgctgcggggatcacaccggacaataaccatacgcaggtacaaaaccaaagcaacgttccggttgtcaatattgccacgccgaatgacgcggggatatcccacaacacctataaagcgttcaatgtcgatactcaaggcgctgtactcaataacgccacgcaagcggctcaatcacaactggcggggcaacttaacgctaaccctaatctgcatggaaaagcggcggaactgattattaatgaagtgaccggcagcggacaatctaacctgcaaggccaattggagattttcggcaataaagccaatgtaatgattgccaaccccaacggcattacttgtgatggctgtggctttattaatacttcgagtgcaacactgaccacgggtaaaccgcaatttgataaacagggtgcgttggaagcattggaagttaaaacaggccaaatcaccattggcggtaaagggttagatggcaaggcgacggattatgtcgatattatcagccgggcaacggaattaaatggaaaaattcaggccaataacctgtctctgacacaaggcgctaaccgaatcagtttaaaagacggcacagttaaacctgtcgctggtgaaggcgctaaaccccaattagccgttgataccaaagcattaggtggcatgtatgccaataaaatccgactggttgccactgaagagggcgttggtgttaatctgaaaaatttaatcagtgaccagcgtgatattactttaaacgccaatggcaaaattgaactgggcaatattaaggctaaaacggacctgaatgttattggcaaagaaacccatattgcgcccaatattaacgtgcaggcgggacgggatattattctggaaaataccacgctggataataaaggaagcgtgactgctggccgggatattcgaatatttggcgataccgtgcgaaataacggtgataaagcacttctgcaagccaataataatatgtggatacagaaagatgctcaggggaataaaggtcatctgattgagaataaatctgcgacgataaagacggtaaagggggatttggttgtcaggacccaaaaacttaataatacacgtgatgtttttgttgttaaaaacaaggagttaataccagattcaacagataaaaacctgattattaatgaaacgaaaacctgtgattttggagacccggttattcatgaagctgcattaatcactccacttcctgataaatggtttgggcgtgttgattttggtagagataatactacagatgggggaattcatataaatcacgccagaactgaaaccatcaattctgacagtaagcaacctggagtgatagcatctggaaagagcatttatatcaacagtgatgagttattgaattttgtcagtaagatgagtgccggaaaagatattttcttaacaggaattaattttattaatgaaagcaaaataaccggcgtgctaaataattatattgtatatactgagaaggaaaccgaaggtagtgtgtcttcccgtggcgacgtatatatcaggacagactttgacagatcaggaaacgttaaaacatgggaggatgaaagcaatattattgaacccgccagtgttgttgctgccggtaatcttgtcgctgattttaaagataatattaatattcgcacaccacccccttatgacatcaatgaaatgtcccaaatcaccgttgcagggggttatgatgcgttatctgctaaaaatattgtcttaaattcagggaaaatcaacaacaataatattatcaaagctaataacaacatcacgattttagcaactgacgctgttacattaaacaccggggaagttatttcgggtggtgatgtatccatgatcgccgctaataatattgatgtattgcagagtaaaatcaagggaaaaaacattactgttattagccgtaatgctgatttgaaattgcaaagcaatgagactgtcggatatttcaaccatgatggtaatagaataatcagccgcattgaggcaacaggtgatttattgctaaacgcaggtaagaatattatttttcgggacatatttttaactaaaagtgataatattactttaacggcaaataatgatatcaccattgataataacaatgcggtgctattatcacataaacgaattggcagtattatctctttcattaaagaacaagaactttttaataacatgttatctaaagtgggtaagctggatgcaaaaagttctattgtgattaatgccggtggaaatttatcggctaagagtattcgtttctccgcagaaaaagacatcaatttaacttctgcaaaaagtattgatctggctccccgtgaattatctccttcactgagtaaattattcccttcatcacgttcaggagaattaagcagccaattaaccgcagggaataatatcagtgtcatcagcggtacagatattaacggaaaggcggttcagatacaggcaaacggtaacgtattattgtcctctggaaggaatatcacactcctgcccctgctttactctgctattgcttacaatgacgatgacagacctgagcattatgatgaacataaagatgacagaaattatggcacacaaatccgtggtactaaaaagctgacaatggctgccaatggagccattaccactgtgggttcaaagttactttctgatggtgatataacgattacctctggtggtgatatacgtttcgaatcggctcggaatcacttctacaaagatcgcgctgattatttcaaagataacagcatcacagaaacctatactcaacaaagtactgaattaaccagtggtggtgtgctaaccgtgctttcaaacggcagtattctttttcaggccactaaactggcggccaaaggggcaatggatatcgcggcgaaaggtggctatctgtacgctcaggcgatggaagaatctaaccattatgagaacacagagacaagtcgtaattggtatggcaggaagaaaaccgctaaacgtacccgtcatgatgtcactaataaagtcactgaatttaccgcgggtggtgatattaatctgttaagtcgggatgacagcacttacgaagccagtcaaattgccactaataaaaacgccaaattgaccagcactcacggtaaagtcaattttaaagcggtaaaaaataccgcttttgaacagactattacctattccaaaggcttttatattaagcaaagggataaaggttataccgaagataagtgggttcttccctctattcatattggcggaaaactgaccgtagaagcggctaaaggtgtcagcgcggatatcaaagcgaaaaatggtcagtcattacaaaatgtcctgactgtattggggaatacaccggagaccgcctggctgaaaggactcaacgaaaataaagatacccagtggaatgtggtgaaggatgcttatgacagttgggatcacaaaagccagcatttaaacccggtggtttctgcggtgattgcgattgcggcagcggcagcaaccgcaggcagttctctggcggcatctgtcgcatcttatgcgggtaatagcgttgcgggtggggcattaaccgcaggaatgtcatcactgacggcacaggcggcggttgctattgtggataatcagggtgatctatccaaagcactaaaagtgttgggtagcagcgataccgttaaatcaaccgttacctcaatggcgcttggtggcgcactggcgggttttgataacgtcatgggatgggataaagccgccaatggcgctcaaattgacccggcaaaagcgacattacctaaactgagccatggcgactggagcaaagtggctcaacgggtagcgggtcaatccattatcagttccagccttggtacagccatcaatggcggtagttttaaggacaattttactaccgcattacttgccaatattggcagccagattaacgccgaaggtgccgggttgattggggctaacggtcaggtgttagatttacccggaaaagctatcagccatgcggcggtttctgctcttgctgcggaaattggcggcggtgatgccaaaggggcggcggctggagcattagccgcagaactggccgcgataacattggataaaacattcaatgatccaatgaaaattcaggcaggtggcaaaatcattggcagcgtcgcaggggccattgcgaccaacagcgccaaaggggctaacagtggagctaatgccggggaaattgttattctctttaaccacctgaactccatgaatgcctacaatctggtcagagaactccaggaagccaataagcaaggaacgcctaccgaagcaatctggaacaaatacaacaaactgagcgctacacaacgggcagaaatgttgtctcactgtgccgggaacggtgggttatgcacactgacctatcaggctgaaatggaaggaggaataaaaacagcggatgccatcagtggtctgagatggatgtttggcttatcagaagaagattcccatcgtatcagtcagtttgtgacgacagaaaaccagaacgatttagggctgttgtataactcgttgccagcttgggaaaaaggtgcactgatagccaaagaggcggtagaatctgccggtattggtggtgccatcggcggtaaagcttcggttgcttcgattgttgggaaacacagaggaagcgcaataccagtactggagccaatagtcgcttctaatgggctaacttacaaatcaaaccctaaacacactcttggtcagcaaggtaatcgacccaatgcaggaattgaacctaagggctcggtggatttatttagtcattctatttcttctgcttctaaagaaaagcaaagatattccattgattctgaaaaaaatgttcatcgcttttcttacagtaatgatggtacatggcattggtctggtagtactggagatcaaaaaaatccattagacagacaagaaattcctaatgatgtaaagaaaaattttggtttacctggtaaatggagatag

SEQ ID NO: 8658 - DNA, 546 bp, Photorhabdus luminescens
atgatttttggtgatccatatcgttttgcgatattagtagaatatattccctattggagtgatagttcatttaaaaatgggttattccatttttatattaatgggaaaatgttccctgatgaactaactaccgcaacattaaatgtggatgttttttctttagatgaaaaaaatgcattagtttcttttcctgaaaataaagagctatttgataaagaaattaaagaagcatttaacacgatgttaggtatgatatctcctaatctggtagatagtaacctagatgtgccagaagattttgaatcgtcatatatttataaagcttcaacagagaatattgatgattttggtagttctgtatttgctgtatcttacgatgatattgttagaatcatcggagcaaaacgacgtatcttaagatatgataataatggttgtggttactgggaagatattcctaaacctgatttctatgaaacaaaaatttataaagatgaagttaaagaaataatttccaatataaaaaaatattatatatcattgtaa

SEQ ID NO: 8659 - DNA, 285 bp, Photorhabdus luminescens
atgatttatggtgatccatttttattttctcttcaatttgacattgttgatgttttcgaattaagaacaacaattgacttttactcaaatatgaaaatagatgagttggcatgtaatgatattccctttgatcctattaccttatacagaaatgcagaaagttattttacaggagaaggagaagatcttattgatggcttgtttgatatgacctgtactgcaatgggggataatggctattatatttactttatgaaaacaagccaaaatgattgcctaatttga

SEQ ID NO: 8660 - DNA, 369 bp, Photorhabdus luminescens
atgaagcaaaaattatttggtcaaccatatgatgaaagtaatcctgagtggattctgaaaggttattttgatgtgatgtaccaaaaggggaaaaattatttttatgatgttatagaaaatattataaaaagacatggtttttctacagatggtgcctactgtaattttccagatatgaatagtttttttgaagaagaacattttgaaggggttgagtttacatggggctatccaccagaacaagcaccaacaataattgtaagcgaagcaacctgtttcaaatatgtaaaactagcctgtgagaaatatcttcaattacatccagaagatacagagcaagtaaaatccttacttgttcaactcccttaa

SEQ ID NO: 8661 - DNA, 744 bp, Photorhabdus luminescens
atggatttttcggtcattgcagaaaactggcgctatctactgttaggtacatttcctgatggtcctcttgaaggggcggcgttgacattggttattagcctgatagccgggacgatttctattgtattgggtacagttgccggtattgctttggcaatgctgaaaggattttgggttaacctgttagctgcggtattgggctttttccgtgcaattccagtcattatgctgattttctggacttacttcctgttgccggtgatgctgggtatggaaattccagaaattaccacggtggtttgcgctctggcgttgatcacatcggcttatttggctcatggggtaaaagcggggattattgcgattggagccggtcagtggcaagcagggctatcattaggttttaaccgttggcaggtactttggtacattgtattgccacaagcgttgcgtatgatggtgccttcctttattaatcagtggattgcgctgataaaagatacctctctggcttatattgttggcgtggcggaattatcatttctggcaactcaggttaataaccgcagcatggtttacccgacagaagtctttttatttgtcgcgttaatttatttcgtgatgtgtttggcattggaattgacagcaaactatcttgttcgccgatttactctacagcgtaggaaaatatcgtttttccgtttctggcggaaagaaaaattagttttggctccccaatattag

SEQ ID NO: 8662 - DNA, 738 bp, Photorhabdus luminescens
atgtttgaattatttgttacagaacagttacttgctccccaatatttgggatggctttggcaaggtttcctgattacattgtggatatccgcttgtaccgttatcgcttccaccttgctagggtttgtactggctgctgctcgtgacagccaattgaaaattctccgttggctggtaaccgcttacaccacgctatttcgcaatacgcctttgctggtgcaactgtttttctggtatttcgcctcagggcagatactgccgcaagaggtgatgttttggctgaatacaccccatgaaatcaatctgttaggtctatcattggcctggccttcattcgaatttttggctggatttattggtttgactctctattcagcgccattcgtggcggaagagctacgcgccggtattcagggtatagggcgcgggcaaaaatatgcagctcatgcactgggactcactggctggcaagcaatgcgttatgtggtattgccacaagcgttgaaaatcgcaacgccgccattgctagggcaatatatgaatattgtgaaaaactcgtcactgacaatggcaattggcgtggctgagttgtcatatgcttcccgtcaagtagaaaccgaaacattaaaaacgtttgaagcattcggtgttgcaacggtgttgtatatcgccaccattgccgtcatggaaggttggggacaatggcgtcaacaacaagctataacgagaggacattag

SEQ ID NO: 8663 - DNA, 837 bp, Photorhabdus luminescens
atgaaatctcgcgttgttattacggcgttattggccgggttaacactggttactggtgctgcgaaggcggataaactggatgatattaaaaaaaccggtgccgtgcggatcgctgttttcgacagtaatcctccgtttggttttattgacccgcaaaccaaaaaactggcaggttatgatgtagatatcgcaaacgcgattgccaatgacttgggtgttaaattggaactgcgcccgactaacccagcaaaccgtttacctctgttggcatcaaagaaagttgacttgattgctgccaactttaccgtcactcatgagcgtgctaaacaagttgatttttcaatcccttactttgctactgggcaaaaatttattgcccgtaaaggtattttaaaatcgcccgaagacattaaaaacttacgtattggtgctgataaaggcacagtacaggaaattacgctgcgcgagcattacccgacagccaaagtgatctcttatgacgacacacctctggcctttgctgcgctacgtaacggcaatgtgcaagccatcacgcaggatgatgctaagttagtcggtctgttggctaatgtaccggaagcccaaaaagctgaatttgagatctctccttttagcatcacccgtgaatatcaggcagtcgctgcggcgaaaggacaagagcgcttggttgaggcggtgaaccaaactttgctgaaattggaaaaagagggtgaagcagcggaaatttataaccgttggtttggcccggaaaccaaatcggctcaaccgagaggtgactttaagtttgcgcctttggagcagcaaactcagtcttaa

SEQ ID NO: 8664 - DNA, 732 bp, Photorhabdus luminescens
atggggcgtaacatggacaatctgaatctcaacaaacatatttctggtcagtttaacgctgagctggcacatgtccgtactgaactgatggcaatgggtgggctggtggaggaacaactctctaaagccattaccgcgatgcataatcaggatgctgcattggcgcgtgaagtgattgaggatgaccataaggtcaatatgatggaagtggctattgatgaggcgtgtgttcgcatcatagctaagcgtcagccaacggccagtgatctgcggctgattatgtcaatttcgaaaacaattgctgaactggaaagaattggtgatgtcgcaaataaaatttgccagacggcacttgagaaattctcacatcagcatcaacccctgttggttagcttggaatccctgggccgccataccatccagatgctgcatgatgtgttagatgcctttgcccgcatggatctggaagaagcgattcgtatctatcacgaagataaaaaggtggataaagagtatgaaggtattgtccgccagttgatgacttatatgatggaagatcctcgaaccatccccagtgtactgaccgtcctgctttgtgcccgttctatcgaacgcattggcgatcgttgtcaaaacatctgtgaattcattttctactatgttaaagggcaggatttccggcatgtaggtggtgatgaactggaaaagctgttgacaaaagataacgaatag

SEQ ID NO: 8665 - DNA, 777 bp, Photorhabdus luminescens
atgaacatagttaatgatatcgctagcagcaaaattcaggtccacaatctgaacttttactatggcaaatttcacgcgctgaaaaacataacgttgaatattgcaaagaataaagtaactgcttttatcggtccgtcgggttgcggtaagtctacgttactacgaactttcaacaaaatgtatgaactgtatggtgaacagcgggcggaaggtaaaattctgctggatggtaagaatatcctgactgataaacaggatgtggcgctgctacgagccaacgttggcatggtattccaaaaaccaacgccatttccaatgtctatttacgacaatatcgcgtttggtgtccgtctgtttgaaaaactctccagagcagaaatggatgaacgtgttcagtgggctttgacgaaagcggctttatggagtgaaacccgggataagctatatcagagcggatacagtctatctggtgggcaacaacaacgtttgtgtattgcgcgtggcattgcgatccggccagaagttttgctattggatgaaccttgctcagcccttgacccgatttctaccggtcgaattgaagagttgatcagcgaattgaaatctgaatataccgtggtgattgtgactcataatatgcagcaggctgcgcgttgttcagaccacactgcgtttatgtaccttggtgaattaattgaattcagtgatacagacacattgtttaccacaccgaaaatgaaacaaactgaagactatattaccggtcgttatggttga

SEQ ID NO: 8666 - DNA, 885 bp, Photorhabdus luminescens
atggcaacgatagacagacaaaagcctattgatgctaatgtacgtagctgtaaacaggcatggcgccgtcaaaaaaatcgcatcgctctgctgttatcaatggcgaccatgttgtttggtctgttttggttggtgtggattctgttttctaccgtcaccaaaggtttcgacggcatgtcactggcgttgttcaccgaaatgacaccgccaccgaatacggaaggtggtggtttggcaaatgccattgtgggcagtggattactgatcctgtgggcgacagttatcggtacgcctctggggatcatggcgggtatctatttggcggaatatggccgccggtcatggctggcagaggtgatccgctttataaacgatatcttgctgtcagccccttctattgttgtcggtttatttgtttacatggtcgttgtgacaaaaatgcagcatttttccggttgggcgggggtgattgctttggcgttgttacaggtgccgattgtgatcaggaccacagaaaacatgttaaaactggttcctgatagcctgcgcgaagccgcttatgccttaggtacaccgaaatggaagatgatttcagccatcacgctgaaagcatcggtatccggcattatcaccggtgtgctgctggcgattgctcgaattgctggggaaacagcgccattgctgttcacctctctttccaatcagttctggagtactgacctgagccagccaattgctaacttaccggtcaccatctttaaatttgctatgagtccattctccgaatggcagcaactggcgtgggccggcgtattattgatcaccctgtgtgtattgctgattaacattgtggcgcgtgtgctgtttgccaagaaaaagcactga

SEQ ID NO: 8667 - DNA, 972 bp, Photorhabdus luminescens
atgagaataagctctatggccgaacaaaaaacggcaatgaaagcacccagtaaaaatggcgatattattttcagcgcactggttaggctagctgcgctgataactttatttttgttaggaggcatcattatctcgctgattattgcctcctggcctagtattcagcagttcggcatctctttcctctggcagaaaacgtgggatgccccggcagagcaatttggggccttgataccgatttacggtacattggttacttcgctaattgcgctgattatcgcagtgcctgttagttttgggattgctttgtttctaacagaactggcacctaactggctgaaacgtccgctcggtatcgccattgagttactggccgctatcccaagtattgtgtatggcatgtgggggttgtttgtttttgcgccgctatttgccacctatttccagcagcccgccggcaatctcctcgccagtatgccgattgtgggcgaattgttctccggccctgcctttggtatcggtattctggcggcgggtgttattctcgctatcatgattatcccttatatcacttcggtgatgcgtgacgttttcgaacaaacaccggtgatgatgaaagaatcggcttatggtatcggttgtaccacttgggaggttatctggcatatcgtgttgccttacacccgaaatggcgtgattggtggtgtcatgttgggccttggtcgtgcgttgggggaaacgatggcggtgacttttatcatcggtaacacctaccagctcgatagtttctcactgtttatgccgggtaacagcatcacttctgcgctagcgaacgaattcgcggaagcagaatctggcttgcataccgcagcattgatggagcttggtctgattctatttgtgatcacctttattgtgctggcgttatcaaaattgatgattatgcgcttggcgaagaatgaggggcgctga

SEQ ID NO: 8668 - DNA, 1041 bp, Photorhabdus luminescens
atgaaactgatgcgtaccaccgtaaccggcataatggcagcggcgttttctttgacaaccctgcctgtatttgctgccactagtttaaccggggcaggtgcgacatttcccgcaccggtgtatgccaagtgggcggattcttatcaaaaagagacaggtaataaagtcaattatcaaggcatcggttcttccggtggcgtaaaacaaattctggcaaataccgttgatttcggggcttccgatgcccctttatctgatgaaaagttagctgctgatggtttgtttcaattcccgaccgtcatcggtggggtggtactggcggttaatatcccggggattaaatctggtgaattgacattggatggtaaaactttaggcgatatttacttaggtaaagtgaaaaagtggaatgatccagcaattactcaattgaatccgggagtcaaactgccggaacaagatattgctgtgatacgtcgtgctgacggttccggtacttcctttgtatttactcgctacctctctaaagtgaataaagcgtggcaagaaaaagttggcgtgggttccaccgtaagctggcctattggtttgggtggtaaaggtaatgatgggattgccgcatttgttcaacgtctgacgggttccattggttatgttgaatatgcttacgctaaacagaatcatctggcttataccaaattggtatctgctaatggcaacattgttagcccgacagaagagagtttcagtgccgcagcgaagaaagcagaatggcataaaacgtttgctcaggatttgacaaaccagcaaggtgaaaatgtgtggccgatgacttccactacatttgttctggttcatcaacagcaaaaagatgcagtgaaaggggcagaaatattgaaattctttgactgggcttatgagaaaggcagtaaacaggcaaacgatctggattatgcaactctgcctaaagaggtgattgagcaagttcgtgcggcttggaaaacccagataaaagatagcaatggcaaggccctgtattaa

SEQ ID NO: 8669 - DNA, 1332 bp, Photorhabdus luminescens
atgagattattgcgattctcccctcgcagcacgtttacccatactttattcctgattatggctatgctgtttatcagtctggtaaccagctacttggttgttgtgaatttcgttattatgccaagtttgcagcagttcaataaggtattagcgtatgaagttcgtaccctaatggctgaaaaattgaagttagaggatggctcttttctggtgatatcgccggtagttcgccgggagatttatcaggaattgggtattacgctctattctgaatctgatgcggagatacaaggtttatgttgggccagacgttatgatttcctgagtgagaagatgggcgagtaccttggtggcaaggctgatcttcgtctggaaataaacacagatagccctatactttggcttaattcttatttggcccccgatatttgggtcagggttcctttgactgagatcgaacaaaatcaattctctcctattttccgctatacactggcaattctattactggtattcggttgtatctggctttatatccgttttcagaaccggcctttactggaaatggagtatgccgccaggcaaacaggtaaaggtattatgatgccggcggtgcgggaagcgggctctctggaagttcgtgcagccattcgcgcatttaaccaaatgtccgccgggataaaactattggaaagtgaccgcacgatattaattgccggcgtaagccatgatttgcgtacgccgctgacacgtattcgactggcaacagaaatgatgagcaaggaagatacttatctgtctgaatctatcaataaagatattgaagagtgtaacgccattattgagcaattcattgactatctccgtaccgggcaggaaatgccaatggagttttgtgaactgaattctattctcaaagaggttatttccgccgagaatggctatgaacaggatattgaaaaccatctgtctcttcacccaataaccgttaacgccaatccgatttctattaaacgggcattggctaatctgttggttaatgccaatcgttatggtaacggctggattaaagtgagtagtggtcagacaaataaatttgcttggtttcaggtagaagataatggagccggcatcaaacaggaagatttgccacggttatttcagccatttgttcgtggcgaaagagcgcgcagcagcagtggaacagggttaggtctggcgattgttcagcgaattattgatgctcatgatgggaaaattgaaatgggcaccagcctcagagggggattatctatccgtgtctgtattcctgttgtggaagataatttttaa

SEQ ID NO: 8670 - DNA, 720 bp, Photorhabdus luminescens
atgcaagtagataacaagatccttgtggtggatgatgacatgcgtttacgaacgttattagagcgttatctgacagaacaaggttttcaggtacgtagtgctgctaatgcggagcagatggaccgcttactgacacgggaatctgttagcttaatcgtattggatttaatgttaccaggagaggatgggctttctgtttgccaaaggctgagaaaccaaagtaatccggtaccgattattatggtgaccgcgaggggagaagaggtagatcgtattgttgggctggaaattggtgctgatgattatattccgaagccatttaatccccgtgagctattagcgcgtatccgggcggtattacgtcgtcaggcgaataagttattgggcctaccggctgaggatgatgcgattattaattttggtaagtttagcctcaatttgagtacgcgggaaatgtttcagggagatgaacatattcaattaaccagtggagaatttgctgtattgaaagtactggtttcttatcctggcgtgccactgtcccgtaataagttgatgaatttagcgcgtggccgggaatatagcacgatgaagcgatcgattgatgtcttggtttcacgtctgcgccgtgtgattgaagaagatcctacacatcctcgctatatccagactatctggggtctgggctatgtctttgtgccagacggaattcgtgtatga

SEQ ID NO: 8671 - DNA, 474 bp, Photorhabdus luminescens
atgaaaactaaactgataacccgtgaaggctacaacaaattaaaggaagaactggattatctctggcgtgaagagcgcccagaagtgactaaaaaagtgacttgggcagcaagcctcggtgaccggagtgaaaacgcagattatcaatataacaagaagaggctacgggagattgatcgcagagtccgatatctaaccaaaagcttagaagaattgcggtgtgttgattactcccctcaacaagatggacgagtgttcttcggtgcatgggtagagatcgaaaatgatcaaggtgagattaaacgcttccgtattgtcgggtacgacgaaatttttggtcgcaaagattacatatccatcgattctccaatggcccgggctttattgaagaaagaagttggagacagtgcaatcgttcatacaccaacaggaaaagtgttgtggtacgtgaatgagatcgaatatacgaaatag

SEQ ID NO: 8672 - DNA, 2331 bp, Photorhabdus luminescens
atgaatgaatctctgagccaaattattgcaagtgagctacaggcgcagccacaacaggtactttctgcgattagcctgcttgatgaagggaatactgtcccttttattgcacgatatcgtaaagaggtcaccggcggtctggatgacacccaacttcgccaacttgagacccgccttagttatctacgcgaactgtcggaccgccgccaaaccattcttaaatccattgacgagcaaggtaagctaaccccagaactgaccgaagccattaatggcacccagagcaaaacagagctggaagatctttatctgccatataaaccgaagcgtcgtacccgtggacaaatcgctattgaagccggtcttgaaccactagcggattccttgtggcaagatccacagcaagaaccagagcaggttgccactacctttgttgataccgataaaggtgtagcggataccaaagccgcgctggatggtgcacgttatatcctaatggaacgttttgccgaagatgccgcgttattggcgaaagtacgtgactatctgtggaagaatgcccatttggtcgctaaagtcgttgccggaaaagaggaagaaggcgctaaattccgcgactattttgatcatcatgaacctatcgcacaagtcccttctcaccgcgcactagctatgttccgtggtcgtaatgagagcatactgcaactttcgctaaatgctgatccccagtttgatgaatcaccaaaagagagctattgcgaacagattattacgcagcatcttcatctgcgcctgaataatgcaccggcagataactggcgtaaagccgtcgtaaactggacctggcgcgttaaggtattgctgcatcttgaaactgaattgatgagtaccttgcgagagaaagcggaagatgaagccatcaaagtattcgcccgtaacctgcaagatctattgatggccgcgccagcgggtatgcgcgcaacaatggggctcgatcccggtctacgtaccggtgtcaaagtagctgttatcgatgcaaccggcaaactgattgccacagacaccatctatccacacaccgggcaaacggctaaagctgctgcaagcgtggcagcattgtgtctcaaacatcaagtggaactggtcgccatcggtaacggaacggcttcccgtgaaacagaacgtttcttcgcggatgtgcaaacacagttcccagagataaaagcccaaaaagtgattgtcagtgaggcaggagcatctgtttattctgcctctgagctggcggcacaagaatttcctgatctggacgtttcactccgtggagcagtctctatcgcccgtcgcttgcaagatccactggccgaattggtgaaaatcgatccgaaatccatcggtgtcggtcagtatcaacatgacgtcagtcagagtcagcttgccaaaaaattggatgcagtcgttgaggattgcgtaaacgccgtcggcgtagatctcaataccgcttctgttccactgctaaccagagttgccgggttgacccgtatgattgcccagaatatcatcaactggcgtgatgagaatggccgtttcaataaccgtgcacaattactgaaagtcaatcgtcttgggccaaaggcttttgaacaatgtgccggattcttacggattaatcacggtgataacccgctggatgcatcaaccgttcatccagaagcttatccggtagtggaaaaaattctggcggccactgagcagaaactccaagaattgatgggtaaccctatttcattacgtggattacaacctcaggacttcaccaccgagcaatttggtgttccaaccgttaccgatattttgaaagagctggaaaaacctggccgagatccacgcccagagtttaaaaccgcgactttcgcggaaggtgtagaaaccatgaatgatctgcatccgggaatggtgctggaaggtgcggtcactaacgtgactaactttggcgcatttgtcgatatcggcgttcatcaagatggtttagttcatatctcttcgctgtccaatcgctttgtagaagatcctcacaccgtagtaaaagcgggtgatatcgttaaagtaaaagtgttggaagttgatctgaaccgcaagcgcattgctctgaccatgcgtcttgatgagcaaccgggagaaacccactcacgccgcagtaacaataacaatccacaaactgaccgccgccctgaacaaaataacaggaaccgtaatacttccggttcttctacctcagccggaaacagtgcgatgagtgatgcactagctgctgcatttggaaaaaaacgttaa

SEQ ID NO: 8673 - DNA, 234 bp, Photorhabdus luminescens
atgcaacttcttccagaccatagttacaagatcattggtttttcgccgaagatcagcccggcttaccgacaaaaattgctgtcattaggtatgttacccggttcttcttttcatgttatccgcttagcgccttttggtgatccgatacaaattgagactcgcagagtcagcctaattctgagaaaaaaagacttggaatttctcacattagacagcgttcaatgcaacgcataa

SEQ ID NO: 8674 - DNA, 2313 bp, Photorhabdus luminescens
atgaaagcactgaccattggcttaattggcaaccccaatgccggcaaaacgacattatttaaccagcttactggcgctcgccaacgtgtaggcaactgggctggcgttacggtagaacgaaaagttggccgttttaccactgcggaccataaaattgagttagttgacctaccgggaacttactctctgaccacgatttccgaacaaacatcactggatgagcagatagcttgccactacatcctgagcggtgatgctgacatgctgatcaacgtcgtagatgctgctaaccttgaacgaaatctctatctgacgttacaactgttggaattaggcattccatgcatcgttgcactcaatatgttggatattgctgacagtcagcatatccaaattgatattgccgaactggaacaacgcctcggctgtccagtcattccaatggtttcgactcgtgcaactggagtgaatgagctgaaacgggcaattgaccaccataagcagaatttcgggcagtcactgattcactaccctgattgcctgttgcaagaagttgagacgttatctggtgtaatttcagacaattttcatgctcaacaacgccgctggctagcgcttcagatgcttgaaggggatatttacagcctggaacgttccggccttgctacctcaatgctgattaaatccaaagaacgtttgcaacaacagcaacatgaagagcctgaactggtgattgccgatgcgcgctatcaaagcatcaatacattgtgcatggccgtgattgatacccaaaaagccatgccaaacaaactcactcaggcaattgacagaattatcctcaatcgttggttaggtgtacctattttcctggcggttatgtatttaatgttcgtgctggcaattaatatcggtggtgcgctacaacctatctttgacagtggttctgttgctattttcattcatggggttcaatggcttggtcataccttaagttttccagaatggctgacgattttcctcgcacaaggtctcggtgggggtatcaacacggttttgccgctagtaccacaaatcggcatgatgtatttattcctctcttttcttgaggactccggttatatggcgcgggctgcgtttgtcatggatcgtctgatgcaagttttaggactaccgggtaaatcgtttgtcccgttgatcgttggcttcggttgcaacgtcccatccattatgggggcgagaacgctagatgcgccgcgtgaacgcttaatcacgattatgatggcaccctttatgtcttgcggtgcacgattagccatctttgccgtatttaccgccgcattctttggcaaaaacggggcaaccattgttttttccctttatatattgggcattgtcgtcgctattctgactggcctgatgttgaaatacaccattatgcgtggcgaagcttcacccttcgttatggaactcccggtttaccatattccacatctaaaaaccttgcttctgcaaacatggcaacgtctgaaaggttttgttatccgtgccggtaaagtaatcgttatcgccagtatgtttattggtgcactcaacagcttctcattctctggtaagacagtggatagcatcaaccaatccgctctggcttcggttagcaagattattacgccagtattacagccaattggcgttcactcagataactggcaagcaactgttggtttgataactggtgctatggcaaaagaagtggtagttggaacattaaatactctgtataccgcagaaaacattgctaatgaaccgtttaacgcagatgagttcaacctgtttgctgagctgaaagatgcagttggtgaaacttgggatagtttgaaagagacattcactctgagcgtgctgaccaacccaatcgaagccagtaaaggtgacggtgaaatggatagtagctctatgggaacaatgagtgccaaatttggctcctctatttcagcttacagttacctgatctttgttctgttatatgtgccttgtgtctcggtgatgggcgcgatcgctcgtgaaaccagccgtggctggatgacattttccattctgtggggattgaacgtggcttattcaatttcagccctgttctaccaggtggtaactttctcacagcatccacaaagcagcctgatcatcattttgaccgtcgttctatttaacgcgctggtattctgcttcctgcggcgggcacgcagccgtgtgacgatgaagttaatcagcaacccgggaaatagttgccactgctccagtggaaactgtcactag

SEQ ID NO: 8675 - DNA, 240 bp, Photorhabdus luminescens
atgattagcctattacaagtaagggatgccgtcgctctgaatgggcgagcagatgctaagttgttaagccaccagctttctgcttcattatcgatggtagaagcgatgcttgaacaactcaccgtaatgggcaaactggaaaagctcaatgcaactgcctgcctgagtggcagttgcaaacagtgcccggaagtacagcaatgtgacacggtggtttatcggatcgctgggggatactga

SEQ ID NO: 8676 - DNA, 303 bp, Photorhabdus luminescens
atgtctgataatgattatgatattatcccgttttctgaagccaaaacgcttctcttagaagatgccgcgactctggaagcatataacgatatccagatccgtaaggcgttgatgaaacagctgaaagatgcacgtaaagcgttacatcttactcaacaagatgttgctcagaagattggcactcagaagcaaaatattagtcgtatggaaaatggtaaaagtgtgccaaatctggatactttaagccgctatgctgccgcgcttggaggaagatttattttccaaatgcctgtaagtcaatag

SEQ ID NO: 8677 - DNA, 333 bp, Photorhabdus luminescens
ttgagtgattttattgggagtatatctgcgctcaaggagctttctaagctacctgttggtctcaaagtttcaatgattgaagccattgaagaattggaagctgctggaacagatttaaaagagcctaaagtcagagacattggaaacgggcttaaggagttaagagtgagcgcttctgagggtattgcaaggggatttttcttttttgcagttggacaacagttttatgttgttcatatactgcaaaagaaaacccaaaaaacgccgaagaaatcgctcgatctggcaaaccaacgaatgcaagaggttaaacggagtcttaaaaatgtctga

SEQ ID NO: 8678 - DNA, 786 bp, Photorhabdus luminescens
atggctgatctgttttggcagacttctgatgaaggttcgcgtgatcttgtgttgctgcacggatgggggctgaatgcggaagtttggcgttccattgaaatgcgatgtgctccgcattttcgtttgcatctggtggatttgccgggttatggccgtagccagaaatatggcccgatgaatcttgctgacatggcggatgaagtctggcgatatgcgcctgaaaatgcgctatggctaggttggtcgttgggaggtctggttgccagccggatagcgcttgaccatcaggataaagttgccggattaattaccgtggcttcttcaccacatttcagcgcagaaagtgactggccggggattaagccggaagttttgcacgatttcgaacatcagcttagtaaagatttccagcgcacagttgagcgttttcttgctttacagacattaggtactgacagcgctcgtcaagatgcgcgattactgaaatctgttgtgctggcgcagccgatgccttctgttgaagtgctgcatgttggtttggaaattttgcgtaccgaagatttaaggcagcctttggctgagcttgccataccgttcttgcggatttacggttatctggatgggttggtgccaagaaaaattatcaacattcttgatgaaaaatggccgcgttcagtttcagccatgatgcgccatgccgctcatgcgccttttatttctcatccggatgagtttgttggattgttgactgaatttgctagtagagaagtattgcaaggtcgatga

SEQ ID NO: 8679 - DNA, 294 bp, Photorhabdus luminescens
ttgttattctcaactttatttgccatcaaggaagaagtctatgctaacaatggttgggtactgttggctatgccatcagcctctttggtttccacatcatggagtatgcagcttttgcaacaagcggctgaaacgtttgacaaacatgtgcccgtgctgtgcactaccctcggaactcccttcactgccttgtgggcgctgcctcaaaaaaccgcctctatgggagaatatgatataccctatggatttcaagatggatcgcgacggcaagggagagaatccccgagagcatag

SEQ ID NO: 8680 - DNA, 444 bp, Photorhabdus luminescens
atgggccttccgtttcataatgaagttcatggcatcagtattgaaggaagggaagcggtgtttagggaaggtgatttctcaggttctcttcaggaagtaaaaaataatattataaaatatggtaatatcagttcctgtacatttattaaagggtggtttgaaatatccttggctaattggtcacgaccaatagctgcaatctatctggatgtcgatcttcaaaaatcaactcgcgactgtctcaaatatctatatccatggttgacaccaggtggtagtctttattcacaagacggccacttaccacttgttcttgatgtttttgaggatgtgaatttttggctcaatgaaataggtactctgccacctatagtagtgggtatcaggaaaaagaaactaataaaaataacaaaacctgatacaccttctctaccactactttaa

SEQ ID NO: 8681 - DNA, 1200 bp, Photorhabdus luminescens
atgaaagagaatattgataagttgctttcaaacatcgcaattatggagccacccttagggttacaggataaacttgctcttgcaagacaagaaaatagaaaactgacaataaaattaggctttgatccgactgcacctgatttgcatttgggccatgcggttgtattacaaaagcttaaagattttcaggatgaagggcaccggattgttgttatcattggggattttacggctggaattggtgacccgaccgggagaaataagcttcgtcctccattaacacctgaacaaattaataaaaacagtcagacttatataaatcagcttgcaaaagttataaatatcgaaaatattgaaataaggaaaaactcagaatggtttaacaatatgccattcagtaatgtcataaagttaatctctaaaatcactcttgcacaaatcatgcaccgagatgattttaaaacccgatttgaatcaaaagcaccagtccatttgcatgagattatttaccctattctccaaggatatgactcagttatgattgatgctgatatcgagcttggcggaacagatcagttatttaataacttggtagggagaacacttcaagaagcctatgagaaaaaagggcaaatagtaataacaatgccattattagaagggctagatggcattgaaaaaatgagtaagtcaaaaaataattatattgggttaactgataatgcaaatgatatgtatggcaaagtaatgtcaattcctgacagtgtcattatcaattatttgacacttgctacagacatggaggcagaaaaacaatctgcgatagtcagtcaactagaattgggccttaacccaatgaagatcaaaaaagatatcgcttataatattgttaaaagatatcacgatgacatatctgcaaaagaggccactgagcattttgagcgtgtagtacaaaagcggacacctgaagaggctgatcatgatgtattgattttaccaaaaggctcttatataacactgctggatctttgttcagtagccttgccagcgataagccgttctgaactaaggcgattaattcgttcaggggctgttcgtgttgataaaagtaaagaagatgatgaaattaaaaatattgaggttatcccgggcacgcttatatggataggtaaacgatataaattccgtattggcagttga

SEQ ID NO: 8682 - DNA, 198 bp, Photorhabdus luminescens
atggctgatctgttttggcagacttctgatgaaggttcgcgtgatcttgtgttgctgcacggatgggggttgaatgcggaagtttggcgttccattgaaatgcgatgtgctccgcattttcgtttgcatcacgaaagaggacaagacgacctaattaaaaaacaaacgacatatttttgcatactacatcgtcgttaa

SEQ ID NO: 8683 - DNA, 705 bp, Photorhabdus luminescens
ttgccatcaaggaagaagtctatgctaacaatggttgggtactgttggctatgccatcagcctctttggtttccacatcatggagtatgcagcttttgcaacaagcggctgaaacgtttggcaaacatgtgcccgtgctgtgctctaccctcagaactcccgtcactgccttgtgggcgctgcctcaaaaaaccgcctctatgggagaatatgatagcgattaccgactattgcccaccactgagtggcctgatccgtcgctataaatatcaccgcaccccacaacttgcgtcagttctggcgcgtctgtttctgctgcactggcaacagggctatcgtgatggaagatggtataaacccaacattctgctcagtgtgccactgcatcgacaccgacgatggaaacggggatttgatcaaagtgtattaatggcaaagcagttatcagaatggctacaatgcgattaccagcaaagctttctacagcggacgcatgctacactaccacaaagaaatttatcggcagcacggcgtaaaattaatctcaggaaagcatttcagctttgtggctccgttacgggacaacatgtcgccatacttgatgatgtgattaccaccggtgcgaccatgaccgagatttcccgtttgttaattcgtgctggcgcccgttcagtgcaggtttgggcgatctgtcgaaccttgtag

SEQ ID NO: 8684 - DNA, 576 bp, Photorhabdus luminescens
atgattaatattactgaagcagcgcaaactcattttgccaaattactggcaaaccaagaaccaggtacacaaattcgcgtatttgtcatcaatccaggtacacctactgctgagtgtggcgtatcttactgcccgcctgatgccgttgaagcaacagatactgaactgaaatttgatcaactgtcagcttacgtcgatgaactgagtgcccccttccttgaagaagctgaaattgattttgtcactgatcagttaggctctcagctaacattaaaagcccctaacgccaaaatgcgtaaagtttctgacgattccccacttgccgaacgtgtggaatacgttttgcagtcacaaattaatccacagttagccggtcacggtggccgcgtcagtctgatggaaatcactgatgatggttttgctatccttcaattcggcggcggttgtaatggctgttcaatggttgatgtcactctaaaagaagggattgaaaaagagttactgaacatgttcccggaactaaaaggggtaaaagacttaactgaacaccagcgcggtgaacactcttattactaa

SEQ ID NO: 8685 - DNA, 336 bp, Photorhabdus luminescens
atggaacattttcagactatcagccctgagcaggcttatcaacactggcagaataaatccgcgattatggtggatatccgtgatccacagagtttccggacaggtcatgcatgtggcgcttttcatttgactaatgacacgttgaatgaattgatgttacaagccaatttcgaacaacctgttatggtcatgtgttatcacggtcatagcagccagagtgccgctcagtatttattaaacatcggttttgaaactgtctacagcattaatggcggctttgaagcctggcgcagagactatcctcacgctgttgactccttacataatccggcataa

SEQ ID NO: 8686 - DNA, 849 bp, Photorhabdus luminescens
atgatccgcgtaatcgctatttcaaacccgcgtctagcgcaagcctttatcgattatatggcaacccatcaggtccatctcactatgcgccccagtcacgatgggcaacacgtcgaactgtggctagaagatgacactaaacttactctagttcagcaagagttggagcaatttactcgcgatccgctaaatgaacgttatcaagcggccagttggcaatctggcgatgtgaatcacccattgaagtaccacaataatctgaattggcaatacttaagtcgtcaggctggcccattaacccttaccattttactcctaaatatcgtcgtttatctctggatgcaatttgccggcgattatcaggtgatgtcttggctggcctggcctaacgatagccaacatatggaactatggcgttgggtcacccacggcttattgcacttctcactactgcatatcatctttaatctcatgtggtggtggtatcttggcggacaaacagaaaagcacctcggtacaggaaaactgtttgtcattatgattgtttccgcggttttcagcggttggggacaatcattattcagtggttctcactttggcggcctttctggtgttgtttacgctttaattggttatgtctggctaaccggtgaacgtgcgcccgaacgtggtattggtgttccccgtggtttgatggctttttcgctcttctggctaattgttggatacttcgatgcatttgggctatcgattgccaacgccgcccatttctccggtttaattatcggcttactgatggcgttatgggataaccgtcatacattcaaaaataataaccgacatttttag

SEQ ID NO: 8687 - DNA, 759 bp, Photorhabdus luminescens
gtgaagcaaactcaacggcatgatgcaatagttgagctggtacgccttcagggctacgtcagtactgaagagttggttgaacactttaatgtcagcccccagactatccgccgtgatttgaacgacctggcagataaaaacaaaatacagcggcatcacggcggtgccgcgttgccatcaagttcagttaatactgcttatcacgatcgcaaaatcatgtggtcagaagagaaagcacgtattgcacaacgtgttgctagccatatcccggatggcgcagcactgtttattgatattggcaccacacccgaagctgtcgctcacgcattgttaaatcataaaggtctgcgaattgtcactaacaacctcaacgtcgctactctgttgatgacaaaagaggacttccgtttaatcttggcgggaggggagattcgttcccgtgatggtgggattatcggtgaagccacactggattttatttctcagtttcggcttgattacggcattctcggcatcagtggcattgacatggatggctcattactggaatttgattaccatgaagtacgcattaaacgcgcaattatcgaaaactcccgttgcgttatgctagtcactgaccattctaaatttggccgcaatgctatggttaatctgggtaacatgaatctcattgatcacctctttactgaccaacttcccccgccaagcatccataaagtgattgagcaacataacgtgcagcttgaactctgctaa

SEQ ID NO: 8688 - DNA, 1503 bp, Photorhabdus luminescens
atggaaactaaagacttgattgtgatcggcggcgggatcaacggtgccggaattgcagcagatgctgctggccgggggctctctgttctattgctggaagcacaagacttagccaaagccacatcatcctccagttcaaaattgatccacggtggcttacgctatctagaacactatgaattccgtttggtcagtgaagcgctggcagaacgtgaagttttactgaatcttgcaccacacatcgcttttccgatgcgtttccgcctgccgcatcagccacatttacgtccagcatggatgatccgcattggcctgttcctctatgacaatttgggcaaacgagtcagcctgcctggcagtaaagggctaaaattcggtgccaattctgttctgaaaccagaattggtccgtggctttgaatattctgactgctgggttgatgatgctcgtttagttgtccttaacgctcaagaagtcaaaaaacgtggcggggaagtccgtacccgaacaaaagtgacccgtgcatggcgcgaacaagagggttggatggttgaagccgaagatctgcgtacaggtaagacctatacttggcgtgcaaaaggtctggttaatgctaccggcccttgggttaaagaattctttgacgatggtctgaaattgaaatcaccttatggtattcgcctgatcaaaggcagccatattgtggtgccaaaagtgcatgatgagccgcaagcttatattctgcaaaatgaagatcatcgtatcgtatttgttattccttggatggatgaattttccattatcggaaccaccgatgtggaatatcaaggtgatccaaaagaggcgaagattgacgatcaggagattaattatctgctgagagtttataacgaccacttcaagaaacaacttaaccgtgacgatatcgtctggacctattctggcgtacgtccactgtgtgatgatgaatccgactcacctcaggccattacgcgcgactatacccttgacatacatgatgaacagggcaaagcaccattactgtctgtgttcggcggtaaattaactacttaccgtaagctggcagaacacgcaaccgaaaagctcatgcaatactatcccacggccggaaaagcctggaccagaaatggtcagttaccggggggtaatttggaaggatgcgatcgtgatggttatgcccgtttattgcgtaaacgttacaactggttaccggaaggcgttgctgtacgttatgcgcgtacttacggcagcaacagcgaactcattctgcaaggtgctaataatctgaccgatctaggcgaatccttcggtcacggcctgtatgaaacagagcttcgttatctggtcgataatgaatgggtcgttgaactggatgacgcaatctggcgccgtaccaaattgggtatgtggctaaaagaagagcagaagcaacgcattgcagcatggttagcggagaatgctaaaccacgcactgagatttga

SEQ ID NO: 8689 - DNA, 231 bp, Photorhabdus luminescens
atggttgctatggtagaaattaatataaatctgctggaagaaacaattaaaaagcgtgaaattgtagagaaatgttctcctgataagtcacgtgctacacagagccgaagagcggtagatacttatcttgatgctaatattccagaacagaataatagcgtttttggtttatggggggataaaaagttggatggattgaaatatcaaggtaagttacgcgaagaatggtaa

SEQ ID NO: 8690 - DNA, 900 bp, Photorhabdus luminescens
gtgagatattacatgactattgatatagatattgatcaactattaaaagcagaagcttcatttatgctagggaccctgacattagaatccaacattatcgaggttatgaagtacgaaagtggcacccttttgataacccaagatagtccattctacccaaagaactataagtggccagaccaactacatgataatggaataatttcaataggcgataaagaacttgctgtgacaaaagtttacactgcgggccttattgatggtcttttatatatagatcaggaaataacgaaacaaacaacgtcgccagaaaaaattatgccagcacactacttacctgatttacacggaatttctgagagagatcttatagggaaaacagtaactctatctgtgaacgatgaaacaaggtataaggtaagtgctgcacactctatggcccactttatgtcccttgctgtaaataaagcaacacatcatatatggtccaaagtgtacgataccgatgatttgggaaactataatttagataaagctgccatttaccaatcttctattacagaacttaaatccgttgatatttatcgctttggtaaatcgatcaaaaagaaaggatttgataaaaatatactaattaaaaatctggataaaattaatagagaagttaataacacactcaataattggttatctcagggtgcggaaataaccattgaatataaatcaaaagagattaatgacactagattatggaaatcgactattgactctaaggtagtcactatcccatgcggaggcacacatataaataatattaatgaagtcaaagacgtaaatgttgaaataaaaatcggtgaatctgctgattttattcaagtaacgacttattgcagagtataa

SEQ ID NO: 8691 - DNA, 555 bp, Photorhabdus luminescens
ttggcctttcctcgccttgagaataaaggatttttagtctcatcaggtgagaagcgtaataagtcttatacattgccgggtatgtcgttaccaagccctgaagaacttttctctgctggaacaataaataatattaataataaattggacttaccccataaggaatctagcttgcctcattcatattcaggtattcaaatccaccgagatgagttagggcgtcttgctccttcatcgtttagcctgccatttattgatgacttaaagtacataacatccgatttaagagaaaaattgcgagaaattgctaaaccagcttatgaaaatcgtcgattagatctagaacaaatgcaatcgattattatgaaactttgtcaatctcactatatccgtattgatgtgttaggcatactacttaatcgttctgcaaagaatctcagacagcgccatataaaaccactgcttaataagcagaatctaatgatggcatttccacagacaccgaatcatcccaatcaaggatatactgtcaaagatgtattacagaaggattga

SEQ ID NO: 8692 - DNA, 249 bp, Photorhabdus luminescens
atgaagcatgggagtgattgctccccttataaccggttaaaaagtcagggaataaaagtgataattctctataaatcaaatgaaaaagcgtggtcagatggacgggttaaattcgaccatgaaacgtatcgaagaagaaatgttgtagaaagatgtattggtcgactcaaagagcatcgtcgcatcgccacccgttatgaaaagacagcacgctatggtgaaattaggttgtatctgcttatttcttaa

SEQ ID NO: 8693 - DNA, 546 bp, Photorhabdus luminescens
atgaaattttttttatttttttttgtttttttatcttttttttgtcattcaggagaaaatgaatcttttagaaaaaaaatacaaaaaaaaattgacgataaaatattattatgcctaggtgaaactgaatggccagtatcaattaatgaaaattctatatgggttaatgcgaacatggaatctcttgttgatgctggattagtgaaattggattttaaaagaggaaaaaataaattatggaacttaaccaagttaggaaaaaaagaatttaataaaaatggtgatttttgttacggtagaatgatgttaaaagacattctaaatataaattacataaataaaaaaagaggatttatagtttttaactactatgtacacttattacctgaatgggctaagaacaaatcaataaggtttgcatattcttatctagataatattatcacaggcattgacaatgaaaaatatcaaattgaatttgaaaaatctgacactgggattattaaaataataagtgatcctattcaacttgaaattctttactaa

SEQ ID NO: 8694 - DNA, 537 bp, Photorhabdus luminescens
atgaaaaataaattttaccttatttttattttacttttctcgtttgaggcattttctcattgcggaaataaggtaaatctaaaggatggaatcaatcttatagatttgaatggtgatggaaaaaaagatgtaattttttatgccaaatttgaaaacaatacatctcatccaagtaacacattaactgtttttataaaaaataaaaatgggaaatttaatatagttccactcccaaatgatactggttttacttggtttgattttaaattatctgcttctgaaataaaaatacaagattacgagctaggggtaaaaaatggagtttattatattattttttttcgcaaaaaaaataatgatgatgacatatttggagaatacccagtagaatttattaaatatgatataaaatataacaatgaagtgcctggtatttcaaattattattgggattatactaaatcctatcttacaaagaaaaaatataaaaatgttagtgatgccatgacagaatataatatggagtgtagtttatga

SEQ ID NO: 8695 - DNA, 849 bp, Photorhabdus luminescens
atgaaatatatttatttgtttttatctataataatgtcatcaaaagcatattcatttgataacatgaaactcagctttgttgaaggcggtgatttttacgttggtagtgtgtttggcgctcaaaattatgaatctcattctaatgttacattaaattctttttatatcatgaagaatgaagttacttattcagaatataaagaggtatatgaatgggctatattaaatggttatgattttgatgatggatgtaatgggtcacattatgaagattgtcttcctcctgagcaggatgaaggcaggcatcctgtgactagtattaaatggttagataccattcttttttcaaatgcattaagtgagaaattaaaactcactccagtatattttcaaaaaggaaataaaattattagaaaaaaagacaaaaacttagagatctttataaatacaaacgctaatggctatcgtttacctaccttaaatgaatggcatgttgcagcaaggggcggagaacctgccttacgattaggaagatatggatactatcactctggaagcaatgattctaagaaggtggcatggtatccagagtttaatacaagtaattttggaacacaggttgtaggtaaattatctccaaacgacttagatttatacgatatgagtggaaatgtttctgaatgggtctatgatagttatgaacttggtacagttaagttgtactatttttgtggtggaagttatctttcccatgcaaacagcttatccagttgtgataaccatagttcaggatatattatgccagatgttggatttagattagttaggagctatttaaatgaaaaataa

SEQ ID NO: 8696 - DNA, 255 bp, Photorhabdus luminescens
atggatgtctttaaattaaaaattggaaatgattcttttgatatatcatcgaatgaaacgattttgaaatgtgcttataagaatggagttaaattaaaatatcattgcgcttctggatattgtggtaaatgtcaagtaaagcttatttctggtgaagttaatttagatcattctggtggaatatctagagataaaatatcttctggatatatactgacttgctgctcatacccgaaaagcaacattgaaatatag

SEQ ID NO: 8697 - DNA, 1185 bp, Photorhabdus luminescens
atggctaataaaaaatcaaacaataataaggtttttaaagacgaaacatcactgtattctagatatagtatatcaaccctttttcttaagttttttgtaactttattgttaacaaataaaatcacaaaaaaaatttccttatggatgatgagatttattttaaataaaaaaaataagttttttattaggtttttaaatggggtttattttggtggtgaaagtatagatgaagcaaaggctaatgtgatttttctatcaaaaaataatattcatagcatattagattatgcaattgaagggaaaaacgacgaaattttctttgataatgcgctagagtcaacattaaaattaattgatctcgctagcaaagagtccaatataccatatgttgccattaagccttcatcactaggagatattcatctttatgaagaaaaaatgagaggttggaatttttttggagaaaaaattaattcttggagtaggatattagaacgttatgaaaaaatatttcattatgcagaaattaaatcagttaaagttatgattgatgcagagcaatcttggattcaggcagcagtagacaagattgtcatagatagcattattaaacacaataaaatattacctattataacattaacaatacaatcctacaaaaaagaatccattgatcttctgatgttactacataaaattgctattgataataacattaaagttggtattaagattgttagaggagcttatttagaagaagagattaaaaataaagaaaaatcaattggaacattttttttaaataaagaagagactgatttaaattataattatttagttgaatacatatcaaaaagaattgagtatttttatcctttttttgcaactcataatgaaaatagtatatcaatcatattaaataagaatgaattaaaaaataaatcattttggattggacaattgtacgggattggagatcatatttcatcaaaattagcttacaatggtattaggacgtgtaaatatttgccatatgggccaattgataaatcattgccatatttattaagaaggataaatgaaaatgcagtggcttcagatacctttgttacagaaaacagaaagataatgaaagagattattttaagattaaaaaatacgggagataaaaatggatgtctttaa

SEQ ID NO: 8698 - DNA, 822 bp, Photorhabdus luminescens
atgaataaaaatttacaatggtcgccaataatgaagtcaggttttggtgctaacattagtgcagatgattttttgaaagtttctgctgaagaaattaaaaatcttctaatgaggcaaggctttgttgtagtcaataaaataaaccttaatgctgatgaatttcgtgatatatacagcaaatatggaacaatagttgaatatgcagatgaaaaaatagatgttggttttgggtatcgtgatacattaaaacttgagggcgaaaaaggaaaagttgtcactggacgtggacaactcccatttcatgctgatggtgggttattgttatcgcaagtagatcaggtttttttatatgccgcagaaataaaaaacatgaagtttcgaggagcaactactgtttgtgatcatgttcttgcatgcaaagaaatgcctaagcatttattacatgttttagaaaatgaaatttttgaagtaagggttctggaatatggctactatgtagatgtatctcctgctggatggtttcaagttcctgtatttactgaccttggatgggtgagaaaaatgctaatatattttccattcgatgagggacaaccagccagctgggagccaagaattattgggttcacagatgaagaaacaaagagattttttgctgagcttactgaatttatgaaaaatccccgctattattataagcattattgggaaagaggtgatttaattataatggataacagaagagttattcatgaaagggaagaatttgatgacgataatatcgttcgtcgtctttaccgtgggcaaactgctgatatttaa

SEQ ID NO: 8699 - DNA, 750 bp, Photorhabdus luminescens
atggtaatagaaagagattttagctcaattagggtaattattcttaaccatgaaaataagcataatccatttagtgaaagtttagaaaactcaattaaaaaatctttaattaaagctgatcaagatgacaatgttaaagccattgttgtttatggtggggagaatcgttctttttcttcagggggagatttcagtgaagttaaaaatctatcaggagaaagtgtggaacgttggatagatagagtgattgatctatattgtgctgttttaaacgtaaacaaaccaacagtagctgcggtagatggttatgctataggaatgggatttcaattttctttaatgtttgaccaaagaattgtatcaagtgaagctaaatttataatgcctgaattaaaacacggtattggttgttctgtaggtgcagctatacttagttttacacatggacataatataatgaaaaaaattgtatttgaatgcgaagagatttcatcagaaatgtgtattgaatacaatattgcaaatcaagtaatagataaagaaattcttttagaaacagcaatagaacgcgctaatttactagcaacatatccgaaaacagcatacttaaacacaaaaaaatttatgaacaaaaaattcgttgatatcttggaagatagcagaaaagaatcaaaattagttcataaaaattcgtttggctctagagattctcaaaagcattttaaaaaagtacttggtgagaaatattaa

SEQ ID NO: 8700 - DNA, 1506 bp, Photorhabdus luminescens
ttgagctcagagttttgctttgttaaatatggttttgataaaaatttaaataaattaataaatgaatttcaatttgatgaattatctactggaaccatactcttccgtagtacaacaaaggtatctaaatttaaaagtgaaagatatactgcttttttaattggtaatatatataacatatctaccatcagatccattcttggaaaaatagaaggaagatctagtgtgcttagtgatgtggaaattttattattaagtagagataaatttggtaattccattatttctatagcagaaggagattattgcctttttattgaggataaaaagggaaatatagaagtaataacagagtctagaggattaaatttagtaaatttagtacagacagatttgatttggattactaatagtttgaagattgttggtaaggtagagggagataaagcttttgatttcaaacctgaaagcgaagttattaagaactcactaaaaccagataatttttcaccaataagaaatgtgtccagattaaagcctggtacaataaataaattaacatttgatgaacagagatatcttcatttggaagttgaatatgtaatatctcctgtagaggaaaattcttttgatataaaagaaagtgttcttcttgaaataattgattctgatttgagaaactctatttcccggttatctaaaaataatgaaactataggtgttccactatcaggagggttagattcgagtttagttactgctttagcatcaaagtattttgataaagtaaaaacatggtctataggaacagaattaagcaatgaatttgaattttctaaaattgtttctgattatcttggtacagagcacgaagttaaaattcttagtgaagatgaagttatatcaggtgtagtaaaagctatttattataatgaaatatttgacggattatcttctgagattcaatcaggattatttaatgtttatgaattagcaaaaggaaaagttaattcattgataacaggatatggttctgatctattatttggaggtatattagaccccgaaaaatcctatattgaaccaaataaaatattgtctgagcaagtttatagaactaaatggacaggagaattttcaactcatggagcaggaaattatgggttgaatgtttatcatccattttggactaataatcttatatctttatgtcataatttggatccatactttaaaataagagataacgaagttaaaaatattttacgagagtatgcaaatagtataaatatcctcccaaaagaaatagtgtggagaaaaaaaataggtattcatgaaggatcatctgttaataaatcttttgcaacaatgataggaactgaagtaaataactatcaagataaaacaaggtttagttattctatatataaagaatttttgacaggaagattgtcaattgaggaagcaaattcaaccaagttgtgtgaaatcataagaaggaattag

SEQ ID NO: 8701 - DNA, 171 bp, Photorhabdus luminescens
ttgttagaattactgacagtgagcttgatacctgaaaatatcttaatgcggttgaaacttaagtttggggttaaatttgaacaactagaaaaccttgatcgaatgattttagcgacagtggctgtagaaggatggattaggttatgtccctcaattaaattatggctttaa

SEQ ID NO: 8702 - DNA, 273 bp, Photorhabdus luminescens
atgagaacacaacctaaagaaaccccgatcaacatccgggcgaaagccttccagcgggagcttattgaccatgcagcaaacctgctctcaaagacccgaactgatttcatcttggacgctgcctgccgcgcagccgaagatgccatactcgatcagcgccactttttcgttaacgacgaaaaataccatatgttcatgcagatgctggagcaaccgctttctgataatgaaggttttaaaaaactgatgggatataaagcaccgtgggaataa

SEQ ID NO: 8703 - DNA, 489 bp, Photorhabdus luminescens
gtgggaataagcacacctgaaatattaacggctgaacataatataaatgatttttattgccagcatgaaacattaaacgaatggctttcacgccgggctttaaaaaataataagctcggcgcgagccgcacatttgttatttgcaaggaaggcacaaaagacgttatcggttattattgtctaagcgccggttcaattaatcatattgaatctacaccatcgcttaaacgcaatatgccagatcctatccctgtagtgcttcttggccgtctggctgtcgatgtggaatatcaggggaagaagctcggggcattgcttctccaagatgcttggaagcgtgtcgccagcacagcagaacaggtgggcatttcagctataatcgtccacgcacttgatgagagcgctcgaacgttctatacgcgtcttggcttcgtccagtcaccgttggagccatacacgctgatgcttccattaggcaaacagaagtga

SEQ ID NO: 8704 - DNA, 633 bp, Photorhabdus luminescens
ttgatgaaacagatgattgaacagttacgccagttaaaaattgtacccgtgattgctgttgaccgagcggaagatattattccgttgggtaaagcattggctgacaacggcttgccggtagccgaaattactttccgttctacggcagcggcggaagctattcgtttgttgagagcagctcagccgaatatgctgattggtgcaggtactgttctgaaccgtgatcaggtggttgctgcaaaacaggctggcgctgattttatggtttcgccgggttttaatccaaatacggtcaaagcctgtcagcaattgaatattcctattattccgggtgtgaataatccaagtgcgattgaaggtgcaatggaattggggctaaaactattgaaattcttcccggcagaaccttccggcggtttgccaatgattaaagcgatattggcaccttatactgaattgcaaattatgccgactgggggaatcgggccaaataatattcgcgattatcttgctgtaccgcgtattgtggcgtgtggtggttcatggatggttagtcaagcgctggtgggcagccaaaactggcaggaaatcggtcgcctgactcgtgaagcggtggatttggtgaatacttaa

SEQ ID NO: 8705 - DNA, 945 bp, Photorhabdus luminescens
atgaagcagattgcactccttggtgaatgtatgatcgaacttaatggtgcccctttttcgaccatgcatcagactttcggtggtgatgtcttgaacagtgcggtttatttagcacgtgcaagccgacagaagattgctgttcattttgtgactgcgttgggcttggattcgctcagtgaagggatgatcacacgttggcaagacgagggtattcgcacccatctgattttgcgtgatccggttcgccaaccgggactgtatttgattcaacttgatggacagggagagcgcacctttctgtactggcgtaataattccgctgcccgttatatggtgcgccatcctgatttctcttcggttatgcaagcattacagcagatggatgccatttatctcagtggtatcagtttggctatcttgcctgttgatgatcgtgaaaagctactaaacttgctggctgagctggctgctcaaggaaaaaccatcattttcgacagtaattatcgttcggcattatggcaaagtgtggaggaaacccaagtttgttatcagaaattactcgcctttacctcattggcactggtgacagatgacgatgaatgtaagctgtggggcgataaatcggttacagaaaccatgattcgtcttaaacaagcaggagttaaagaagccgtgattaaagcgggggctgccggttgctattatcagcatttggtacaggatactccgattgagctgatcccaacggtgccggttgttaacgtggccgataccacggcggcgggagacgcctttaatgctgggtttctggcaggatttctgacggattgtccgatacaacaagcggcaattatggggcattgtctggctggtaccgttattcagcataaaggggcgattattccaatcagtgcaactcaagcagtgactgacagtttcttttaa

SEQ ID NO: 8706 - DNA, 1425 bp, Photorhabdus luminescens
atgaaaaattttatgtgtgacgattttcttctgaacaatgaaactgcccgtcagctatatcatgaacatgccgcagatatgccgatttatgattatcactgtcatcttaatccgcgtgaaattgctgaaaatcgccggtttgataaccttggtcagatttggttggaaggggatcactacaaatggcgggctatgcgctgtgcgggtattgatgaatcactgattaccggcaagcaaacccgtgattatgaaaaatatcaggcatgggcagaaacagtaccgttgaccttaggaaatccactttatcactggacacatctagaattacgtcgtccatttggtattagcgggatattgtttgggccgcaaaccgcggatgaaatttggcatcaatgcaacgaaaagctggcagccccggcgttttcagcgcgtggcatcatgcagcaaatgaatgtacgtatggttggaaccacggatgatccggtggattctttgcaatatcaccgccaaatcgcgacagatgagagtttcgatatcgaagtattaccaagctggcgtcctgatcgggtatttaaaatcgagttggcgggtttcattgactatatcaaacagcttgaagccgtggctgatgtatcgattgttgcttttgctgatgtgttgaacgcgttggagcgtcggcttgagcattttgctgctcatggctgccgggctgctgatcacggcatagaaaatttgcgctatgctcctattcctgatgaaacggtattaaatggcatcctgcaaaaacggctggcagggggcattctctctgagcttgaaattgcacagtacaccacggcgattctggtatggcttggccggcaatatgccgcccgtggttgggtgatgcaaatgcatatcggcgctattcgcaacaataatagccggatgttccgcttacttggcgcggatagcggctttgattccattggtgataacaatattgcttggccgctatctcgcttgctggatagtatggatgtgacggatgagttgccgaaaacgattctttactgtctgaatccacgagataacgaagtgattgctacgatggccagtaactttcaaggtggcggtatcgccggtaaagtgcagtttggttcgggctggtggttcaatgatcagaaagatggcatgttgcgtcagcttgaacaactttcccaacttgggttgctgagtcaatttgttggtatgttgaccgattctcgtagctttctttcatacacgcggcatgaatattttcgccgcattctgtgtaatgtgttagggcaatgggcagaaaagggcgaaattcctaaccacaaagccatgttagggcagatagttgaggatatttgttttaataacgcccgccgttattttgctttgccgggagaaaatctatga

SEQ ID NO: 8707 - DNA, 1482 bp, Photorhabdus luminescens
atgatccgtaatatagccaacagtaaaattaaccccgctatttctctgccttcttatgatcgtcagaagttggttgcccgtgttgtccatctgggatgtggcgcttttcaccgtgcccatcaggcggtttttactcatcatatgttggaaaaaacgggcagtgattggggaatttgtgaagtcagtttgttctccggtcatcggttgattcagcaacttaaacagcaagattgcttgtgcaccattgcggagaaggggacagaacaaactgagttgaaaattatcggctctatggttgatgctttacaccctgagtttgtgggtcagcaaggtattctggaaacgatagcgcagccgcaagtggcggttatttctctgacgattactgaaaaagggtattgcatcgatgcagccagcggcaagctggatgtgaataatgcattaattcaacgggacttagctaacccaaccgaaccaacatcggccattggttatatcgtcgaggcgcttcgtctgcgttatgaacgtgacttgccgccattgacggtgatgtcctgcgataatatcagagagaatggcaacattgcccgtgaagcggtggtgggttttgcccgcttacgtgatgaaaagctggcgcaatggattgaactgaatgtgacttttccatgcacaatggttgaccgtattgttcctgcggctacgccagaatcggtggcggagatagccggacagctaggtgtatacgatcccagtgcaatcacctgtgaacctttccgtcagtgggtgattgaggataactttgccaatggccgcccaaactgggatgtggcaggagcccaattcgttaaagatgtgatgccttttgaaaccatgaaattacggatgctaaacggtagccactcatttttagcctacctgggctatttagcgggatatgcgcatattgctgacacaatggcgaaccccgattaccggcaagccgctttggatctgatgttgaaagaacaagcgccaactttgacgatgccggtaggaaccgatctttttcaatatgctcatctgttgattgaacgttttagtaaccccaaccttaagcatcaaaccgggcagatagcaatggatggcagccagaagctgccacaacgtatgtttgattctgtcatttatcatctggcaaacggcagcgattaccgccatttagccttgggtatcgccgggtggatgcgttatgtcagtggaaaagatgaacaaggcaaattgattgatgtgcgtgatccgctggttgagcagtttaaatccatttaccagcaatatgggttatctgttgatgtagtacccgcgttgttggcgatttttggtaacccagtgttagctaatccgcattttgtccgggcggttaccgcagcttatcaattattattggattgcggcgctcgtcatgctgtggcggcactcgatttagctgacaggaaaatgatatga

SEQ ID NO: 8708 - DNA, 1314 bp, Photorhabdus luminescens
atggattggcaagtggttttagcgttgttcggtagttttgccgtgttgctggcactgggtgtaccggtatcctttgcgattggtttgtcatcattactggcaattatgatgactttaccaatggaagcggcgattaccgtggttgctcaacgtatggcagtcggtgttgataacttctctttgctcgctatcccgttctttattctggcgggaaatattatgaatcaagggggaatcgctgcccgtctaattaatctggcgaaagtcatgggcggccgtttgcccggttctctggtgcacgtcaatattatagcgaatatgtttttcggtgcgatttcgggctcagcagtggcatcggctgcggcggtcggcggaacgatggcaccaatgcagaaaaaagagggttatgagccggaatactccgctgctgtaaacattgcttcctgtcctgccggtttgttgatcccgccaagtaatactttgattgtttactcactggtttctggtggcacatcaattgccgcactgtttttggcgggttatattcccggtattttgatgggggcatctttgatgattgtggcggcaatcattgccaagcgccgtggttatccggtatcacccaagccgacatggaacgaatttttcaccacattagttcgtgcattgccttctctgatgctggttgtggttattatgggagggatcattgccggtatttttaccgccacagaagcctcggcgattgctgtgttgtacagctttatattggcagtattgatttatcgtgaagtcagtatcactaaattacccaaaatcattctggattctgcggtgaccacttccattgttttgttgctgattggtgcatcaatgggcatgtcttgggcaatggcgaatgcggatctgccctatttgatcgctgatgcactcatggcgttttctgaaaaccctctggttattctgctggtcattaatctggttctgttgttggtcggaacctttatggatatgacaccggcgattctgatttttacgccgattttcctgccagtagcgcagaatatgggcgttgatccggtacatttcggcatcattatgaccttcaacctagctattggtatttgtacaccgccggtagggagtgcgctgtttgtgggttgttctatcggtgaggtcagcattaataaggtattgaaaccgttagttcccatgtattgcgctttggttatcgcgttgatgttggtgaccttcataccgcaactgagcttgtggttgcctcagatgttactgaattactcagtatttaagtaa

SEQ ID NO: 8709 - DNA, 507 bp, Photorhabdus luminescens
gtgaaaaaccttgtgtattgcctcaataaaggtttggcattttttaccgtcagcctttccgtttttttggtgttttgtgtcacatggcaggtggtttcccgctatgtgtttggtacgccaagtacggtaacggatgaactcgctcgttatctgtttatgtgggtcgccatgattggcgcggcatataccacaggtcaacatcgtcatttagctatcgacctgttaacgatgaaacttaagggaataggcaaaaatagtgtgggtttggtgatccaggccgcgatcatgctgtttgcttcgatcgtgctggtgtatggcggatcggtactggtgatctcaacccttgaaaccgggcagatcacgcccgcgctgggattaccgatgggatatgtctatttatgtctgccaattagcggtgttctgatgatctgctatgtgctagtagacattgttgctcttattcggaatttttcaggtaaagacgcggttatttctgaaaatcaataa

SEQ ID NO: 8710 - DNA, 981 bp, Photorhabdus luminescens
atgagcaattctaagcgaattttatctactgtaatcggtgcgatatttgccttaagcgcgtcacaagttatggcagtaacaacattaaaactcagccataaccataaccgcgatcatgcagtgcacaaggcaatgactcagtttgcagatgaagttcgccaaaaaacgaatggtgatgttcgtattcggatctatccagacgcacaattgggtaaccagcgggaatcgatggaactgatgcaaaatggtgcattggatttagtcaaatccaatgccgcagaactggaagctttttcgcccacttattctgcttttaacttaccttatctgtttcgcgataaagcccattacgaaaaaattaaaaacggcgagattggtaaagagattctgacatccagcaaaaaccgtggctttattggtataacctactatgaagcgggcgcacgtagcttctacgccaaaaagcctatccgcacacctgaggacctaaaaggcatgaaaattcgggttcagccaagcccaacagccatctcaatggtgaaaaatttaggcggtaacccaactccactggcttacggtgaactgtatactgctctacaacagggtgtggtcgatgccgccgaaaataatattccctcttttagcctgagccgtcacagtgaagttgccagatacttctcgctggataaccatactatggtgccagatgtccttgttatttctactaaatcgctaaataaactgtcatcagaacagcaaaaaattcttataaccgcggccattaactcttctcaatatatgacgaaattatgggaaaaatcagaggagaaagagcgccagaatgcagagaaaattggcgttaagttcgtcgatgtggatcaaaaatcgtttgaagaggcggtcaaaccgatgtacgacgacattaagaaaagcgacccaatgctttaccgtatggtagagcgcatccgcgcagtcagataa

SEQ ID NO: 8711 - DNA, 744 bp, Photorhabdus luminescens
atgaagcatttacttgagccaaaacgtccttaccaagaagttggcatttcattaagagagatgattgccaaccagcaatatcgtatcggggatcgcttaccaccggagcgagaacttgctgaattactacaggtttccagaaccgttgtgcgtgaagcattaattatgctcgaactagaaagccttattgaagtgcgcaaaggttccgggatctatattattaaccgccctcacctgccgacttcctcttcatgctcagttaacgcagcgggaccttttgagttattacaagctcgccaattgctggaaagtaatattgccgaatttgccgccatgcaagtgacaccaaataacattgcgaatatgcgtcgagccttgcaaaaggaatccgaagatttggcctccggtgaagatgaatccggtgacagagaattccatctggcgattgcggaagcaacccataacagcatgttagttgaactgcttaaacaatcttgggcatggcgggaaaataatcccatgtggcagaaactgcacactcgaattaccgataaagattatcgtaaagaatggctgcatgaccatcagatcattttatccgccatgatcaagaaagatccggcggcggccaaacaagcgatgtggcaacatctggagaatgtaaaattacgtttactggaattgtctgatattgacgatccctatttcgacggctatctctttaactcatatccctgtaaataa

SEQ ID NO: 8712 - DNA, 1188 bp, Photorhabdus luminescens
atggaacaaacctggcgttggttcggcccaaatgatcctgtttctttagatgatatccgtcaggctggcgcaaccggcatcgttaccgcattacaccatattcctaacggacatatttggaacaaagacgaaatcttggcccgtaaaaccctcatcgaaaataaggggcttatctggtcagttgttgaaagtgtgcctgtccatgaagagattaaaacccggaccggtcactattctcaatggattaataactacaaaacttcactgaaaaatttggcggaatgtggcattgataccgtctgctataattttatgcccgtgctggactggacacgcaccgatctggaatattcactccctgatggttctaaggccctgcgttttgaccaaattgccttcgccgcatttgaaatctatatcctcaaacgaccaaatgcagaagctgattacaccgttgaagagcaagctcaggcaaaagtctatcacgacaacatgtctgcggctgatattaagaaactcaccactaatattattgccggtctgccgggggccgaagagggctatacgttagcagaatttcaggcgcaattagatcgctacaaagatattacccgcgataaactgcgtgaacatttggcttatttcctgcaccagattgttcctgtatgtgaagaatatggtttacgtctggcaattcacccggatgatccgccgcgtcctattctgggcttaccgcgtattatttccaccattgaagatattgaatggctgaccaccattgaaccaagcccggctaacggtattacaatgtgtactggctcctatggtgttcgtagtgataatgatttggttgagataattaaacactatggcaaccgaatctatttcactcacctgcgctccacccaacgggaagaaaacagcaaaactttccatgaagccactcatctggcaggtgatgtggatatgtataatgtagtgatggaaatcctgcgtgaagaatatcgccgtaagaaggttggagataaccgtttgatacctatgcgccctgatcacggccatcaaataattgatgacctgaaaaaacagactaatcccggttattcctgtattggtcgattaaaaggtttggcagaaattcgcggtctggaattaggtttaaggcgagcgttttttgaaaataaataa

SEQ ID NO: 8713 - DNA, 171 bp, Photorhabdus luminescens
atgactaagagagaggagtttttagcttatttaagtgaagcgagtaaaatagttgaacaatggccagattggaagaaaggtggattgagaacctatcgtaacccgcagacatctggtcaaaataaacctaaggactatacgacaggtgagactgaaaataaattggcataa

SEQ ID NO: 8714 - DNA, 1200 bp, Photorhabdus luminescens
atgatgccttgtgattttgattctgaggtcgttattgcgttagttggtgctgtaggaacggatctggaaataattagagattctataacaaagaaacttaatgcgttcaggtatgatgtacaggagataagaatatcttctgaaatcatttcggtattaagagatattccctcaacaagggataattatgaaaggataagttgtttaatgtcggagggtaattatttaagagagtctagtcaggatagttctatattagcattggctgcggtggcagaaataaataaaagaagggagaagaagcatttctcatcaataccatctattaggagggcatatattataaattctctcaaacacccggatgaagtcaatgctctaagggatatttatgtaaatggttttttcttgataggtgtatatacgagtgaatctcagagattaagaaatcttatcgttgataaatgtattgatgaagtaaaagccagagaattgattaatcgtgattccaatgaagggaataagtgggggcagcgtaatcgagatacttatgagttatcagatttctttataaattatgatggaaataaaaataggaccgacaataatatatggagaatattagatctgatttttggtaacccatatgtcacgccaacctttgatgaatacgctatgttcatggctttttctgcttctctgcgatcagcagatctttcccgtcaggttggtgcggtattaaccaaagataagaatataatctcaactggagctaatgatgtgccacgatttggcggaggattatattggcctgattatgtaggagattcaattgaagatgctgaaaatggtagagattataaagtaggtgaagattcaaacgctaaagagaaaagattaattattgaagatatacttgaagatattgaagaggaacaaaaagaaaagtttagaggatgtctcctaaatagcaagataaaggatattaccgaatatggcagggttgtacatgctgaaatggaagcaatcttggcgtgtgcaagaagtaacattagtactcataatgggatattatactgtactacatttccttgtcataactgtgcaaaacatatcgttgctagcggtatacggcgagttgtctatattgagccttatcctaaaagtaaagcttttgattttcatcctgattctatttaa

SEQ ID NO: 8715 - DNA, 1590 bp, Photorhabdus luminescens
atgatggaattgacgatatctagagataacattaagtctcttgttaataaaatagacaatttaattgatattgaaaataagaaaaatggcggtgccctcgcggttgctgttacccacggaaatgaaactatttataagcgctatatcgggcaagctagcattgaacatgcagttgccataacccccaatacgaagttctatatggcgagtgtttcaaaacaattcaccgctttttgtattgctttgttggaaaaagaaggaaagatcaatgtcaaggataaagttggaaaatatgtggattatttcccggcacatttctctgatattaccattgagcatcttattcatcataccagtgggttacgggataaatatgccccttatggtttggcgggtaaaaactcagattttgaccaccgcagtatagatttattaagaaaactgattcaacggcaacaaaagcttaatttcacgcctggggaatattttagctataccaatatgggctataatttattggcagaaatcatcaaagtggtttcgggtaaatcgttaagagaatatgcgaaagaaaatatttttattccattaaagatgaataatacctctttctatgatgatgttactgaggttatctctgaccgggcgataggttatgtctataacgcagattcaaatcaatggataagatcggatcataacgattcaactataggtagtgcggggcttcgttctacagtgagtgatttatgccgttggatgaaagcattttattcaccatcgattgttcgggatatgttgcctcatttatctcgtatgccaaatttagccaatggcaatcgtaacaattatgcttacggtttgatgatcagccaacgtgaaggtcaaaagataatacggcacgatggtgcctatgatggttttaaagctgaggtttgtgttttacctgatgctaaattaggtgttgtgattactgctgcaacaggtattaatagtgttgagtttactaatcaatgtcttaatgtattatttaacactgacatggctgagccagagcattgccgaaccagtgatattgatattaccggtatgttcaagggggctgatccctatccttatattattaccaaggaagattgctatttattaggtaatttattcgagaaaggtaatccgattatctttaacgccgatggaacattccaagagaaggggggagatatccggttcagaccgatcattgaaaataaccgtgttatcgcactggaacagattgatgaaaatgacaatgttttttatttgaaaaagatgactgataaaggtgatattgatattcagcgattatcaggtcgctattataatcacgaaacagaatcaatgctaagtattgaagtatccggtgatgaactttatattgatgcggttatcttgccagggaaaaaagaggcgttaaggtgggtttacgagaatagttatttcttacccagcattgaatttattattgattttgaatttaaccctgatacgaaggagcctcgtctttatgtcaatgatgcacgttgttggaagatagaattcatacccgtttag

SEQ ID NO: 8716 - DNA, 1596 bp, Photorhabdus luminescens
atgatggaatctactatatctacagataaagttaaattgtttctcaagaaaatagatgaattggttgatattgaaaataagaaaaagggtggcgctcttgctattgctgtgacccacggtaataaaacgatttatcagcgccatatcggaaaggctaatattgaacatgctgtgactgcaaaacctaatactaaattctatttagcgagtgtttcaaaacaattcaccgctttttgcatagccttattagagaaagaaggaaagcttagcgtcaaggataaagtcgggcaatatctggattatttcccggtagaattctctgatattactattgaacatcttattcatcataccagtggattacgggatgaatctttactttatcgtctggcaggtaaaaactcgcgttttgattaccatgatattgatttgataagaaaactgacgcagcggcaacgaacacttaattttacacctagcgaatattatgcttatagcaacactggctattatttgctggcggaaatagtcagtgtggtttcaggtaaatcattgagggaatatacagaagaaaatattttcgctccgctaaagatgaaagatactactttctatgatgatgtcacagagattatttttgatcgggcgatgggttacacttatagcaaggaaccgaaccggtgggcaagatatgatctcaatggttctgtggtaggtggcacagggctttattctacagtgaatgatttgtgtcgttggatcagagcattttattcaccatcgattgttcaggagctgttgcctcaattatctcgtacaccagatttaactaatggcaatcacaataattatgcttacggcttgattatcagccaacgagaagggcaaaaaataatacaacatgatggttcttatgctggtttcaaatctgatgtttgtattttacctgatgctaaattaggtatcgctattacctctgcaacaaatattaatgtcattcaatggattgaacagtgtcttgatgtgttgtttaactcgaatatagttgaaccggaaaaaccacattgtctaactagtgatattgatattaccggtattttccgaggggcagagccttatccttatattattaccaaggaggattgttatttattgggaagtttattcggaaaaggcgacccgattacttttaaccctgacggttcattccaacagcaaggaagtaaaacccgatttaaacctatcattgaaaatgataatgttgtctcactggaacagactgatgaagatggcaatgttttttattttaaaaagatgactgataatggtggtattgatattcagcgattgtcagggaattattatagtcatgaaatagaagcaacgatgactatttccgcttctggagatggaatttatattgatggggttacttaccctgagaacaaaggagttttacggcgggtttacggtaatagctatttctccccgggcactgaatttgttatcgattttgaattgaattctgatacaaataaaccgcatctctatattaatgatgggggttgctggagggtagaatttgtcgcagtttaa

SEQ ID NO: 8717 - DNA, 1590 bp, Photorhabdus luminescens
atggaatctactatagccacagataatattaaattatttctcaagaaaatagatgaattggttaatattgagaataaaaaaaaggggggcgctctcgctgttgctgttacccacggcaataaaatcatttatcagcgtcatatcggaaaagttagcattgaacatgctgttgctgtaaagcctaatactaaattctatttggcgagtgtttcaaaacaattcgcggctttttgtattgctttgctggaaaaagcaggaaagctttgcgtcaaggataaagttggacaatatttggattatttccccacggaattttctgatattactattgagcatcttattcaccataccagtggattacgggatgagtttttactttatgagttggcaggtaaaaattcggactttgaccaccgccatattgatttagtcagaaaactgactcaacggcaacaagcgcttaactttacgccgggggaatatcatctctatagcaatacgggctataatttgctggcggaaatagttagagtggtttctggtaaatcattaaaagaatatgcagaagaaaatgtttttgccccattaaagatgaaagacacctttttctatgatgacataaccgagattattcctgatcgggcaatgggctacacttataacaagaactctcatcagtggataagagatgatcttaacgatacggtggtcggtggttcagggcttcattctacggtaaatgatttgtgtcgttggatcagagcattttattcaccatccattgttcaggatctgttgcctcaattatcccgtaccctgaatttaaccaatggtaatcgtaataattatgcttacggttttattatcagccaacgcgaagggcaaaagataatacaacatggtggttcttatacgggttttaaatctcatgtttgtattttaccggatgctaaattcggtatcgcgattaccgctgcaacaggtgttgatgtttctacatgggtggagcagtatattgatatcttatttgacaccgatattaagccagaagaaccgcattgcttaaccagtgatatcgatattaccggtattttccggggggtggagccttatccttatattattaccaaggaagagacttatttattaggtaatttatttgaaaaaggtaacccgattatttttaacgctgatggtacattccaagagaaaggcggtaaaatccggttcagacccatcattgaaaatggcagtgtcattgcattagaacagattgatgaaaatggcaatgttttttatcttaaaaagagagttgatgacggtagtgtcgatattcagcgattgtcagggcgttattatagtcatgaaacagaagcaacgatcacggtttccgcttctggcgatgggatttatattgatggggttgtttatattggtaaaaaggaagtcttacggcggatttatgggaatagttatttttctcccagcactgaactgattatcgattttgaattagatactgaaactaataaacctcatctctatatcagtaattcacgttgttggaagatagaattcgttgtagtttaa

SEQ ID NO: 8718 - DNA, 1593 bp, Photorhabdus luminescens
atgatggaatcgatgatatctaaagataatattcagttgtttatcaataaaatagatgagctggttaatattgaaaatgaaaaaaaaggtggagctctcgcagtcgctattatccacgatgataagataatttatcagcgtcatatcgggcaagctagcattgaacatgctgttgctatacagcctaatactaaattctatttggcgagtacttcaaaacaattcacggctttttgcatagctttgctggagaaagaaggaaagctcaacgttaaggataaaatcagacaatatttggattatttacccgaacatttcgctgatattactattgagcatcttattcatcacaccagcggattacgggatatatttttactttatagtttggtaggtaaaaactcaagttttgactactgcaatgctgatttgatggaaaaactggttcaacgacaacagacatttaacgcccctgctggagaatattatatttatagcaatacgggctattatttattgggggaaattatcaatgtggtttcaggtaagtcgttaagagactatgcagaagaaaatattttcgttccattaaagatgaaagataccgttatctgtgatgatataaccgagattatctctaatcgggcgatgggttacacttataatgagaatgcgcaacagtggataagaagcgatatcaacaattctgtgatgggtagtgcagcggttcactccaccgtgaatgatttatgtcgttgggctagagcgttttattcgccatcgattgttcaggagctactgcctcaattatcccgtacaccagatttaaccaatggcaatcgtaataattatgcttacggtttgattatcgaacaacgtgaagggcaaaggataatacaacataatggtacctttgctggctttcgagcgaatatttgtattttaccggatgctaaattaggtatggcgatgacttctgcaactgatgctgatgttgatcaatggacggataattatatggatatcttgtttaacacccatattgaaccggaaaaaccatattgcctaaccagtgatattgatatcaccggtattttccgggggatagagccttatccttatattattaccaaagaagatatttattttttaggtgatttatttaaaaaaggtaatccgattatttttaactctgacggtacattccaggagaaaggaagtaaaattcagttcagacccgttattgaaaatgacagtgttatcgcactggagcatattgatgaaaatggtaatgttttttatttgaaaaagatgaacaatgaaagtagtgtcgatattaatttattgtcagggcgctattatagtcacgaaacagaggcaataattaatattatatcatctggtgatgatatttatattgatgggattatccatcctgtaaaaaaagaggctatgcgacatatttatggcaatagttatttctcatccagtactgaatctgttattgattttgagtttgatcctgaaacaaataaatattgtatttatattggtaattcacgttgcttgaatgtggaatttgttgcagtttaa

SEQ ID NO: 8719 - DNA, 504 bp, Photorhabdus luminescens
atgaaactaacaatatccacagataatattaaattctttctcaagaaaatagatgaattagttgatattgagaataaaaaagaggaaatccgattacttttaactctgacggtacattccaagcgaaagaaggtaaaacccggttcagacctatcattgaaaataacaatgttatcgcactggaacagattaatgaaaatggcaatgttttttttaaaaaaaatgaacaatgaaggtattattgatattcagttattgtcagggcgctattatagtaatgaaacagaggcgatagttaatattataccgtatggtgaaggtatttatatttatgggattgtctatcctgtaaaaaaagaggttttgcggcatatttatggaaatagttacttatctccaggaactaatcttattattgattttgaatttgatccagataaaaatacatgtcttctctatatcagtaattctcgttgcttgaatttggaattcattgcagtttaa

SEQ ID NO: 8720 - DNA, 1593 bp, Photorhabdus luminescens
atgatggaatcgatgatatctaaagataatattcagttatttatcaagaaaatagatgaactggttaatattgaaaatgaaaaaaaagggggagctcttgcagttgctattatccacgatgataagataatttatcagcgtcatatcggacaagctagtattgaacatgctgttgctatacagcctaatactaaattctatttggcgagtgcctcaaaacaattcacggctttttgcatagccttgctggagaaagaaggaaagcttaacgtcaaagataaagtcaaacaatattttgattatttacccgcgcatttctctgatattaccattgagcatcttattcatcacactagtgggttacgggatatatttttactttataatttggcaggtaaaaactcaagttttgactactgtcatgctgatttagtgagaaaattgatccaacgacaacagacatttaacgctcctattggggagtattatatttatagcaacacgggctattatttgctaggggaaatcgtcagcatagtttcaggtaagtcgtggaagaaatatgcagaagaaaatattttcgctccattagagatgaaagataccattatctgtgatgatataaccgagattatctctaatcgggcgatgggttacacttataatcaaaattcgcaacagtggataagaagtgatattaacaattctgtgatcggtagtgcagcggttcactccaccgtgaatgatttatgtcgttgggctagggcgttttattcgccatcaattgttcaggatctactgcctcaattatcccgtaccccgaatttaaccaatggcaatcgcaacaattatgcttacggttttattatcgaccaacgtgaagggcaaaggataatacaacacagtggtacctatgccggctttcgagcgaatatttgtattctaccggatgctaaattaggtatagcgatgacggctgcaagcgatgttgatgttggtaaatggacggataagtatatggatatcttgtttaacacccatcttgaaccggaaaaaccacattgcctaaccagtgatgttgatatcaccggtattttccgaggaatagagccttatccttatattattaccaaagaagatgtttattttttaggtaatttatttacaaaaggtaacccaattatttttaactctgacggtacattccaggagcaaggaggtaaaattaagttcaggcccgtcattgaaaatgacagtgttatcgcactggagcatattgatgaaaatggtaatgttttttatttgaaaaagatgaacaatgaagatagtgtcgatattcagttattgtcagggcgctattatagtcacgaaacagaggcgataattaatattatatcatctggtgatgatctttatatcgatgggattatccatcctgtaaaaaaagaggctttgcgacatatttatggcaatagttatttctcacccagtgctgagtttgttattgattttgaatttgatcctgataccaataaatctcgtctttatatcggcaatgcacgttgcttgaatgtggaatttgttgcagtttaa

SEQ ID NO: 8721 - DNA, 882 bp, Photorhabdus luminescens
atgatttctaaagctcaatggatctcttatagttcgactttgatttttgttttattgtggagcagtggtgcgattttttctcggtggggactcgatcatagtaccgcatttgccattcttacgatgcgttttgctattgcacttatttttttgatatttctaggattattattcaggcataagggctattatttacctgaacatggtactcgcaaacagattgcgggtaccggtgttttgttaattggcggctattctatttgttacttttttgctttggataacgggatcacgcctggcgttttggctacagtgatggggattcaaccgattatcacattgttggtgatcgaacgtcgtttctcggttgtacgtttagcgggtttgttattagcattattgggcttggtattagtggtgtatcaaagcttggtgctgtctcggttttctattgctggtattacttttgccttagcagcattggcttgtatgagtattggtgcgattttacagaaacgaattcatcaagctccttctgcggttttacccctgcaatatagtgttagtctactactttgtttattgtttgttcctttccaaccttttgaatttcaactggtgcctggctttattatttcattattatggttagggctagttatctctgttgtggctcaattattactttaccgactcattcaggcaggtaatttagtgaatgtaaccagtcttttttatctcgttcctggtgtaaccgctgtaatggattatttatttttaggaaattcgttacctgctctaagtttgttgggaatggccgccattttatcaggacttgtattagtctttcgtacaaagaaaggttcccttgccactgaataa

SEQ ID NO: 8722 - DNA, 1191 bp, Photorhabdus luminescens
atgatggctatcaccaagaacatcatatctcaggaaacacgcattggagtctattacctgatttacgtaggaaatattcgactcagctttctgcacagaagagagttattagtccggtacctgcaatactgggttttttacacagacatagatctttacttcatagatctatataccctatggatttcaagatgcatcgcgacggcaagggaacgaatccccgggagcataggtaactatgtgaccggggtgagtgagtgcagccaacaaagaggcaacttgaaagatgacgggtataaatcaaaaataatgggtgaatctactataatgcaagaaaaattcgagattagaggagcaacactggcagaatcggagtttatgatatacgaaacatcaaacaatatatctgtacacgcactttctgcccttttggatggccaccttgcagcttgtcgggttcgtaattttcttccgtcagaacaaagcaggaaaataattgagaacttttggcgttcttcggcacggactcctcgttacggagaaggtattgaaggtgttgaggggtacttcattggagcatctcatattgaaaaagatacccgccaatatattgaagaagcagaaaatttccgttcagcaattaatgaggtgtttcaagatacgatcaatcccattgatcgttttattgatcaaatagttcattttagtagtaataacctacgggtaatgcgtcctgcaatgtatcatggtgttgcggcgggtaatgtaaaaattgtgtattggaataattttggcgaattccttttattacctcatgatgatcttgcgcagttaagtgatccgcgccagagtgattttgagatccaacagattaatcgtgttatggcggtaaatttttacgctgacgttcctcaaaatggcggacaattaaaagtatggaacattcaacctgacgaccaatcgcgtagtgcccttggtttaacttacagtggttttccatacccgtcggaattattggaagatcatgcaagtatggtgattaatattgaggcgggagatttggtattactgaatgggaacttggtccatgcggtactgaatggcaatactatctctgcaccagaacggcgtttactggtgacctgttttatgggattacagcaaaatggtgatcttatttggtggacctaa

SEQ ID NO: 8723 - DNA, 1101 bp, Photorhabdus luminescens
atgcttgattcaaatttaacagattgtaatagtaagaattcttccccggtttgttcttttaatgaatgggatccacttgaggaggttattgtcggtgtagtcgatggtgccagatttcccggttggcatatggcgacagagccaatattaccaccgaatcaagttgataattttcatcgatatgcaggtcggtcatttccgcaagagcaaattgatgcagcatctagagagttagaagagtttgtccatattcttgaaggtgaaggtgtgacagtacgtcgtccggagccgcaagaccaatctcaagtatttggtgcaccaggctggagtagtacagggttttattgtgccatgcctcgcgatgtgctgttagttattggaaatgatattattgaatgcccgctagcatggcgttcccgttattttgagacagcggcatataagactttacttaaagattactttaagaaaggggcaaaatggagcgctgggccaaagccgcagttgactgaggaacaatataatttcgaatggcatcggcctaatagtaaggagcgtgttccccttgctataactgaatttgaaccaacttttgatgctgcggattttattcggtgtgggcgagacattattgctcaaaagagccatgttacaaacgaatttggtattgaatggcttcgtcgtcatataggtgatgaatatcgtattcatgtttttgaatttaacgatgatagccctatgcacattgatgccacctttgttcctatggcgccaggaaaactgttaattcacccagaaaaagtattaaaaattcctgaactatttaggaactgggatgtattacatgcgccgaaaccggttattcctgatgaccatcctctgtataccaccagtaaatggatcaacatgaatattctgatgttggatgaacagcgcgtgattgttgaaaagcaggatgaaccaatgattgctgcgatgaaacgctggggctttacgccaattccatgtaatttcaggaattttaatacgttcggcggttccttccattgtgcaacagtggatgtaagacggcgcggaactttacagtcttatcttgactag

SEQ ID NO: 8724 - DNA, 303 bp, Photorhabdus luminescens
atgataattaagaaagatattttgttaaatgaagagctgattgtcgatgatgatcttaaagtgggtaaagtagagaaggtcaatattgatattctgtcacccagctcagtcattgttagtctgaatattttaggcgtagttgatgattttcatctattactagttgatgataaagataaagataagattgtgctgctctatctttctcttttacgtgttcttcatgaaaaattagatgtaaaagtaaaagtcgcaaaaagtaaacttactaagataaaatatatagtaggtgttgaaatttaa

SEQ ID NO: 8725 - DNA, 939 bp, Photorhabdus luminescens
atgaaagcatattattttaatttacgacagagaattttgacatttgctctgcttttttcatgttatataggttttgcttactcaaatacaaatgcacataaacagtttttccgtcatgatggtagtgaaataacttactatcttaagcaaagaggtggtaagaatctattggtgctgatacagggctctgattgtaatagtatcgctaataataagtttgtgaataatacattcagcgatatttatcccgatagtgatgttctgactgtggaaaagtatggcattaatgcatcactcccttggtctgatgttgttgagcgttcagattgtcctaaagcttatattaggttggatacgccagaacagcgagttaaggattatattcagatcattgattatctgaaacatcagaataaatataacaagatcattattttgggtggaagtgaaggggcagtggttgctaatttaattacatcacaagtcaattatattgatagaactgtgtcactgaatggtggaggtcggtatttcgctgatgatgttattcatagtataaaaagtgaagcgccaccagaatatctcaatgaagagattaaaggatttagggattttcagcaaaaaatagctgccggggataatatgagtcatatagaaatgagtaatcatggtgctaattggtggagagtctcacttggtattgatcaatataaagtgttaagtcagactaaaagacctattctgattattcaaacactaaatgataattcagttaaccctagtgcagcgatgaaaatggaagagcaattaaagaaagagaatattaccttttatcaataccctggcctaagtcatggatttagaaatagtgaaggtgttttgcaaattactcctattgttgaggatataaagaactggttgtccagagattatggataa

SEQ ID NO: 8726 - DNA, 900 bp, Photorhabdus luminescens
atgcaaaccactttatccacagaaattacattacccgataattatcatacccacgattttttcgctcttcatcaaagggataaacaaaatatcgctgaaattgtggaacagaataaagttcaaaaagggatgatgtgggatgacaaacctgcggaattaaccatagcgattaatgcaaaaaccgcacatatacaacttaagattgatggtgacacaacaggccctgatgagcgcttatctactttagcatcacatatgccagggcttctacagcctgttcatctatttgagtgtttatataaaaggcacccagttatcggttcacttattgccagacaatcaggtttaagaatttatcaatcggccacaccgtttgaagcattaagttgggcggttatcggccaacagatcagcgtcagtgcagccatctctattcgcaggagatttattcaggcaatgggcgttcagcactcttccgggctatggtgctttccaaccgccagacaaattatcaaccattcagaagatgaattacgccaatgcggattttccgtcagcaaagccaaggcattactccgcttaagtcaattaattgaatctggtgaattaacattagcaatctctaatagtgagacagatattcagcaattgatagataatctactcgctataaaaggcattggtatgtggacaattaactattccctgttacgaggatttaactatttaaatggctcattgcatggcgacgtcgcagtaagacgtaatatccaaagattattcaatcaaaatgaaaaagtttccgcagaacaagcagaaaaatggttggcagatttcgccccctggaaagccctattagccgcacatttatggcaacaagaatcaagtgcaggatattga

SEQ ID NO: 8727 - DNA, 426 bp, Photorhabdus luminescens
atgatcgactcattaaaagtaaacgagattatagaaagaatggtagccttttgcttagtgaaaggtgttcagcctgatgagctcataactgctatttttgagagtgaatacgatagcattgaaaccattaagaaatctaatgatattcatatgattatcacctataaagaaaatgtagataacgaggtgaatattattagaatgaaatatatatataaagaaaataaacagttacagagaatagaacaaaagataaattcggcagcttataaagtccaatgggatagaacggagaaactagaatctattattaatgagcttttagaagctatcggggccgacaaaaaaatattatcagatattaaagaaaaaattccggcagagtttcaaagtattgtttaccttaagttaaaacttgtttgctaa

SEQ ID NO: 8728 - DNA, 1860 bp, Photorhabdus luminescens
atgtcttatttttttgatacagcagttaatattgagggaaataagaaattaagaacgcctcagattgaggcatacatcaagattagagagtattttaatcagccagataataaagaagcattagtagtactaccgacaggtacagggaaaagtggtttaatttctattgcgccatatggagtttcaaataaaagagttctcatcataactcctgggcttgttactaaagatagtatacgaaaaactcaagaggtgttagaggacaatttctgggtgaattgtgatgttatatttaatagtaaagatattcctgtggtgaatgaatatcttcaagatatcagtgatgagcatttatttgctagtcatattgtttactctaatatacatcgagtatcaagtaagcgtgagacaagtctaataagtagagttccacaggatttttttgattttattattattgatgaggctcaccatgctcctgcccaaagttggcgtgaagttttgggatatttccgcgaggctaagatacttcatgttacaggaacaccatatcgaggtgataatcaagaaattcctggagaaaaaatacatgaaactcctctttcagaggttatgaaaaataattatgtgaagtggttaagaaaagagacggttaatgcacatgagttgtatttttctataaaagaaaatgaggaagttaaattatcaaaggaagaggtattggcatttaaagataaagaatggatagagaaaagtgtcgctctgtctgaggaatgctcaaaagatgttattgaatatagcatattaaaattaaatgagttaaagaaattatctagtaaagttccccataaaatattagctgtaggttgtagtatttctcacgcagaagatttatatcattggtataaagaaaagggattaaattctattattgttcatagtgaaatgtccttagatgaattacgtagagcttttagaaatattgaaaatcatcaatgtgatgtcgtaatttcagttaacatgttgatggagggttatgatcataaatacttaagtattctggctatatttaggccatatagaagtattaatgcgtttgcacaagtggttggtagaatattgcgtgcaatacctgatgatgaaataacagcttttgaaattgataataatggattggtaatatttcacgaagaaattggactcaacacaatgtggaatgtatttcaaaaggaagttgatagagctaaaagaggaagtatccgggaatatacatttagtgatagagaatatattgagagagaaaattcattagctagtgtaaatagtgagggggcttttattagtaataaagattcatatcttgatgatatagattttaatgaattatttgaaagaaagagagcggagataaatgcattagtatccgaaaatataaataaaattattcaatcgggagtagatctaccattagatgtgcttgaaaatttgaaagattctcttgtagagagagaaattcgtgaagctgctaaattaatagaccctgagttgatagagaagcggcctgcgcaagcaagaaaaatgatgcgacaaatcttgagtactcgaatacaggatgaggttgctaatcttttgattgaaaatggtattgatgaaaaaggctctgagctttatcatgtttttaatcgctgtattcctaatctaaagacaacagatgttaatgatggtattgttgttcgttttattaatagcaaattatccaagatatatggggcggttaaggatcgggataataaaacattgctaaaatcaataggggcattagcgggaatacttgaagaagttaagagggtgatacgatga

SEQ ID NO: 8729 - DNA, 582 bp, Photorhabdus luminescens
atggcttttcacctgagtaactattggcgatgtaattggaacagcagaaaaaataaaatcatttttttttcatgcacgttgctgatagttttttttatgttcaatagtaaccgacagtttagcattgttaagagtatgtttgattatgctgataaacattgccagcaaaacacagactgcttggttaacatcagcaaaattacgccgtttaaatgggacactttgtatgttattgatagtggttggaatcttgatgaaattaagtctgtcattggtgcggagttaaaggaaaggactgatatcttttccaagattatctttgttaaggatgggcaagtggtttatttcgaagagtatcattattatccggattcaggggatgaaaaaatcttggttctcgattttgattatgaaaatcaggaaaaagggcttatagcttattatcgtgttcccagagaggctcccaaaattgtcataaaaatgaaaggagacccatcagtagaagacaaaatttactatttattttcttccgttaatgagcagcaggttcagaggaaccctgcatcgttccgaaaacgatga

SEQ ID NO: 8730 - DNA, 174 bp, Photorhabdus luminescens
atgaaagcgcaggccaaggcagtgttgaatcgctttcataaagagggactgtatgttgccaagaaaaatgcgatggggtttgagattgtcaaagaaaaaatcaccgatgagcagttttcttatatgaactcggtatttgaaagaggaaatgaagatggcttttcacctgagtaa

SEQ ID NO: 8731 - DNA, 234 bp, Photorhabdus luminescens
ctgatctgcgtccttaagggcagcaaactgccggatgttaagatctataatagggcaattctctttgttatatttatccttataagtattaactatatcagcaaagccaaagcattactccgcttaagccaattaattgagtctggtgaattaacattagcaatctctaatgatgagcaagatattcagcaattaacagataatctactcactataaaaggcattggtatgtga

SEQ ID NO: 8732 - DNA, 141 bp, Photorhabdus luminescens
ttgcatggcgacgttgcagtaagacgtaatatccaaagattattcaatcaaaatgaaaaagtttccgcagaacaagcagaaaaatggttggcagatttcgccccttggaaagccctattagccgcacatttatggcgataa

SEQ ID NO: 8733 - DNA, 171 bp, Photorhabdus luminescens
ctggtgaagttacgtaactacaccgaattgatggtacgcctgttgcatttaaatcatcaaattgatccatgcctgttcctcataaattctcttttttcttggtcgaaatttttgatcttggaacaggcattgagttacatcttttatccagagttcaggttatttatgtaa

SEQ ID NO: 8734 - DNA, 387 bp, Photorhabdus luminescens
atgaaagtctggtatcaggaaaaaaatgcgcctctgccaggaacatacctgtgttctgtttttgatattacatctggcggagtgatggaattttgctttgggaaacacagaaaaacgcagtttcgcatgtttatctacaatgatgcaggtcaactacgggcatatatgaatgtttgcccacattttgatgtgcctttgaatgttcgctccggcgagatatttacctcggaccgcagtcagtttatgtgttcgattcattatgccagatttaattttcatgatggtcattgtacagaaggaccgtgtgagggtattggcctagaatcgatcccgctgactattaccggagaaagtgtatttattgcgaaatatgatttacataaataa

SEQ ID NO: 8735 - DNA, 183 bp, Photorhabdus luminescens
gtgtattttgtcgttttggctactgacagacctgctcgggagacgctgcgtgcccgcatctgcccggcacaccgggtgtatgcatttttaaaggatgacccttacatgctggcgagggtatggagaaattatcgttcgcccttggctgttggggattggtgctccacgggaggagtaaaatga

SEQ ID NO: 8736 - DNA, 1212 bp, Photorhabdus luminescens
atgatgagagaagtctttatttgtgatgcgattcgtacgccgatcgggcgctatggcggcgtattgtccaagattcgtgcagatgacttgggggcagtgccgctgaaatattttctgcaaaaataccaagatctggactggtcggcggtggatgaagtgatttatggctgtgccaatcaggcaggagaagataaccgtaatgttgcacgtatgtcggcactgttggccggcctgccggtgacggttgcggcgaccacggtcaaccgcttgtgcggctctggcatggatgccatcagcatcggtgcccgggcgattaaagccggtgaagctgatctcatcattgcaggtggcgttgaatcaatgtcccgtgctccttttgtgatgggaaaagctgaaaccccattcagccgggaagctaacggactgcacgatacgacgattggctggcgctttatcaatccgcaaatggccgagctgtatggtgtggattccatgccggaaacggcagaaaacgttgctgaaacgtttggtatctcccgtcaggatcaggatctatttgcttttcgcagccagcaaaaagctaaggctgcccagttatcagggcgtttcagtttggagatcgtttcagtcagcgtgccacagaagcggggagagtttctggtggtcgatcaggatgagcacttgcggcctgagacaacgctggaaggactggcaaaactgcgtgctccctttcgtgcaggaggctcagtgacggctgggaatgcttcgggggtgaatgacggagcctgtgcgctgatcctggcctctgctgaggctgtgcaacggcatggattgacaccgcgcggcaaagttattgcagcagcgacggcgggagtggaaccacgcattatgggctttggtccggctccggccacgcaaaaacttctgttgaaaacggggattagccttgatgaagtagacctgctggaactcaatgaagctttcgcctcgcaggcgctggcgacactgcgtgctttgggggtgagggatgacgatgagcgagtgaatcctaatggaggcgcaatagctctgggacatccgctgggcatgagtggtgcccgactggttaccaccgccttgctggaactgtcgttgaggcaaaagcgatatgccatttgcaccatgtgcattggcgtgggacaagggatagctatcctgattgagcgcgtctga

SEQ ID NO: 8737 - DNA, 1065 bp, Photorhabdus luminescens
atgatgaattttatttaccaagctttgcccggcagagttatcttcggtgccggtaaaatcgctgaaacaaaagcggaggcgcaattgctggggatcactcgggctctggtgatctcaacgccacagcagcttaatctggcaactgatgtgcagtcgatattaggcgatattgctgctggtatttatgataaagccgtcatgcatgtcccagcagaaacagtagcggatgtcatgcgcgttgtggacgagttgcgcgttgacggttgcgtggcaattggtggcggctcgacagtcggattggcaaaggcgatagccctgcaaaccgcactaccgattctgacgatccctacgacttatgctggctcagaaatgacgccggtctggggtataacccgggacgggattaaaaccaccgggcgcgatgtgaatgtattgccaaagaccgtgatttatgatcctcaattgaccctcagcctgccagcttttatctccggtcccagcggcatgaatgcgattgcccactgtgtggaaggattgtattcacagaatcacaatccgatcacatccatgatggcggaagaagggatcagggcattgcgcttaagcctgcctgaagttgtgatacgcccagaagatatcaatgcacgtgcgcaggcattgtatggagcatggctgtccggcagcgtactgggttctgtagggatggctattcaccacaagctctgccatacgctgggaggaagtttcaatctgccgcatgcgcaagtccataccgtgattattcctcaggcaaccgggttcaaccagacgtatgccccgcaggcaatgcaggctatagggcgtgcgctgggggtaaaagcgcaggatgcagccgctggattgtatgatctggcaaaagcaattggtgcgcccgtggcactgaaagatatcgggatgcaggaaaaagatctggataaagcagcgaagattgccacaactgatccttattataatccgcgtccggttgactgtatggcagtcagggaattattagaaaaagcgttctgggggattcgcccagaataa

SEQ ID NO: 8738 - DNA, 780 bp, Photorhabdus luminescens
gtgagcaatacctatacatcttctgaaatgatgacggtttgtgcttcccggatgctcaaagagggtcaggtgtgttttgtggggatcggtatgcccagcgcagcggccaatctggctcgcctgacccgcacgcccgatattgtcctgatctatgaatccggcaccatcggcacgaaacctgacgttctgcctctgtccatcggtgatggggaactggcagaaacggctgatgtggtggtttcggtgcctgagatgtttcgttactggctacagggtgaacacatcgatgttggttttctcggagccgctcagattgataaatacgccaatatcaacaccacggtgattggcgattatcactcgccgacagtccgtttgcccggcgcgggcggtgcaccggaaatcagcactaactgcaaggaagtattgatcattctgaagcaaaacagccgttcttttgttgaacacatggatttcatcacctcaccaggttacctgcaaggcggagattcgcgtgaaaagcttgacctgaccaatggagggcctcgggctgtcattaccgatttggggattctggagcccgatccggtgaccaaagagctggttatgacttaccttcaccccggtgtcacgacagagcaggttctggagaatactggttggtcgttgcggatagcctcagtattaaacacgacgcaaccgcccacagaacaggaactgaaagtattacgggatctcaatgagcgtacagagcgtgcgcatacagaagtggcatcatga

SEQ ID NO: 8739 - DNA, 864 bp, Photorhabdus luminescens
atgacaaaaataatagcactgaaacaggctgtctgcgaactggtacaggacggtaatatccttgcgctggaaggatttactcacctgatcccctttgctgcgggacatgagattatccggcaacgcaaaaaagatctgacattgatccgcatgacgccggatgtgatttacgaccagcttattggcatggggtgtgccagaaagataattttctcctggggcggaaaccccggagtgggatcgctgcaccgcttgcgcgatgcggtggaaaagggctggcctcatacgctagagatcgaagagcatgcccatgcagatatggccaatgcctatgatgcgggagcggcaaatctgccgtttgccgtcctgcgtggctatctcggctctgatattcccaaatacacgacgacgattaaacagataaattgtccgtttacggggcagaggctggcagcagtacccgcgatccgtcctgatgtcacgataattcatgcccaacaggctgatagaaagggcaatgttctgttatggggcatcattggggtacagaaagaggccgtactggcggcccaaaaagtcatcgtgacggtggaagaagtggttgacgtcctcaagcccgcgatgaaccaggtagtacttcccggatgggtgattgacgcgatctgcgtgatccccggcggggcgtttccttcatatgcgcagggttactataagcgtaacaatgcgttctaccagaactgggacagcattgcccgtgaccgccaaacgttcagcgactggatggagaaacacgtactagggacggcagatttcgctgccttcaaactgagcttggagaaagagcaaaaaggagaggtagcgtga

SEQ ID NO: 8740 - DNA, 1470 bp, Photorhabdus luminescens
atgcgtatacagaacaaaatgctgataaacggtgactggatagatgcgtccgacggtcagactattgaagtcatgaatcctcatgatggctcacttattacccgggttgctgaagcaaaagaggccgatgtggattgtgcagtggctgctgcaaaagccgcctaccccgcttggggtaggttgcaggcatctgaaagaggggctttgttgctaaaactggctgataaaattgaagaacatgcagcagaactcgctcaactggaaactatggatacaggacatccgatccgcgatacgctgaatatagatgttccccgcacggcatactgtttccgctattttggtggaatggcagataaacttgaaggcagcgtaattccggtagaagaaggttttctgaactataccacacgtgagcccattggcgtggtgggtcaaatcgtcccctggaacttccctttgatgtttaccagttggaagatggcaccagctcttgctgccggtaacacgattgtgatcaagccttcggaaatcacgcctctgagtacgctgcgtattgctgaactgatgatggaagtgggctttcctcctggcgtgattaacgtggtggtgggatatgggaatagtgccggagcgagattgtcggagcatgaagatgtgggcaaaattgcttttaccggatcgacaatgaccgggcagagcattgttgccgcctcagcgggtaacctgaagaaagtacagttggagttgggcggcaaaggggccaatatcatttttgaagatgccgatctgaccaaagccgttggcggcagtgcttgggccatctttcataatcaggggcaggcgtgtattgccggatcgcgcattatcctacatgaaagtattgctgatgcttttctggagaagttcctaacgctggccggttccatccgtctgggcgatcctttgttaccggagacggaaatggggccggtgacctctttgcaacacagggagcgcgtgttggcttactgcgacgttgcccgttcacaagggtgtgagatcctgctgggcggtaagccgccagcggatcccgctcttgccaatggctgttacattgaaccaaccgtcgtcagggcgaaatattccgatcgcattgcacaggaggaggtgttcggcccctttgtgacggttattaccttcaagaatgatgaagaagcgctggcgattgccaacagcaccgaatatgggctgggttcagggctatggaccaaagacatcagccgtgctcacaggtttgcccgtgatatgcatgctggcatggtgtggatcaattgctacaagcgcgtcaacccggccagtccgtttggtggcgtggggcgttcaggctatggtcgtgagatggggtttgaagtgatgcgtgaatatactcaggtgaaatctgtgtgggtcaatgttgatgcaaaaatcccgcctttttaccagagataa

SEQ ID NO: 8741 - DNA, 852 bp, Photorhabdus luminescens
atgataccgatcgatgactacctcaaagctttgatgcgtgatattgcctggggatttttttatggcactgttgcgtttgatgatgtactgggcacgactaatcattacggtaacgtcgatttgtacatggggtcattccataaagaatggacccgtgctggccgtgattataaagagaatttcaaatctgacgagctgatggcgattttcaaagccatgatttctgactggaccaacaccgggtttgatcccttcgctgcaccgcaggaaacgggagtggcgtggggacgcaaaaatggcaatgaagatcgtttaatcgggcgtaaacgtgaagtggctaaacgcatggtgggcattccgggtgatgcgccgctgcgttcagatgataatggtcatccggttaaccgggctttcatggatgtaaatcaggagcagcccgtcgtgaaagctgaaccaggctttgaaggtgaactgcatgcgttcaacctgtttggttatctctcccgttcggatatgacctggaatccgtcagtggtttccgtggtgcgtcagagtctgttttgcccgactaccgaagagtttattcttcctattgaccacggtaatgaccgtgccgaatggttcatccagttgtctgatgaaattgcctgggatatcaaggatggcaagagcagcagcccactggcgaaagtcaccatgcgtgccggggatattgctgccatgccaggagatattcgccatcagggaatgtcgcccaagcgctccatgttactggtgtgggaaaatggttcgcctgaaatcatggacatgatcaaggatggtaccattccgatggttccggtgacattctaa

SEQ ID NO: 8742 - DNA, 501 bp, Photorhabdus luminescens
atgttagtgcaatataaaacagcattcgcatcaatcgataattatcacaaaggtgggatccaagcgctggttgaagatcccaaacgttacgttttttccaacatgtatgaaatcgcggcaaccagtgcaccctacgaccgtatcgttgctgcgatcaatttagactataccatcgagatcgctcgtgccgaagggacatcgccctggtttgcctgtgcgcacgacgaatttgtggttgctatggattatgatgttgaggtgcattttgtcaagctgactgatgaatcggtcattgatgaagataaagatggcgctgttaagctgaatggcactcccgatgggcaaaaaatgggatgtatctacctcaaacgtgggcaccaggccctcctgcctgaaaaagtggcttatcgcttccatgctgataagcctgcaactctgatgattcagtcaattctcggtgatgtctcagtccagaaatgggctgatatctgcctgaattaa

SEQ ID NO: 8743 - DNA, 771 bp, Photorhabdus luminescens
atgtcaatacctgaagagtcaaaagagttcgttacgtcactggcacgtggtctttctgtgatccaggtctttaatcgagcagcaaataagctgtctttaagtgaggtggccaagctttccgggctgagcagggcaactgcccgacgctttttatttacactcagcgtgttggggtatacagagagtgacgggaaacttttttggctgtcgccaaaagtgctgcaactggggtattcctatttagcatcacagccaatcgtgaacattgttcaaccgtttattgaacaggtcagtaacgaaaccggggaatcctgctcggtttcagtcttagatggttctgaaatcgtctatgtagccagatatatgacacatcatattatgtcagtcaatctgggaattggtacacgcctgcctgctgttgccacctctatgggacgcgttttattagcctataaaacacctgaggagcagcaagcctttctggcaaactatatactggaacgctacactccccatacgttggtagaacgtaatgcattactggggattctgacacaggtgcaggcccaaggatatgcgatagtcaatcaggagcttgaactgggcttaagatccatcgcggttcccattatgaatcaacgtgatcaggttattgcagccattaatgtatccacacagccaacacgcacatccgaatccgtattgctggaaaaaattctgcccagcctgcgtcaggccgccaaatgtatctatgaccgtctgcctgtgtga

SEQ ID NO: 8744 - DNA, 153 bp, Photorhabdus luminescens
atggcagcagactatgaaccatctaataaagaaacaacacgtttctttaagacaattcaaaacaaattacattttgcttgtacgggtatgactgctgctgaacttatcgccaaccatttttctgcttgttctgcggaaactttttcattttga

SEQ ID NO: 8745 - DNA, 648 bp, Photorhabdus luminescens
atggacgatgagcggctgaaaaatccgcctgttggttcttctgctgtaccggactatttcgatgagatgctcgaacgcatccgcgatattcgggccagcgagcgccgggtgtatttgcgggtgcgggagatctttgcattagcggctgactatcaaccgtcgttgaaagaaaccacgcagttttttcaaaccatccagaacaagttgcattttgcctgtaccggacataccgccgctgaactcattcatctgcgtgctgacgccagccagccgcacatgggcttgaccagttataaaggcaaagaggtgcgcaaatgtgatgtgacggtggcaaaaaactaccttaatcaggatgaggtcagcgaactcaatcgtgtggttaacatgtggctggattttgccgaggatcaggcccgtcgtcgtcagcaggtctttttacgcgactggcaggataagctggatcagttcctgcaatttaacgaccgcgaggttctgcaaggcgcaggtaaagtcagtaagaaaatggccgatgaaaaagcgcaggcggaatatagtcagtttgctgaacaacaccggcgcttaaaagaagccgaaggtgagaaggatatcgccggtttgctacagtggaaaacagagcctaaaaagtag

SEQ ID NO: 8746 - DNA, 834 bp, Photorhabdus luminescens
atgcaaacagaagctgaagtcttaactgaccataatgagctaatttgctcgaccagtattgaacgtatcgtcacaggacgtgatgctgcgctgagcctgatagaaattctgatccataagcttgatgatatctcacggctaacctccagcatcggtggtgatgtggcggagcattgggcgatgcgacagggccattcctttgactgctggctgatgcaaccagtagataaagcaatgccggtgattacccgcaatatcgaccgcagtatctggcgcgatctcatgctgaagtccgggatgttgacgttaatggacgctgaggcgtgtagtcagtgggctaagaacctcgaagaaggcgatcttccggcaatcagcgaagcgaatatcctgagtacgtttgagcagcttcatcacaacaaacaggaggtctttgaacgtggcatcatcaatgtgttcaggggattaagctgggactacaaaaccaataatccctgctgtttcggcaagaagatcatcatcaacaatctggtgaagcatgaccgatggggctacagcctgaactggggctggcggcgtgatcagttagccgatctggaacggatgcttcacctgctggatggtaaaaccattcccgataatcggcatgatgtttctatccggtttatggattttgtccgcgataatccacatcagcaggtcttcgaggatgatctctttatcattcgttattttcagaaaggcagcggacatatcacgtttaaacgccctgatctggtagagaagatgaatgatatcgtggcgaagcattatcctggggcgctaccagcaaaataa

SEQ ID NO: 8747 - DNA, 288 bp, Photorhabdus luminescens
gtgcttgtctggcaaactctacttacacgtctgctggagcaacattatggcctcaccctgaatgacacgccgttcagcgatgaaactgttattcaggaacatatcaacgctggtattacattggctgatgccgttaactttttggtagaaaagtacgaactggttcgtatcgacctcaggaggtttaactgtcaggagcaatcaccttatcttcgggctgtagatattttacgggcaaggcaagcaaccggccttttgcggcaaagccatcatccttcaactcgctga

SEQ ID NO: 8748 - DNA, 327 bp, Photorhabdus luminescens
atggaaaaaaacgataaccctgaatgggggcttcggtacgatttaatgcctcgctttaccgcaaggttagtacaggaaggcaatcgactacattatttagctgaccgcgccgggataactggcactttcaatgaggaagagtgccaccaactgaatgccgcatttccacactttattaaacagatggagctgatgctgctctctggtgagcttaactcccgcgatgcacaccgtgtaacgctgtaccacaacgaactgacctgtgaagcggatacgctcggtagctgtggctacgtttacatcgctatctatcccactcaacgttaa

SEQ ID NO: 8749 - DNA, 474 bp, Photorhabdus luminescens
atgtctggactaattttaactccagctttttcggtaaatgatcaacgtattattcgacgggcactgcgattgctggaaaaataccagcgccaaccgggagagcagtttcttgctgccagttatacgaaaacctggctacaactgcatctggcacggcaggagagagaagtctttgtcgtactctacctcgataatcaacatcgcctgctggaacatgaaactctatttctcggcacgattagccataccgaagcacatccccgtgaaattgtgaaatcagcactgcgccataacgcggcagcggtgattctcgcacataaccatccgtcagggattacggatgccagcaaagcagatcgcactatcactgaccggatcgtaaataccctgaatctggtggaagtacgggtactgggtcatttcattatcggtgatggcaatacgctgtcttttgctgagatgggctggctgtaa

SEQ ID NO: 8750 - DNA, 750 bp, Photorhabdus luminescens
ctgggagaactggaaaaacaatttcaggaacatggaaatatatataatagcatctacacaaatgaattcttagttaatagaatcataaagaaaacagagcactcaaaaaaccagaatgactctacacaggcaatacttttaggtacatctttaccaaaaaaagttaacacaggtttcagatgccagataccttttattgaagccattatgcccagaaggattaacaagggtaatttaaagagatttataatagatgatttgcaggggaaacttccgatgtatatgccagagatcccgccgtggataaatctggtaattattaccgaagcaaatatcacattccagaaaatgaacggaaaagaaactgctgatgtggatgtaaactactgttttctattaacgcctttatatccgcagggcggcggagaacaatattatcatctcgatctgatgaatattaaatatatgcgatttgccgaagtatttagaaaaaatggtcgttacagaaaatatttacaaatgctccatatcaatgaagcaaaaacacgtggatcaggaggctactttgttggtgtactcaatgaacctgtgcaaattaaaaagatggtagacatgcaaaaagtgtctgaagacattttcagcaatcattatattacctttgctgacaatcagattatcagcgttaagctaagaacctttccaaagcctgaagatccttttattaatgacgattcaatttctaaaaaataa

SEQ ID NO: 8751 - DNA, 1131 bp, Photorhabdus luminescens
ctgtgctttgatatttttactgaacatttctcagacattcaagatccccgtcaaagcgccaaagttgcctaccctttattcgatattttatttgcctcattgtgcgctgttctgggcggcgccgatggttggagtgagatccaagagtatattgaaggccaccatgaatggtttcttgaacataatatgttcaaggaggggatccctgttgatgacacgattgcccgacttctctcacggattaatccggaacaatttaatctttgttttatcaactggatgcgttcggttcatcaggtcactcagggggaattagtggcgattgatggtaaagttttacggggtgcctatgccccgggagaacgcggttcggctctccaccttgtgagtgcttatgcgacagccaataaaatggtcatcggccaggttaaaacccagaaaaaatctaatgaaattaccgcaatcccggaactcattaagttgttggaactgaaaggcgcgctgatttccattgatgcgatgggatgccaaacgcagatcgctcaggagattattgatgccggcgcggattatttattaagtgtgaaagacaaccaaaaacgtctccatcgtgccattcaaaaagccctggaagcccagcgcgttttgcccttaacacccgaaaaagcgcggatagaacagggtcatggtcgtctggaaatcagagaaagccatgtgctgaatgccgagacattcaaagccgattttccggaatgggcgggattaaaaaccctgggtgtcacaatcggatacaggcaagaaaacggcaaattgcccagtctggagtaccgttactacatcagttcagccagactgacagaagaacaattttctcaggcagtacgcagccattggcaaatagagaataatcttcactgggtgcttgatgtgacgtttaaggaagatgattgtcaaatttaccgtgaaaatgcggcggaaaacatcgcgatattacgacgtatttcgttaaacatgctgaaaaaagaaacgagtcaattaagcatcaaagcgaagcgtagacgaatatggatgaaaacccaatttttggagcgagtattacaggcgggttttgctaatgtgagtgatatttaa

SEQ ID NO: 8752 - DNA, 597 bp, Photorhabdus luminescens
atggataaaaatgagccaacattatggcctccataccaagtcttctatatccaatctatgttgttcaatacaacatcggctctacaggccgtggatagagcatctaagtacatccaagctatcagtgaagggaaactagggccacaagatcggaaagatgagcttctagactgtctacaaaacttcatcaatcatagtgctgctatagctcggtacttctttccatcaatgattggtggaaaaggtgagaaggttttatataagaaccgtgctgagtttcttaggcagatttttgatgtgacagaaagcagccctttgcatgataagaaacttagaaatgcaatagagcactttgatgaacgactggatatgtatcttgaaggtggaattgtaggaaatatcttcccaagtctaatcttgaacaagccagaagaaacagatgtgccgcatcacatcttcagagcctactatctaaatgatggaatttatcaagtattgggggaaagacataatgttcaacctattcttgatgaagtcatgagacttcatgaactgttggagatgtttgatgaaaatggtggaatgtttgggaaataa

SEQ ID NO: 8753 - DNA, 135 bp, Photorhabdus luminescens
atgtccaccttgacggtgattacaattgccaacatccgctacgtgccaacagcggatctcttcgccaggggtaaatccttactacaaatcgcaactacttgtgttaaaaagaagtttcaggctagttatgtgtga

SEQ ID NO: 8754 - DNA, 267 bp, Photorhabdus luminescens
atgggtagtcgtttccccgacccagaaagcgattgcaatcttcttctggcgcgagcctccaacgagaggcaagaagatttcatcggcaaccaatgcggcggtagggtatttctttttctccagactgatgatttctggcgcgactacaatgccatgaaatcaaaaggcgtagagttttctgaggaacctcgtgatgaggtatacggtacagttgtcgtatttgaggacctttacggcaatcgctgggatctttatcagaacaagtaa

SEQ ID NO: 8755 - DNA, 1617 bp, Photorhabdus luminescens
atgtccacacccatacctgccattaaacgtctcgatcatcttggccttatcgccgctttttgtcatgaagccggtttaccccgcatgattgatgccattatcccaaaatattcatcgcataccgtctctcacggcgacgcttttctggcgatgatccttaacgggctggggtttcacagccggacattgcacatgttttccggcttttttcaacataagccgattgcgcgtttaattggcgcagacattgaagctgaacaccttaatgatgatgtgctcggccgaacactggatgccttatatgaagcgggggtgtcggaagtttatcaggtgcttgctgagcaagtggttgataaattagggttaaatcccgattccgttcatttggatatcacgagttttcatgtcgatggtgactatgacagcgcgttgggagatgacacaaaacgcattgcactggtgccgggttatagccgggatcaccggcccgaactgaacccggttgtccttgaactgatttgcgaaaatcaggcaggtatccctgtctacatgcaggccatgagcgggaatacgaatgatgccaaagcctttgcccagacgatcaaaacccatattcaatgtctgaaagcggcacaaaacagccgctactttgtggccgatgccgccctttatactgaagccgcgatcgcttcgcttcatcagcaaaaacaacgatttattacgcgtgttcccctgacgatcaaggaagctaaacagtctctcctgaacgtgacagcggagcaattcagccccatcagtgagggctattcaggctgctgggtgacgtcatcgtatggcggcgttcctcagcgttggttactggtgaacagtacggcggcagaaaaacgtgaaaaccagactttccggaaaaacacactcagggaaacagaaaacgagtctaaacagttcgacaaactgggcaaaaagccctttgcctgccgggaggatgccttacaggcactgcatgattttgagtctcaatgccagtttatcggcatcgcctcgccggaaattcaggcgattaccgcgtatgcggggcgcgggaaacccggcaagcatcaaccccccaaatcggttcattatcaattagccggtcaggcttatacccggttagacaaggtgaagcaggccagattgcgggtcgggaggtttattttagcgaccaatgaacgggatgaaggacggcttgatatggcggcgttactggctaattataaggcacaacaaaaggtggagcggggttttcgcttcctgaaaagtccggaattcctgacgtctgccattttcctgaaaaaaccggagcggatagaagcgctgttaatggtgatgacatgttgtctcatggtttatgcggcgctggaacataaaattcgccatgaattgaaacaaaatgtgccgtttttccccgatatgaagaacaaaccgacacaatcccccaccgcgcgttgggtatttctggcctttgaagggatcagcacctttgaatttcaagaacataaaatggtgacaggaatgcaatcttaccaccatgagcttttgagtttattaggtgcacaatataaagcggtttattcctga

SEQ ID NO: 8756 - DNA, 3252 bp, Photorhabdus luminescens
atgaaagtacaggaagccaaattttcatctaaagaatttctaaagcgtcgtcgtccagaaaaattttctgattcaacgatccgagagacagggtctttagatagagttgtacttgaacattttctttctactctaaatacaagaaatcaagaattgcaattcgaagattttgcaaaaagaatatgtgagaaaataatttgccctaatctccttgagcagacaggccctgtagctggtggcgatggtaaaactgacacacaaacctttccagtttcggaacaaagtaagcttctttggttcgaaggagttaatgatacatcaaataaagagcgctgggcctttgcggtgagtacgcgtaaggactggaagaaaaaatgccatgaagatgtacttaagataaaagaaacagggcgcggatatactaaaatattttgtgtgacgaatcaatctgcaaagtccaatgttcgttcagaggttgaggatacactaaaaaacaaaactgggatagatgttcgtatattagatattaattggttgctagatcaaatatacaaaaaccattttgagaaattggcgattgatacactatcagttccaacgcaatataaaagagaaattatttttggggaaaatgactataagaagaataagaaatatgaagaactaatagagtatatcagagataaagtaaaccctgctgaaatttcatatgagcaagtggatattttcttagaagttgcagagttaagcgctgagcttgaaaaagcgataattgaaacacaaggtctatttgaaagagcgataaaaatctcaaaaaaatttgggacaaaccaacaattgttggatgcttattatcaatacgcttggaagtcccatttttggatggaagattttaaccttttcgaagaaaatcttcaattagcgtatgaatgtatagcatcatcaactaactcctcaaaatgggagaaagttttaaacttagtaacagtccataaaagttatattagacttaacaacgcaacatctacaatcgacattgagaatattgaacgtaatatgctcgctaaactagatgagatagctgacgatgaatcacgtcccagtaatgcactcacagcgagaactcacaaagccatttataaaatgacaacgttttcagatgtagaagatgcttcggttgtatttgaagagttacatgaaatttttaaaaatagtggaaatttaataggctatccctttgagaaaaacttccaacttttgaacgaactggatgacatctttttcgaggttgatgcatatgaaaatttattagactatatgactgagcaatccgctcttagaggcggtgaagttaaaggggcattattaaatttacgaagaggcataaagaggattcaaaatggtcacccttatcaggcaatcaagtatttaggaaaatcttttattccactctataaagaagaatcacgagataaatttatattagcattaaaagctatagcctatgcttacgaatccattgggttgctatggagttcacgttcatgcttgcttctatccgcttcgttgattacagatgactactggaagtatgatgagatatcattaaagcaggttgagatttattatggtttatgcctaacagaaataaaactaggaaaattagcacatgcccttttatggtatgaattgtttttaatagttaaccagaatatcagtgatagctcgctcggtgataaagaaaatcaacaagttgatttttacataagccagctcattttgaacactgatctaaaacaaataaatcgacagatcaatatccctgatgaacttgatagattggatctttttgtatcatcgggatgtcttaaatatgctttaggttatattgaagagtttgagcgtgagtacgaagttactgccgataatgataataatgattttttgcaaaaaatacgtgactttgatgcaggatttaatagtaaaggtataaaagataaccatgacaaacgtggagtacatacatcttttatttttggatgcgccatagaaattaactttccgaatcggtcaccatttatagagttttcaactaatgtcttatcacttttagagagtgcttttgcaacttgtacgattgataacatccatctgaaagaagcatttttaaatattgaagtaatagcagatgacgaagatgacttatccttatcacatgaaataaatagcaatagtggaaaactaaaccttacaataaattgcgctggttttgatacaagtgattttagaatcgaagctcaacaaaaaatcaccaatgaattcaagaaaatagtatttgatcttctccctgaattattttttataaaaaatacagaatacattgaaaaaatgatcttcgaagatgcagcattcgacagagcaattagtttcggtgcctgtatcaaagctattgaaaatgttcttggaaatgatattgatcaaaaaattaagaaaatttattccactagtgctgaaaagaaaacttacccccttctaagagataaatcctgggatagtgaatttcctaaagtgttggagatcgaggatataaatgatccaatatttggaaaaggaaaaatgcctgaagaggaacttaatgctgaaaatataacacataaagattattccatacaaagtctaatcaaacctcgtctgtgggatagaacacgctggaaaggggtgggcttcgttcaagtcaaaacatgtcacccaggattatatcttttatttaaagactccagtgtgggtgaagatatttttaaagatcttatatcatcagtaggcttgttagatactaaagccagattacgggtttgtattgtcaagggtatttcagttaaaaacccaactcattatagagtactcatatctgaaaatatgaagacaaccccacggactaaaagaatgacaatgatcagtagaattaatacgatgactcccgatagcaatgtcaatttggaaagatttattgctgcgtatcatgcctgtggaaaattctatctaggatgtgatgcgatgttaaaaaatattaatcctgaacatccacaaaaagatagtttaggtatagaaatgagtacgttagacgttcggtgggcttgggaaattggattaaatgatgttgattgtattggggttaatttagaagaagatgacccctatattcctaatgatgtaactgacgtcccattattgaatttaataaacagtaaatag

SEQ ID NO: 8757 - DNA, 1215 bp, Photorhabdus luminescens
atgaagctaacagtcagacaaatcgacacagccaagcccaaagagaagccgtacaaactatctgatggtggaggcctctaccttgaagtaaccaccaacggctcacgctactggcgtttaaagtatcgttatgcgggtaaagaaaagtgccttgctttcggcgtttatcctgaggtttctctcgctcaagcccgtgaaaagcgtgaagctgcgaaaaagttactatctgctggaagcgatctcggagagctaaagaaagcagagaaaattgctcaaaaactcaactatgataataccttcgaagctattgcccgtgaatggcatcagctgagagcggatcgttggtcattacgttatcgtgatgaaattattgatacctttgaaaaggatattttcccctacatcggtaagcgtcccatagctgaaattaagcccatggaattgctggaaacccttcgtcgtatggaaaagcgtggtgcattagaaaagatgcgcaaagtcagacggcgctgcggtgaagtattccgtcatgcaatcgtgaccggacgcgctgaatacaatcctgcacccgatctcgctacagccctcgcaacaccaaagaaaacgcattttcctttcctgactgctgaagaactccctcactttcttaaagatctggccggttatactggaagcgttattaccaagactgcaacacaaatcatcatgcttacaggggtacgaactcaggaattacgttttgcccgctgggaggatatcaattttgaaaagcggctctgggagatccctgctgaagtgatgaagatgaaacgaccacacatcgttccgatgtcggatcaggttgtcgagctctttgagtcacttaagcctattactgggctatacccgctggtattcgtcggacgcaatgatcgaacgaagccgatctcaaaggaaagcgttaatcaggtgattgagttgttggggtataaaggaaggctgacggggcatggtttccgccacacgatgagtaccattcttcatgaagaaggctttaactccgcgtggatagaaacgcagctagcgcatgtggataagaacgcgatacgtgggacttacaaccatgcccagtatttggaggggcgtagggagatgatgcagtggtatagtgattacatagttagcttgcctgaagataatacatcactggtgttttattcaaaaaaagtagtatga

SEQ ID NO: 8758 - DNA, 2043 bp, Photorhabdus luminescens
atgactaacccgttactcgttccatcaggtttaccaaaattttcttctattaaaccagaacatgttgttccggctgtaaaggaagtcattgccaattatcgccaaaccgtcgaaaaaatattggccgagaataccgtttttacctgggataatctgtgtcaaccactggccgaagcaggtgataaacagtcccgtgcatggtcacctgtcaatcatctgaattcggttaaaaacagcccagaattacgcgccgtctatgaagaaagtttgccattactgtccgaattcagtacctggttaggtcagcacaagggattatatcaagcgtataagtcattacgtgaaagtgctgagtttgagaagctctctgtgcctcaacgcaaagttgtcgaaaatgcactgcgtgattttaaactatccggtattggtctgcccgaagagaagcagaaacgttatggcgagattagcgcacgtttgtcagatttaagttcgcaattcaacaataatgtgctcgatgccactatgggctggaccaaattaattactaatgtgaaagatctgtctggtctgcctgaaagcgcgattgccgccgctaaagctcaagcagaagctaaaggtcaaaaaggctggctactgactttagaagcaccaagctaccagccagttatcacttatgcagataaccgtgaactgcgtcgggaaatttaccacgcctacaatacccgcgcatccgatcaaggcccaaatgcaggtaaatgggataacagcgaagtaatcgccgaaatccttgcgctgcgtcacgaacaggctcaattgcttggtttcaaaaattatgctgaacaatcccttgcaaccaagatggcaaaaacccctaaggaagtgttggattttctgaatgatttgacaaaacgcgcacatccacagggcgaagaagaagtagatgagttaaaaggttttgctaaatggcatcattgtgcccacaagctagaagcttgggatatggcttactatggcgaaaaacaaaaacagtacgagttctctatcaatgatgagcagttacgtccttatttccctgaacaaaaggctgttgaaggattattcgaagttgttcgccgtatctatggtattactgccaaagagcgccatgatgtagaaacctggcatacggatgtccgtttctttgatctgtacgatgacaccaatgagctgcgcggtagcttctatatggatctgtacgcacgcgagaataaacgtggtggcgcttggatggatgagtgtatcagcaaaatgcgtcgttccaacggcgaactgcaaaaacctgtcgcttatctgaattgcaatttcaacaaacctgttggtaataaacccgcgctattcacccacaatgaagtcaatacgctgttccacgagtttggtcactgtctacacctgatgctgactcagattgaaactgccggtgtctccggtaccaatggtgtaccgtgggatgcggtcgaaatgccaagccaattcatggaaaactggtgctgggagccagaagcactggcattcatctctggtcactacgagactaaagaacctctaccacaagccctgctggataatctgttagcagccaaaaactatcaggctgctatgcggatcttgcgtcaacttgagtttggtcagttcgatttccgtctgcatgttaactacgatccaaagaaaggcgctcaaaccatgaagaccttaaaggaagtgaagaaattggtctcggtagtgccttcacctgaatggggccgtttcccacactcattcacccacatcttctctggcggttatgctgctggctactacagttatctgtgggctgatgtgttggcagccgatgcttactctcgcttcgaggaagaaggcatttttaaccgcgaaaccggacaatctttccttgataacattttgtcccgtggtggttccgaagagccaatggagctgttcaaacgcttccgtggccgtgaaccaaaactggatgcaatgctgcgcaaggccggtattaaagggtaa

SEQ ID NO: 8759 - DNA, 744 bp, Photorhabdus luminescens
gtgggaatctgtttaatctgtgaacaaggcgctgataacagcgccttatctcaactcgcggagcgctgggggttggtgcatgacgaaaacgctattatggcgttggtccttactcctcagcaccttgaacttcgcaaacgggatgaaccaaagctaggtggcatctatgtcgattttgtatcaggtacaatggcacatcgccgccgctttggcggcggacgcggcgaagcagtcgctaaggccatagggatcaaaaaagattatctgccaacaatcgtggatgctaccgcaggtctagggcgagatgcctttgtactggcatcattgggttgtcatgtaagaatgctggaacgccatccggtggtcgcagcattgctggatgatgggctgcaacgcggttatcaggatgaagaaattggtggctggttgcaacaacgcatgacactgctccatgcctccagcattacagcgttggccgatattacgccacaacccgatgtcgtttatcttgatcctatgtatccacataagcagaaaagtgcactggtgaaaaaagagatgcgagtgttccaatctctggttggcgctgatgaagatgctgatagtttgctatcccctgcacgcgttttggcaaaacgccgcgtcgtggtaaagcggcctgattatgcagaacccttagctggagtcgctgcatcagcagctatcaccacgaaaaaccaccgttttgacatttatccttgttaa

SEQ ID NO: 8760 - DNA, 1344 bp, Photorhabdus luminescens
atgagctgtttactatctttgtcttcatttcttggatcgattcaacgcagggatgaatatcaaccagaatatctccaggctgttcgggaagtattcacctctctttggccgtttcttgaacaaaacccgaaataccgtgaatacagcttactggagcgtatggtggagccagaaagggttatccagttccgggtttgttgggtagatgatcaaggtaaagttcaggtaaaccgtgcatggcgagtgcagttcagctcagccattgggccatataaaggtggtatgcgttttcatccatcggtgaacctctctattctgaaattcttgggctttgaacaaaccttgaaaaatgcactgacaaccttaccaatgggtggtggtaaaggcggttcagattttgatcctaaaggaaaaagtcagggcgaggttatgcgtttttgtcaggcattaatgacagaattgtaccgtcatttggggccagatactgatgttcccgcaggtgatattggtgtgggtggccgtgaagtggctttcatgtcagggatgatgaaaaagctttctaacaacacggcttgtgtatttaccggcaaaggtctctcttttggcggtagtttgattcgcccggaagcaaccggttatggtctggtctatttcgtcaatgccatgttgaaacgtcatggcatggggtttgaaggtatgcgcgtatcggtttccggtgctggtaatgtcgcgcaatatacgattgaaaaatgcatggcattgggagcgaaagtggtcaccgcttcggattccggcggtaccttagttgatgaggatgggttcacaccagagaaactgactcatcttgaagagataaaaaaccaacgctatggccgagtggaagaatatgccagagagcggggtctgactttcttgaaagggttacaaccgtggtctgtaccggttgatatcgctttgccatgtgccacccagaatgagctggatttggatgcggctaaggtccttatcaagaatggtgttaaagctgttgctgaaggggcgaatatgccagcaactatttcagcgacggaagcctttattgaagcaggtgtgctatttgcaccaggtaaagcagccaatgcgggtggcgtggcaacatctggtctggaaatggcacaaaatgcggcccgtttaggctggaaggctgaaaaagtggatgcacgtttgcatcatatcatgctagatattcaccacgcttgtgttgagtatggtggcgagggcaaacagatcaattatgttcagggggcgaatatcgctggatttgtgaaagttgccgacgctatgcttgctcaaggtattctgtag

SEQ ID NO: 8761 - DNA, 432 bp, Photorhabdus luminescens
atggcttacaaacatattcttgttgcggttgatttatccccggaaagtcaggttttggtgagaaaagctgtttctatggctaaaccggacaatgccaaagtttccctgatccatgttgatgttaactattccgatctctacaccggtttgattgatgttaatctcggtgatatgcagcaacgtatttctgaggagacccgcagtgcgctgaaagctctctcggcagattcagcctatgacattcaggaaaccctgagtggtagcggtgatctggggcaagtactcgttgatgcaattaagaaatatggcatagatatggttgtttgcggtcatcatcaggatttctggagcaaattgatgtcttctgctcgtcagttaattaacacggtgcatgttgatatgctgattgttcctctgcgtgatgatgaatga

SEQ ID NO: 8762 - DNA, 207 bp, Photorhabdus luminescens
ctggtggaaaaacgtcataaacactcatctagtcagttctatccaaccatgcaatcccagagagaccggttagttgttcgcgtaaatctattgagtttcaaggaaggctataaattcagagtaggattttgttatccatcaagtagcaggaagagcaattgtggtatatgttgtttgtttggtggatgttctttgctcagtcgttaa

SEQ ID NO: 8763 - DNA, 336 bp, Photorhabdus luminescens
atgttcagtacaatcgcactgttttgggcactgtgtcttgtctgcattatcaatatgatgcgctacttctcttcactacgagcattgctgtccattcttcgtcaatctgatcccttgctttatcaatcagtagacggtaacggctttttcactacacatgggcaacttaataagcaaatacggctagtaaactatatcaattcacaacgttaccttgatcaccatgatccagaagttgttcttcgttgtgaaaggttgagaaaacaatttattttgaccagctcactgagtggattagttgttatttgcctgatttctatgttgatttggtattaa

SEQ ID NO: 8764 - DNA, 1491 bp, Photorhabdus luminescens
atgctacatctttttactggcctggattttcacaccagcctaatgttagtactggcactactgtttgtgctattttatgaagccattaatggctttcatgataccgcgaatgcggtagcaacagttatttatacccgtgctatgcgagcacagttcgccgttgttatggctggggtatttaacttctttggtgttcttcttggtggattaagtgtcgcttacgcgattgtacatttacttccaaccgatcttcttcttaatgtcagttctgctcatggccttgctatggtgttttccatgttgctggctgcgattgtctggaaccttgggacctggtatttcggtttacctgcatccagttctcataccctgattggttctatcattggtatcggtttgaccaatgcgatcgtaaccggttcttctgtggttgatgcgttgaatgtgccgaagatgatacagattttcctgtcgttgatcctctctcctttaatcggattgatcattgcgggggcaatcgtgtttctactgcgccgttactggagtagcaccaagaaacgtaaacgtattcatctgactcccgctgaacgtgaaaagaaggatggtaagcgtaaacctcctttctggacacggactgcgctgattttatctgcggtaggtgtaagcttctctcatggggcgaatgatggtcagaaaggtatcggtctgattatgctggtgctaattggtgtagctccagcgggatttgtcgtaaacatgaatgctaatggttatgacattgcccgtacctacgatgccattactcacttgcagcaatattatcagcagcatggtgcagcgttatcccatgcaattgaactgacgccatcggtcgttgttgcggaagatgaaccggaagggcgattccattgtgatattacgcgtgctgtcgttgttcttgaccagacagaaagcctattaaaaggcattcagagctacagtgagctgaatgctgaacagcgtaacaatatgcgccgcatgttgatgtgtattgctgatacggctgagtctctggctaaactgccggaaacccgtgctgaagacgcccgtttcctgaataaattgcggaaagacttattacacaccgttgagtatgcaccagtctggatcatcattgcggtagcactggctctgtctttggggacactggttggttggaaacgtgttgcagtcactattggtgagaagattggtaaaaaaggtatgacctacgcacagggtgtttcagctcagatgactgctgctgtttcaatcggtgtggcgagttataccgggatgccagtttcaactacacaggttctttcctctgcggtagcggggacgatgttggttgatggcggtggtgttcagggtaaaactatccagaatatcatgttggcttggatactgacgctgccggtttcaatcgggttgtctggtacgctttactggttcgctttgaaactgatttaa

SEQ ID NO: 8765 - DNA, 1185 bp, Photorhabdus luminescens
gtggaaaaatttgatgcggtgattattggtgctggtgcagcaggtttgttctgtgcagctcaggctggacagctcggtttacggatactcgttctggataatggtaaaaaagccgggcgtaagattttgatgtccggtggtggacgttgcaacttcactaatatgtacacagaaccatcagcttatctttctactaacccccatttttgtaaatctgctctagcccgttatacacaatgggattttatcgaactggttcagcgtcatggcattgctcaccatgaaaaaacactggggcagcttttttgtgatgattccgcccaacagatagttgacatgttactgaaagagtgtgaagccggtcaggtcactattcgcctgcgcagcgaagttagccaggtagaaaaaaatgagcaaggttttgttatcatcgttaacggaaaagaagtaagtacacgctcacttgtcattgcttccgggggattatctatgcctggtcttggagcaacgccttttggttatcggattgcagaacagttcggcatgaaagtcttgccaacccgcgccgcccttgtaccttttactctgcataaaccactactggagcaacttcatatgctctctggtgtgtccgttcccgccattgtcactgccgaaaatggcgttctgttcaaagaaaatatcctgtttactcaccgaggactctctggtccagcaatcttacaaatttccagttactggcaatcaggagagtttgtaagtattaacttacttccagatagtgatctggaagcccttctggagaaagagcggagttctcacccaaaccaaagcgtaaaaaatgctttggcaaaattattaccaaagcggctgacagaatgcctgcaagcgctcggtcaaatcccagatattgctcttaaacaactaaccccaaatcagcaaaaacagttggcggtaaacctccaatcatggcgggtacaacccaacggtacggaaggctatcgtacagccgaagtgacgatgggcggtattgatactcatcagctttcatctaaaacgatggaagctaatcaggtaaaaggactctactttattggtgaggtagtggacgtcaccggctggcttggtggctataacttccagtgggcatggagttccgcctgggcatgtgcgcaggcgttgtga

SEQ ID NO: 8766 - DNA, 1212 bp, Photorhabdus luminescens
atggcatctctattcagattatctttattaaaacatttacctcccccaatttttatcatgttactggggacactgttaacaagagccgcctattttatggtttggccttttttagcgatgatcctttatcggcagtttaacatgtcagcgacagggattggcggattattggcgctatcaagtatcttaggctcagtgacaggcatttatactggatatttatctgatattttttgccgcagaacaataatgcttatcggggtgatgataagcattatttcgttcatcatgatgtccttctcatcttcacctatcttatatttaatcgctatatccggaattagtattggtcgtgctttgttagaagcgtgtagtaaagccttaattggcgattatattgactctcctaaagaaagagagtcaatccaatactatcgatattatttgatcaatgttggcgctgcaattggtccttatattggattagcttctggtctatcggcacagagagaaacttttctaattacagctattgtttattttgtttatggtattatgttgcgtgtctttttattatcttcaaaaaaggaagagaaaataaaaaaagtcagcaatgacattagctttacaaaaacattgaacataattatttctcaccgagcattcgtgatacttctattatgtaatgttcttgttatgtttgtttatgctaactttgattctacgcttgttcagtatttatctagatcaaatatcaacaatgttaccaattttattgctttattagttattgtcaactcattgacaattatcactttgcaaatcccaactttaattttattaagaaattttacaccaagaataaaaatattaattggtatcgtgttaattgccatagctcaaatcatttttgcgttctcacctattaatacagtttattatctctgtgtcgcaactgtcattctgagttttggggaaatagttgccatacctacgtttaatgtcgaagttgataggctcactcctcaccatttaagaggagctttttttggtgcttctaatatgtcaagtatcggagcagctttagcacctatttacggagggatcatgcttgatttatttaatgctactctactgttttcattattatccctaattagcttgataactctattgatttattatacttttttaattaaaaaaaataattaa

SEQ ID NO: 8767 - DNA, 1194 bp, Photorhabdus luminescens
ttggtaatagaaaaaaaaccatccggttcgattgagttaaaaaaagcaaaagagctgggcgcttatattatattcattggatcaaggaagtactataataaagtatctgataatgatttactctatattgatgaattcttcgaagcagatactaatgacgatgaacttgttataaatatggttgagtatatcaatgctaagaaaaaaatacagggtgttattacatttatggagttctatgttccccttgtggctaaggtagcagaaacattaggtcttaaaggaataacatatgaaaatgcattgagagcgagaaacaaacacctaatgagagagtcttttaggcaaaaaaatgttcctatccctaaatacgctctaatttcgaatattgacagcgcaaaaatagaagcagccaaaattgggtatccaaacattataaaacctattaacatggccggaagtcgaggtgttttacgtaatgataatgtcatcgaattggaaaggaatttccgtgaagtctgtgaaataactcctccatttggagtaaaaaaatcttctttatttttgatagaagaatatctagaaggacaagaatacagtattgaatctatttcctttaatggtgttgtgaacattgtcacaattactaaaaaatacgtatcaagtaatggttattttgttgaattagggcatacattgcctgctaatataccattacaacaaaaaatcgaaatagaaaaagtggtaactcaagccttgttcgcgttaggtatttataatgggggaggacataccgaggttaaggtaacaagtgatggtgtcaaagtcattgaagtaggagctcggttaggaggagatcatattcctgaattagtggaaatggctactggtattgatatgtggaaagcagttatccaagtttcgttaaatatttcacctgacttgagtaagaagttcagtaaatatgccgctatttcttatatcacagcaccttctggcattgttaaaaaggtaaattacataaagaatggctttatccattttgatgttaacgttggagaacatattgagtcactgaaaaatagttctcaacgattagaatatgctattgcgtgtggtgtaacagcggaacaggctgaatttgaaagtcaccaccttaaagaaaatattattatagaaatagcgtcagagtaa

SEQ ID NO: 8768 - DNA, 99 bp, Photorhabdus luminescens
ctgaaagcagagtgtggtaatcggttcgagcgtttttcccatcccaaaacggttgttggtggcttgtcacattttgatgaggaagctatcaggcactga

SEQ ID NO: 8769 - DNA, 474 bp, Photorhabdus luminescens
gtgaataagaaattaactttgcccaatagctttgccgtttccgtatttctggctgtgttggctgcatgcctgaatcttatattatggcgcgctgatatattagaaatggcacatagcatcccgctgaaggggttaatgattatttggtatattttgggatggggttttgctccgggctgcctgaccgtgctcaccatcaattcaatcagaggaagattacctcggagggtgggtgcggtggtcgtcacgcttataagctttctgttggttacagggatttgcggtttggtttatgcctacctgacaaactctgtttttatgcaaattgctatgggaggagaagctcatcatcattcctcggtaaatcacggaactattcttggttttattacgcaactactgcccagtttatgtgcaacggttatctctatcgtgaatgctttttcgataaaaatgggaaagcagtttaggtga

SEQ ID NO: 8770 - DNA, 498 bp, Photorhabdus luminescens
atgtctactcgaatcgtgaatgaacgagatccgcaatatgtggtggcagaaggtgagaaacgagctatacgcacgattaagctatttatttctttgggctttatcgcagagtctggatttcttttaatggggcttattttgtttcccgataatggccctttggtatggcgtctcgtatgggcgcttggtttatgtggtattggcatgggggccgccgttggggggttgacttacttggtatcagcacgtttcacgcctggaagtaccggcgcttatatcatgaccgcagtaagtagcactctgttattcagtgtttgccaaacactttgttggggcttggaccacaacgtggggctgaattattggggttcaatagaaatgccgttgctattcctgattaaaggatatactgccgcacttatcgctggcattttgggcagctttcttcttaactcagtaactggtgcgagatttcttgctcgtctcaaggtcttttag

SEQ ID NO: 8771 - DNA, 876 bp, Photorhabdus luminescens
atgaataaatccgagcaaaaatttaatatcaacgaaagtgtcatcaacgtagatggaaaagaggtaaagttcttcacatcccaacctctcgatccaaataagaataacgccaagagaaatcctatcgtcctggtacatggcactggcggcagcacagagatacatttcggttatctctttcaactgcttgcctcggaaaatcaaattatatccctggatttttctcaaccagtaaaaacaaacgaaacgcttacctttgaacatcttgaaaaacaggtcgaagccgttattgaagcagcagcgttgggagagactgtcacactgataggttactcgctgggagctgttattactgcttctgttgccgctaagcgtccggatctggttcgtaatttagttctgatcgcagggtggatgaaaacagatttacagttagagcgatttttatctgtctggcgtcagttatatgagatccaatcaccagctattgcagactttgtaatgttttgcgctttcagcgatgccagccatgcaaatatgtctccagatcagtttgcaatcagctttgaaaatgccataccagaggaatttgaagcattacaaatggaccttaatggccgggttgatatcactcaaattgttcctacgataaaagccacaacactgattattggctgtacgcatgatcaaatgacgcccatccgccacagcaaagcgctgtttgctgcaattcaggatgcacgctttgcagagatagcgtgtggacatgcagtcgtttatgaacgtcctgcgcagttggcacaaattattgaccaattctgcgcgaacccttcgttttatcctgctggaaccataatcccttcagacctgccataa

SEQ ID NO: 8772 - DNA, 471 bp, Photorhabdus luminescens
atgacacaatctcaatactcccaaactccccggctggcccttactgatgctatcatcgacgccaaggcacgcaagaatttgacgttcgaggatattgcacaaggaaccggtctgagtctcgcattcgtcactgctgcactactcggccagcacccattgcctgccgatgctgcgagggttgtggttgaccgacttgaacttgaagaagatgccttctttctgctgcaaactatccctgtacgcggcagtatccccggtggtataccgactgatccgactatttaccgattctatgaaatggtgcaggtttatggctcaacgcttaaggcgcttgtccacgagcagtttggtgatggcattatcagtgcgattgactttaaacttgatatcaaaaaagtcgatgatcctaatggtggttcacgagctgtaattacgctagatgggaaatatttgccgactaagccattctaa

SEQ ID NO: 8773 - DNA, 660 bp, Photorhabdus luminescens
atgcaggatattattgaaggctttttacaattccagcgcgaggtatttccaaagcgttgcgagcttttcaagcggcttgccaccagccaaaatccgcgtactttgtttatcacgtgctccgacagccgtgtggttccagagcttctgactcagagtgagccaggtgatctgttcgtgatacgcaatgcgggtaacatcgttccgtcgtacggtgcagaatctggcggtgtttccgctaccgttgagtatgcggtcgctgtgcttggagtcaccgacattgtgatctgcggacattcagattgtggtgccatgaccacaattgcaagctgtaaatgtatgaatcacctgcccgcgattacaagctggttacgctatgcggattgtgcgaaagcgattagtcaggcacgtgtgcacgttaacgagactgctcaaattgattcgatggtgcgtgaaaacgtaatcgctcaaattgctaatatcaaaacccacccgtccgtggcactcgggctggaacagaggcacttgaatctacatggctggatttacgacatagaggctggttcgatcgatgctttagacggcttggccggtcaatttgtttcccttgcggactatccgcatgtttctgcaacgcaatccgtgtttcaccacggcatttaa

SEQ ID NO: 8774 - DNA, 903 bp, Photorhabdus luminescens
atgctgctacgacacattcgttatctgctggcagttgccgaacaccagaacttcacccgcgccgcagaagaacttcatgtctcgcaaccgaccctatcgcaacaaatcagacaacttgaagagtcactgcacgtgcaactgttcgaccgctctggaaggagtgtgcgactcaccgatgctggcgaggtatacacaagttacgcccgtcgtgcattgcaggatctggatgcggggcaacgtgcgattcatgatgtgcaggatttaagccgcggattgctcaggctagcaatgacacccaccttcaccacttacttcatcggccattgggtagaacgtttcaacgcactctatccaggaatttcgttgaatatcaaggaaatgacacaagaccagatagagatctctttagcggagaatcaactcgatctcggcatcgcgttctcagacgtacgttcccccgacattgatagcgaaccattgttcatcgaaacacttagcctgatcgttggtcaatcgcatcgatttattggtcaacaaacatcattgacggcgaaaatgttggaacatgaagggctagcgctactaagtaaagactttgcaacgcgaagccatattgatttgtacttccagaaacaggggatcaccccacgcattgcaattgaggccaactccatcagtgcaatcgtagaaattgtccgtcgagggcgactcgcaactctgttacctgatgtcatcgcccacgaacagaccgggctctattccattgcaattcaacctacgttaccgcaacgcaatgcagtactgttgtggcgccgtggtgcatatcgaagcgcggcaagccaagcgtttgccaatctcatcacacaccatttcgatgtacaccaagaaagtgacgatttttga

SEQ ID NO: 8775 - DNA, 1176 bp, Photorhabdus luminescens
gtgcgttgggggttattgccatcacaagttaagagcatcattaggcaacgtgagtgggataacctttcctcactaaaatcccggttactgggcatcaaggcattccctattcgcgttggcttgaaaccgcccaaagggaattctgccatattagatatagctcattttcaacggtttattgatgagtggaaatcatttccccatcaagatcttgtagagtggtcttccaaaaatttcagggagctatctgaacagcgcattccaacttttgttgtcattgaatcgatgcaatgtctgattcaatttttagggaatgatgccctttcccgaagtaaggtgtgggaaagaaatatgaagccatttttgcgggttgataaagatctctatcctgcattggttaagtgcatagatattgtggaaaaactctcgttgagggatgcggaattattagcaaaattgttgccacaattaaagcaaggcttaggggaagggcaatatctaagagcactgccactcattggaattgatactaagtttcttgagaaccaccaaatcctgatcgaagagctggccgatatcattcacaagggagctgtttcggcatcaggtggtcttatcgcttggttgggatgttcaataaatcctaaaggctggttaactatcaggccgctttgccgtgctgcaactgttgcgcttgggggaatgccgatactacaaatacctagcgaattacttagaaggcatgaacttccggcatcgaatatattaatagttgaaaacttacagtctggtttagcattacccgaaatgtctgacacgatagcggtgatcggcggggggaaaaacattgcttggatggatgcagcttggttgaaaggtaagcgtgtagggtattggggagatattgatacttggggtttatctattctcagtgatgccagaaacaagtttatggatattgagcctctgatgatggatgttaaaactgttaaagctcatgaagatagaatggttcctgaaccaaatccagttgaatctaatcctacattgctaaatgaggatgaagcaaagttgtttaatgatctcatttctggccggttccaatcttcacgtttagagcaggagcgcctttcatctgattacattagaaacaagcttacgaattggctgtcctaa

SEQ ID NO: 8776 - DNA, 3402 bp, Photorhabdus luminescens
atgaaaatgactgatcaaactctttcggctaattcattatttcacgttggtcaaatcagattagctgaactctcagtgtataactgggggtcatttaatggcttgcataccgcgttgatcgatcctatgggaacgctggtcactggagataatggtgccggaaaatcgacatttattgatggccttatggctttgctgcttcctgccggaaaggcaacttttaatgtggctgcggcgcagggtgatcgttctgaccggactttactttcctatatgcggggaagttttggatctgcccatgacggagcggggacgagagtcagaagtaagcgtgaatttggcgtggtgactgggcttagggctttgtatcagggtgatgatgggtcaaaaattacgcttgcggcgcttttctggattactaaatcgacgaatgtgcttgcggatgtgacacgcgtttatgttgttgccaaaagagatctgactcttaaggaaatgcttaatgcttttgggaacggtaatgcccgggcattcaagcaatggcttcgtgatgatccgacgattacgtgctgtgatgataatttttctgattatcaggagttgtaccgaaagctcctgtatatggacaataagaatgcgcctgcactgttatcgcgggcgttaggtctgaaaaaaattgatgatttaaccgggttgattcgtgaattagtactggaaccgagtacggtcaaggatgatgctaaaaaggtcgtggaagagtttgctgatctggtggcaattcatagtcaattagtggatgcaagagcacaaaaggtgcacttatccaggttacctgaactcaactcaattatcgaaaaaacaaccaaagaatttgcggagctaatggctgagaaaaatagtctcccggtctactttggtgagatttttgcacaattgtggagtgaaaaaattactgatattgaggctgaactggaagcgctacttctaaaaattagccaagttgaagggcagaaagtggatgcgaataagctggttgagcgaaggcacgaggagtaccttcaatttggtggggataaaatagagtcgctaagaaaggaagttgatcatacccaaactcagttgaatcgggtggttagaaattcatctcaatatcaaactcatgccaacgaactggctctcccttctgtattagaggaggcggtatttctcaaaaatcaatccaccgcatcaactcggcttgccagtattcagcaagaagaaggagagtatcaggacaggtttgccaccatcagtgctaaattcagtgagctacaagccaatatccatgatatctctcaagaaattcgggaaatcgaggcaagacccgattccaatattgatgtgaaatatcagcaattgcgagatgaactggttaattctttagaattaagtaaagagcaatgtgtatttatcggtgagcttatcgatgtcgaagatcgtgaaaagagctggcagggcgcgatagagagggcgttaggcgggttacgaacaacacttgctgtgccacatcattgttattcaatggtgactcgttggttaaacgctcggcatacgggtttacatgtccgtgttcaagttgtgaataattctacaactcaaggccaatcggtggtgtttaagtctgatggttatctaaggaaactggtttggcgcactcacccttatcgagagtggctcaagcaccatttgcaacgatttgacctgcaatgtgtttcaagcacggaagaattggatcaaaccccgttttcgatgacacaacaggggttaatgcacatggataaagggcgctttgagaaaaaagatcagtaccgaatagatgacagaagacgctggtgtctgggtttttcaaacaaatcacgtttagccattctgaataacgataaaaaagagttaactctgcaattggcggaaaccgagaaaaaggtgagtcaggcccgtcaagatttgaattctgtttctgatcgtaaaattctttgggagaagatccaaggttaccgctgggatgatattaatgctccttactggcacgaaaagctttctgatttgcaggttgaccttaagatgttggaacagtcaggtggtgatcttgataaggccagagagcgttgggagtcggctaaagagcagctagttcaaattcaatcggtattaaatcagctcaactctgattctggtggcgttaaaaatacgctgaaaaatgcaaaagaagaatggagcaaagcgcaggcaaaagcgtcgaaaggattacctgattcagccagacaattacttgcgattcgggttggcgtgcttaatacaaacgatttaggccggatgtctgaattggtgttgaaagttgaagaagatttagaacgtctgttagatattagccgaaacagtaaagacaaagcagaaagattagccattagcattatggtctcattcagatctaacgataaatggcaagtcttcacggttgactggcaaagtaatattggtggcttacctgattatcttaatcatttacgacaactggaagaggaagggcttcccaaccttgtggagcagtttattgaacgtttgaataagcatgcaacgcagtcactagcgcggattaaaactaagcttgaatctgaacgggaagatatccttgagcggattgatattattaaccgggtcctcaagcgtacagagtttcgatcagggacacatttaaagctaggttcaaagagagagaaatttccgcatgttaatgagtttgaacagcatttgcgtaaggtgctgagtcaggtaaccagtgatgaccatgaagcacggttccgtcaattggctaaagtagttgaaatacttggcaaagcgagtgcccctggctcctcaaatacattggaaagtttaaggctgcttgatcctcgttatcagatgtcattttatgccgaagagttggatagtaataccggtgagattcgggatgtcttggagtcatctagtggaaagtccggtggcgagaaagagtcgtttgcggcgactattgtcgcggcaagtttggcctatgttttgacgccggatggctatgatcgaccggtttactgtactgttttcttggatgaagcattctcaaatacggctgaaacagtaagtcggcgggtgctccgagtatttagggagctccatattcacgttaatttgattacgccttataagaacttgaatctggcaagagaatctgctcgttcactgctcattgcggaaagagaccaggaaaaccatgacagccatttatgtgaagtgacttgggaagagattgaccggagaatgggcgaagagaaggagaaaaagttgcctgatgaggcggctgatttgggtattgagtttgagaaactgacatga

SEQ ID NO: 8777 - DNA, 894 bp, Photorhabdus luminescens
atggtaggtaaaaagttgaataaagataatggtgccctcgctacccttggtaagtctgattccaatcctcaggaagaacagaagacagggttcttcgatcagttgataaaacaccatactcaatcagagtatgacccgcttacagatacagccggcgttgaatctgatgttgctttttcgattgtcaatcaaagcccatcctgtgaggctgatgatgtattagtcagtaagcacgctgaaaactcaaacagtgatatgccgcctgatgcgcgccgggtgctggttagcttgctgcgtcaaggtgttattttgtcttcgcagaaagctaaattgtttgaattactttgtcgataccaatctgctgtacgcaaacatctgtcagaagtctatttgaggttagttttagatgaaaaagcaggtgtcgcctttatcgctggctttcagaatgaggaagatactgaatcattgggtatagatgatgaagaggttgtctctctgattagccgaaggacgctctctttatacgataccttgttgctgttagtgctgcgtaaacactaccaggaccgggaaacttcgggagagcaaagggttatcattgatattgaacgtatagaatctcatctgacaccgtttttaccgctgacaaacagcacgaaatctgaccgaagaaaactcaagggcgctcttgataaaatggtgacgaaaaaaatattgagttcggtccggggaagcgaggatcgcttcgagattacgccggtgatccgctatgtagtcagcgctgaatttctcgaaagcatgcttaatgaatacctgaaaatggcgggagagaagggtattgagctaaataaaaatggcagcgacgctgttgattatcaagatgaagaggaatag

SEQ ID NO: 8778 - DNA, 1461 bp, Photorhabdus luminescens
ttgaatttccaagggttacaggcaaagtaccgccgtctatttcaggaaagcgctgcctggaaactgttgagagctgataatgctcctgtaattttggcatttttgggggagttattttccgaggatagtgaagtcccttttagtcgtgcccgggtgtcacttgatgcagagctggtacgctgtcgtgaacttggcctttgggaaactgaaacaggagcgggtacttatctcaataaatggattcgggaaggctggttgcgtgagatggatgacacattaactaaaacggatgccagtgaaattgcactccgctttagccaagggcttgatgaacgcaattcaggaaccactgcgtctcatcttcgaattgtgcaggaagcggtcagggactttgcaatagcgattagcccaaatgccgatgagcgtgtcgcgtttttggaagatagaaaatccgagattcagagagagattgatgctctgagggctggcgttgtgaccgaattaaccaaggctgagcagcgggaaagaattcgtgaaatttaccaactggcttctgttttaacgggtgattttcgccgtgttgaagatgaaattcgtcagttggatcaggaaattcgtattcaaattattgagggggactctaccagaggagatatccttcttgctgttttagaaaaagaagcattactggctaaaacggatgccggtagtgcgtttgaaagcttttttgatttgttatgtgatcaaaatagaacgatggagctacgagatcagcttcgaagtattttaagtcgtccggtcgcagaacacttaagtacccaacaacgccaattcttaagtcagctcatgagagaactgagccgcgagagtgacagagtttttcaaatcaggcgaagaacggaagagagtttgcgtgcttacatagagagtggcacggctcaagaaaatcgtgctgttgatagattgcttggtcaattggaacgactcgccattgaattgaagaacttaggttatgacttgcaaacggcaacaacgctgtcactgcccgttggcgcggcaagtattagctctcctgaaagcatgctgcttaaatcacctgatgaaaagctggatacctcagacgctgaagaacagctcaattctcgcgaaccgagtatgcaaatgctggattgccttgatgttgttcaaattcgattaatcgctgagagggcgctagaaacgttaaaagagtttggtccaatgacgattgcgtctattgcaaattatcagccgattaattcagggttggaggagttagttgcctatttaagagtggccaaatctgtcggggcggcattattggaagaaaaggaatcagttgaaatcagtgacaaacggggagctcgcttgcgggcgtctatacccactttcttgctgagtgcggacctgtttccagacagtttggatgaattggttctttag

SEQ ID NO: 8779 - DNA, 3273 bp, Photorhabdus luminescens
atggtagctcccttctggaaaagggcttacctggccctattaagcagtacattcgttttgctactggctagctgtgataacaatcgttctttacccaaaaccccggagaaaccgatggcgcatatccctaataaagtacccagtgaagctgccactgccggcaattttcaggcagtgatccacttggtggacattgctaaattaagtcaaagcccaacaacgaaccgtgactacagtaccaacaccctctacttatggaacgataaaaattgtgatgccttggcttccctttcatcaagctggaacgacaccagtgcaactccgacgggtagcgatagttatgggccttactgggtgataccgttaaccaagaacgagggctgtatcaattttatcgtgcgtgatggtaacaataataaattgatcgacagtgacctgaaaatctccttctccgatttcagtaaccgtaccgtctctgtgatacccggcaattatcaaatctatggcagtcgtgcggcagcctttaattctgtgtttggcgtttctcaggcttcggcacattgggtcgataatcagacgttgttatggtcgggtggcgcggataagccctatgtccgcttatattacaaccggaatggcaaggtggaagctaatgatgaaggaaatttcatcgatagctatctgacgttaacgccgacgactctgagccagaagacggctgagcgattcccgcacttgaagaagttaacagcgttccacctgccagaggacacggatgttgatacactgcttaccggtgagttggtggcgttggcgaccaatgaagctggcttgctattgtcggcgactcaagtacaaacggctggtgtgctggacgaccgcttcgctaacgttgctgacaccctagaatatggagcactaatcaacgataccggtgttaccttccgcttgtgggcaccgactgctcagcatgttgggttggttatctatgatgcaaataaacagatcattgccaatcatgcaatgaagcgtgatcctgctagtggttcttggtcatggcaaggtgataaagagctggttggtgcttactaccgctatgctttaacggtataccatccatattcccgtcatgtggagcattatgaggttaccgatccctattcccacagtttgtctaccaattcggagtacagtcaagtcatcaatttggatgacgaggcactgaaaccacaaaattgggatagcctgatcatgccgcgttcgcaaaatacaccggctgacattgcgcgtatgaccatatatgaagctcatattcgtgatctctctgttgcagatggcacggtaacagaaacttggcgaggtaaatatctggctctcaccgctgacaacagcgatatgttcaaacaccttaagacattgagtcaggcaggggtgactcatatggagctattgccggtattcgatgtggcttccattaatgaattcagcaatgaagtggctgatctgaatcacccgtttagccgtttgtgccaggttaacccaagggtgaaaaatagccgcttcgcgaattattgcagtggttcacagactgtgggtgaggtattacaggcattgcagcgcggtgacaacgccaataacccgcaggtacaagagctgaatgcaatgattgcagaaaccgactcctacaactggggctacgatccgtttcattactcggtaccggaaggttcttatgctacagatgcggaaggttcggtacgtataaacgagtttcgcgccatgattcaggccatcaagcaacaattggggatgaatgtgatcatggacgtggcgtataaccataccaacgcagccgggccggcgcaccgatcctcagtattagataaggtagtgccttggtactatcatcgtttggatgagatcacgggcaatgttgaatctaacacttgttgtcacgatacggctccagagcaccgcatgttcgctaaactcattgaagactcgttggtgacttgggttaaggactataaaatcgacgcgtttcgatttgacttaatgggctaccatcctaaggcgcagatgttatcggcgctggcaaaagtacgcgcaattaacccatcggtctacttcttcggtgaaggttggaactctgggcaggatgaccgtttcgaaattgcttcacagattaatcttaaaggcactgggattggtactttctctgatcgactgcgcgatgcggtacaaggtggtgggccgtttgattctgctgacactattcgtattaatcagggggtgggcaacggtgcgggaacgttactgaacgaaatggcttggttagatgctaatgagacgcgtcatctggcggatctggtacgtcttggcatggcgggcaatttggctgattttgtgctgattaataaagatggggcggtaaaaacgggtcgggaaattaactacaaaggggctatagccggttatgccgctgatccaattgaggtgattaattatgtctctaagcacgataaccaaacgctgtgggatataatcagctacaaagcggcccgtgaggcgaatctggcaacacgggttcgtatgcaggcaatatccctcgccacgacattccttggacaaggattggcctttgctcaacatggatcggagctactacgttcaaaatcttttacccgtgattcctataattccggcgattggtttaaccgtgttagctacacctaccaggataacaactatgatgttggtatgccggatcagcgtgttgatggcgaaaattacgcattgattgaaaaagtgaaaaatgtggtagataaaccgggccggactgaattattacagatgacggctttttatcaggaattgctgcgtttgcgtcaatattcaccactgatgacgcttggtgatggtacatcggttaaacaacgtgttgatttccgtaacgttgggccgcatcagcagcttggattgctggtgatgaccatagatgacggtaatactacgggtgatgaccgtgattcgcgatttgacggtttggtggtgatgattaatgcggctccgtatcctgccacagtaagagatcttaacgtcaaagggttgaagttgaatgatattcaaagggaactgggccacacatctctggcggcggggaccagaattgcgaaagatggcacggtcacgctgccggcttggtcagtagccgtgctggttttaccgcaagatgggaagcgtggtattggtttgcctgtccgtagaaagtaa

SEQ ID NO: 8780 - DNA, 495 bp, Photorhabdus luminescens
atgaaacattctcttttctatactgttttggcagcaggtttattcgctcaatctgcttttgcttcatcactaattactgaacgtaatattactcttgaggtagcaaataaattagcttctgaagcaattcaatcttgtgcggctaataactacaacgtaacggtttctgttgttgataaaagtggggttctgaaagtggttcagcgtatggataaagccggattgcataccgttgatgcgagcaaaatgaaagcttataccgcgttatctactcagagaacgtcagaggacgtaatgaaaacggcgcaatcaaatcttggtgctcaatatttaggggatattccaggcttcctattacttggtggtggtgttcctgttaaatctagtgataatcaagtgattggtgcaatcggtattggtggcgctccgagtggttctttagatcaacagtgtgcttttgatgcaattcagaaaatttcatcagatttatcttaa

SEQ ID NO: 8781 - DNA, 627 bp, Photorhabdus luminescens
atggcgacagtaatttatcttattgatgatgatgaagcaatccgtgactcattatctatgttattagaaacaatgaattggcaggtaagttcatttcctggtgcgcaagaatttcttgatagaattgatagcgagaatattgcagtgcttcaggggtgtattttattggatattcgtatgccgggaaaacctggattggcattgcaggccgatcttttaaaacttaatagtacattaccggttattatcatgaccggacacggaaatattgatatttgtcgtcgcgcttttaaaaacggtgctttcgagtttttaaccaaacctattgatgcagatttattaattgaaacagtttcaagtgcattattatttcatcagaaagtatttaggcaacgtcagatatatgagcagttgaaaacgaaatttagccaattatctgaacgtgaaagggaagtgatgaaaattattttggaaggtaaaaccagcaaacaaattgctcaacagttatcgttatcaccacgtactattgaggttcatcgtgccaatatatttcataaattggatatacattctttaccacagttagtcaaagagtatgaattatttaagtcattatcttatgactaa

SEQ ID NO: 8782 - DNA, 1365 bp, Photorhabdus luminescens
atgaaagatattttttcaggtaatcatatgtggcattttttggcgtggattgtgttaacaggtttgactatttggggaatgattaatcattcactaaatcagaattatcaacaacaaacagtttcatttaatattctttatcgagagctgagtgaaaagctggcacaacatgacgcgattgtatcgctaacggatactaatatcgaattggagcagctacaggaaaactttccacaaatcgtcggattacaagagatgccaatgaatgtattaatattccctatagtcagtgaagaggaagagggaagatattggcttaatagtaaacgtgataatatccggttattaatagatcttaatatcctgataaaagatctatcattattgtcacaatttcgaatggtacaactggattggaataatcgcccattgattacgtatggactggagaaagatcactatttttggcgctgggagaaaaagttaaccaatcgttttcagccttttgtgcttaaagtgggtaacgatcaacaatggtctaaaattccgtggggttatattgcttgtctgagctttttatgggcagtgattatctgttttatctttttaattcagaagaataaaaggttgaggaaaatttctgatttacgagcacatttctttgaatttacccgattaaatacaatggatgaagtggcaacaggtgttgttcatgaattaaatcagcctttgactgcgattatgagttataaccaaaccgcattgcggttaatgaaaaagcagcaatatgataaagtgacgccaatattggattcatcaattttgcaaactcaacgcatcgcaaatttattaacgcaataccgtcaaaaactgacgaccggtaatattattttacaacctgtgaatattcaaacgatattaggtcgagttgagatattgctcgaaaatgaaattaaggtcggtaagatcaagataataaagcatatttgtgatgaactaccaatgatatctgccgaaccgctgtggattgaacaaatatttcataatttaatcagcaatgccattcaggcacagcaagagcaaggtcggtcagaatatcaaaattggatctgtattgatatcacctatatcgatgacatgataaaaatcatgataacagatggtggccctggattaagtgatgaagctttaaagaacgtgtttattccattcttcacaacacgccagcaaggtatggggttgggaatgacgttaacagaaacattaattcataaacttggtggcgatattaatgctgaaaattgtgaaacaggaggagcgcgttttattatttggttaccaactaataaaggtaaggagaaataa

SEQ ID NO: 8783 - DNA, 696 bp, Photorhabdus luminescens
atgatccatttacgcaaagcatcagatcgcggccatgccgatcatggctggttaactagctggcataccttctcatttgccagctattacgatactaattttatgaatttctcagcattgagagtcattaatgaagatttcatcgaagcaggtcaaggttttggtacccatccgcataaagatatggaaatactgacctatgttctttccggtaccgttgaacaccaggatagtataggaaataaagagcgggtacctgctggtgaattccaaattatgagcgcaggtactggcattcgccattcagaatacaatccgaacagtgattgccaattacatctatatcaaatttggatcatcccaagtaaaacgggtttaacaccgcgctatgaacaacgtcgctttgatgatgtacaaagccgccaactggtgctctcgcctgatgcacgggatggttcactgaaagtatttcaggatatgactttatggcgttggatacttaaggatcacgaaaccgccgaatatgtcgcagaaaaaggccgttatatttggatacaagtcattcgtggcgaagtgacggttaatggtgtcaaagccaccaccagcgatggtctggctatccgagatgaaatcaatcttcaacttagcagcagcaacgatagtgaaatattgttgtttgaccttcctccgacataa

SEQ ID NO: 8784 - DNA, 1620 bp, Photorhabdus luminescens
atgagtgttaaaggcattaccccgcaggaactcgcgggttacggaatccatgatgttaacgaaattatttataatccaagctatgagttgttattttcagaagaaaccaaaccttcactcgaaggctgcgagagtggcactctgaccaacctgggggctgtggctgtcgatacggggatcttcacgggtcgttccccaaaagataagtacattgttcgtgatgatgtcacccgtgacaccgtatggtgggctgaccagggaaaaggtaaaaatgataacaaaccattacagcaggagacatggacatatctgaaaggcttggtaactaagcagctttcaggcaaacgtttgtttgtagttgatgctttctgtggtgctaatgcagatacacgactgaaagtccgctttatcacagaagttgcgtggcaggcccactttgttaagaacatgtttatccgcccatcagatgaagagttggctgagttcaaaccagattttattgtgatgaacggtgcaaaatgcaccaacccgcaatggcaagaacaaggtttgaactctgaaaactttgttgcgtttaacctgacagagcgtatgcagcttattggtggtacctggtacggtggcgaaatgaagaaagggatgttctctatgatgaactacctgttgccactgaaaggtattgcctcgatgcactgttctgccaatgtgggtgagaaaggggatgttgcggtcttcttcggcttgtctggtacaggtaaaaccacactttctactgatccaaaacgtaagctgattggtgacgatgagcacggttgggatgatgacggtgtattcaactttgaaggtggttgttacgcgaaaaccatcaatctgtccaaagaggcggaacctgatatctacaatgcgattaaacgtgatgcgttgctggaaaatgttactgtactgacagatggcacggttgatttccgtgatggttcaaaaactgaaaacacccgtgtttcttatcctatcaaccatattgaaaacattgttaagccggtttctaaagcgggccatgcaactaaggtcatcttcctgactgcggacgcatttggtgtgttacctccggtatctcgtttgacacccgaacagactcaatatcactttctatctggttttacggcaaaattggcaggtaccgaacgcggtgtgactgaaccaacacctacattttctgcttgttttggtgccgcattcctgactttgcatccaacccaatacgcggaagtgttggtaaaacgtatgcaggccgcaggtgctaaggcttatctggtgaatactggctggaatgggacgggtaaacgaatctcgattaaggatacccgtgggatcattgatgccatcctaaatggtgatattgaagaaactgataccattacattacctattttcgatctggcggttccgacagcgttgccgggtgttgataccgacattcttgatccacgtaagacttatgcagataaatctcaatgggaagagaaggcgaaagatttggctcatcgttttgtcgacaactttgataaatataccgataccccggcgggggaagctttagtgaaagcgggtcctaaactgtaa

SEQ ID NO: 8785 - DNA, 873 bp, Photorhabdus luminescens
atgtttaaacaagaccaattacaccgctttttatttaagaattattctgtacgtggtgagctggttttagccagtgaaacttaccagcatattttggaaaatcatgattaccctcagccggtacagcaattattgggagaactgttggtagcaaccagcctattaactgcaaccctgaaatttgatggcgatattacggtccagattcagggagatggcccggtcaaattagccgttattaatggtaatcatcagcaacaaatgcgtggtgttgctcgtattgatggattagtggctgaaaatagcagcttgaaacagatggtgggtacaggctatatggttattaccattacgccaactcatggtgagcgttatcagggagtggttgcactggaaggtgaaacattggcggattgtcttgatgattatttcagacagtctgaacagctaccgactcgtctctttattcgtactggcattcaagatggcagagttgctgctggtgggatgttgttacagattctgccaacagcggaacaggggagtgcagaagcttttgatcatctggtgcaacttactgcaaccattaaaggtgaagagttattttcattggaagttaaggagatcttgcaccgcctttatcatgaggaggatgtcatattatatgaaccgcaagcggttgaattccgttgtacttgctctcgccaacgttgtgctgacacattagtgacactttccgatgaggatgttaatcatattttgcagaaagatggcaacattgatatggcgtgtgagtattgcggcacgcactatatttttgatgctgatgatcttgctgcgatcagaatagaaaaaaagaaccggctccattga

SEQ ID NO: 8786 - DNA, 417 bp, Photorhabdus luminescens
atgaagggtaattcagactccgatcaagctgtccgtctggataagtggctgtgggcggctcgtttttataaaacacgggctattgcacgggaaatgatagacggtggtaaagttcactataatggtcaaagaagtaaaccgagtaaattggttgagctaggggctgaaattaaactgcgtcagggtaatgatgaacgtatagttgaagttcttgtactaagcaatcatcggcgcggtgcgccggaggcgcaacaactttaccaagagacggaagcgagtatgactaaccgggaaaaaatggcaattgctcgaaaaatgaatgcattaactatgcctcatcctgatcgccggccggataaaaaagaaagacgcacgctgattaagtttaaaaacaccaaattaaatgggcaggaataa

SEQ ID NO: 8787 - DNA, 2133 bp, Photorhabdus luminescens
atgagcgtaacagtcgttatattggctatcttgataattagcttgattgtcatggcttcctttctgatcttcaaatggaagctacatgataatgaccgctatctgccttctgttgctgcaccgacctatcgtaaacttaatgctgatgaataccaggctattgaatgttatttgaatcgagtgttgccgccagttgtaacaaaccgtattaataaaacaagttggccaattctgatgggtaaaaatgatatggtttatactatctgtcattccattacccggttttctgttgcctcagatgaacgacatagctggcgttattatattgatatggcagaaattcatttgccgtttttccttgagccttttattaaacagcagaatattattgatgttattcacaccgcgacaataccactggttatttcgattaatggtcactttctgaaagattttcaacaggattttccttctgctccggtaatcgcagatatatcgcatcagcaggcatcgatccaaaaaaatggtgaaaccagcgtaaagttacaaaatattcgtaaagagaccttggaagaataccggttgaatcactcatcgggtatttgggaagggggatttttgtgtttcggatttttcatttggttttttgcgttactttcaccggcactgcttttgccgtggctgatgttgattgcaggtagtttagtcgttgtcagtttttggccattactttgcccactttcaatatgcaggcgccaggatattcactgttttaccggtatacccaaacgatggggattatttggcgaatttgaacaagggcaaatgagtaatatttctcttggtgggattgatttaatctatcctcctcattgggaaccctatgttgcttactattttgatcagaaaaccagtattgatatttacactaacggtcaggtagtcaggcaagggcattatctctctttgcatgatgaagagaaaaattacccttatcgccgttatggaaaaaatctcatgatgatcgctagctgcttgcttattatgttactactctatttttatcagccggttagtgtaccgatgaaactcagttttgcttggttgcatggcagcagcacaaaagttattactgacgctaatatgatggaagggatggaattgcgagttggggatatcctgaaagcaaaaggggttggtatgtgttatatgcccccaaacaatatgaacggtaaaggcgacacctatttttctccgttcgattgctcggggatatattggaatagagttaatccactgccaataccagaatcagaaattatagaaaatgccgctaaactgattgcaactgttaataagcaattacgtttacaggaaaataacgatgtaataaatccagaccttccccaggagattttcaaatctggtatgatcttattggataatttctctgatattgtattgaaaactaaagaattatgtgagaaagaagcagactgtttacgattgaaaaatgctttggttaacctgggtagtgctattgattggctaactttgttaaagaatgcagaaagtggcaaactggatggcactcatgttttattgcgtccggcaggcgctgaagctttggggaaattggttgatgcgacgacatcatcatttatctaccgggaaatagataaagtcgcaatgctgcttaatagcccttctcctggcggagttctacttatcagtgatgaaggcaaacaactggttgagtatataacgccggccatcatctcttatgaccatagtgtgttggaagaccatagtgcgttggaacaatggcgtgagttacagcggttatcggatatggtattgcaaacaccctttgagacaacgggaattgtcacggaattgtccgtagatagtcatggaacccgtcggattgtgctgcatagtgaactagatgccatgacacttgctcgttgtattggtaccactattttattcttggctctttttacgaccttaatcattaattttgtgctggttgttaagaaaaataggcagaacaaacaacgtctaaacaaaatcaagcaatattacgataactgctttaatacactttttccgcctacgcgttggcgataa

SEQ ID NO: 8788 - DNA, 549 bp, Photorhabdus luminescens
atgaatgacctgaaaaaccctaaaatcctcaacatagaggacattgcccattcacgtttatttcatattcagtcagttgatctcgaatttagtaacggtgtaaaacgcgtttatgaacggatgcgtccggccaatcgggaagctgttctgataatcccggtcattggggaggaattgttgcttattcgtgagtatgcagtcggcattgagcagtacgaattgggctttcctaaaggcgcgatcgacccaggggaaagtatctttgaagccgctaaccgtgaattaaaagaagaagtcagttttggtgccagaaaaatagaacaattagccaaactcactatggccccatcctatttttctagcaaaatgaacattgttattgccgaaaatctctatccagaaagcctggaaggggatgagcctgaaccgctatcacaaatacgttggccaatagcagatatgatgtcattactggatcacgctgatttcaacgaagcacgcaacgtctgcgccctatttctggcacaaaaatacttaatacaccgttga

SEQ ID NO: 8789 - DNA, 2529 bp, Photorhabdus luminescens
gtgaagttcgtaaagtattttctagtctttgttgtgagttgcatttttctgggaacggcctcgatttttggtatgtataaatatatcgagcctcagttacctgatgtggcgacattaaaggatgttcgattacagacaccaatgcaggtgttcagtgcagatggcgagctgattgctcaatatggtgaaaagcgccgtatgcctcttgagctgcccgaaattccacccattatggtgaaggcgttcattgcaacggaggacagccgtttttatgaacatcacggggttgaccctgtagggattatccgggcagcttctgtcgcgatgagttcaggtcatgcatcacaaggggcaagtaccattactcagcaactggcgagaaatttctttctcactcctgagaagacgttgatgcgtaaagtcaaggaagcttttctggccatcaggattgagcaattgctgaataaagatgagatcctcgaactctatctcaataaaatttaccttggttaccgggcttatggtgttggagctgcggctcaagtttattttggtaagagtgtcaatgagttgacactgagtgaaatcgccatgattgctggtttgccaaaggcaccttctacgtttaacccgctttattcttatggccgagcgattaaccgccggaatgtggttctgagccgtatgctcaatgagggctatattactcagcagcaatataatcaagctagaagtgaaaaactggtagcgaattatcatgcacctcagattgctttctctgcgccctatttgtccgagatggtgcgtcaggagatgattgagcgttatggtgagaatgcttacaccgacggttataaggtttataccacgattacccgtaaacttcagttagctgccgtggatgcggttcgtaataacctcattgattatgatgtgcgtcatggctaccgtggggcgcaggaagttttgtggaaagtgggtgaacctgcttgggatcgggaacaaattgtcaagaagcttaagaccttaccaagttatggggcgttaatgccggctgtagtgaccaaagcaggtactgatcaggcgatagtgatgttgcctgatggcagcagtgtagaattgcccatcgcgggtgtccgttgggccaaaaagttcaaatctgatagtgcacagggtgcggttcctcgtagtgtgaatgaagtggttcaagtgggtgaacaggtttgggttcggaaagtaaaggatatttggtggttggcacaagtgccggaagctaatgctgctttggtctctattgatccgaatgatggtgctgtgaaagcgctggttggtgggtttgatttcaacttgagtaaatttaaccgtgtcactcagtcattacgtcaaattggttctaatattaaaccatttctctataccgcagcgatggataaagggctgacattagcttcattgttgaatgacttacccattagtcgttgggatgcaggagctagtactgactggcgtccgaaaaactcaccaccggcttatgttgggccaatccgtttgcgtcagggattagggcaatcgaagaacgtcgtgatggtgcgagcaatgcgagcaatgggagtcgattatgccgctgattacctgcaacggtttggttttccggcacaaaatattgtacgtaccgaatctctggctttgggatcaccatcattcactccaatgcaaatggtacgagggtattcggtcatgtccaatggtggctatctgatcgatccttacttcattactaagattgaaaacgaagatggcgatgttctctttgaggctaaaccgaaaattgcatgtccgcagtgcgatattccagtaatttatggggatacggtacgttcaatcgaactttctgaaaactcgatagagaatgttgctcaatctcatgttggccagcaagagatattgccgttacctgaattagaaagagcaccggtcattgatggccgtgaaggtgcgcaagaatatgctcctcatgttatcagtactcagttggcatttttgatccatgatgctttgaatagcaatatttttggtgagccgggttggtctggtacgggttggcgcgcctcgcgcgatctgaaacgtcgtgatattggtggcaaaactgggacaactaatagttcaaaagatgcctggttctcaggttatgggccggatattgtcacgacggtttggattggttttgatgatcaccgtagaagccttggtcgtacagcagccagtggcggtgaggcgggtgctaagagtgcgcagccaatttgggatgattttatgaaaattgcactggagggggttcctgaaaaagaagttacacctcctccggggattgtttctgccgtgatagatcgtaaaacaggtaaacttgctggcggcggcggagatacccgtagtgaatacttcattgacggcactcaacctacagaaagtgcggtgcaggaagttggcacaattttaattgagaatggtgaaagtcaggagctattctga

SEQ ID NO: 8790 - DNA, 831 bp, Photorhabdus luminescens
atgtattcaccaaaatggtatgtcggattggacatccaaaatggcatccttcgcgccgtcgcagctataaaacgccgagatggctggcagcttcgccactgctggcaatatcttttatctgatgcggtcatgccagagggccgtttacaacggccagaaatattatgtgatattttaaatcaatggcgccaagaattacctaaaaaaatcagtttcaggctcgccctacctgtacaacaaacattgcagaagagtctgattttacctccagatatcaatcttaaagagccggaacaaggctggtttatcaacgccagtgccgagaaacaattcccctttaatacccgagaactggcgctggattaccgtattattgaacaaaacgcctacatcagtgccgctcgccagaaagatctcaacctctggctacaatgtcttgcacaagcaggaatatttccagacgccattgatattgccccttgtgccctacgctatatagcacaatatgccggcgttcccgctgatagttggctgttacataggcaacaatctggttggctatgggtatctcctgccaatgcccccttcgcttatgatttagtatcagcaaatacggctgtttctccacagcagattatccgtcaattatctgcttcatctatggctgaacagccggtttactacagcagctaccaacaagaagctctacctgaaggaacttattcttgggatatgttgacagcatttcgtcactatcaaccaccactgccaatccaactgatggaatatgtgatagccggtggtttagcactcagaccggatgataagtaa

SEQ ID NO: 8791 - DNA, 555 bp, Photorhabdus luminescens
atgatgtatcaggttaattttctaccttggcgccaaacccggctaagacatcgttatcgttggtgggcgattcttctcttattgcaattgatgttgtggctgacagtactcgtctggatgttattaaaacagcaggaaacgattaaccagtatcaaagacaatggcagcaactcaaccagcaacaattatatttgcaacaacagataactcagacagaggaggcggtcaatcttcacaacaaactggccgataaattaaaacaacaacaaacgtggctgaaacagaaccaacaacattggcaattatttaatgaattacctgaattattaccagaaggaagttggttaaccgctttcgatgatcaggcaggccaattaaaactggttgctaatagtctggattattccagtatgacgtctctgctggataatcttgaaaacaacgggcaattgtctgaaattcaactaaaaaagatgaccactaccgaacaacaaatcaggcaatttattattgacgctaactggcagacggagatatccgatgataaaaagtga

SEQ ID NO: 8792 - DNA, 546 bp, Photorhabdus luminescens
atgataaaaagtgactatctatggtggtttgccaaaccaacctggctgctctttatctggcagcaagctatcatcatgctatttctgattctgttttatcttttcttctggcaagaaagaactgaacaacgaagtagcctggcgcaaaaaatagcagcccaacaaatcaataccaaagcagccaatgaacggctaaatcagctaccgctattgggaggtatacgacaacacatcaaccaaatagaaaataaactcagtaagccgcgacaaaatgaggtaaaaattaccgcaataaaacaattacaacagccattgataaactctggtgcgcaagttcttgagtggcaacgtaaaaaagaaggggaaaaaacgctctggcaaatcacaatttatttgaactacgaacagatgctgagttttcttgaggcgttacaaacgttatatccaccgctgctaattaaacagctttccatttcaccatcaggtgaatctctaaacgtcaaaatcaccctgtcagaagcctcacatgaggaattttatgactaa

SEQ ID NO: 8793 - DNA, 1035 bp, Photorhabdus luminescens
atgactaaaaaatttattctattcatcctttttctgcccgctattgttgttgcagaaataagaaatccttttgttcccccgatgatagagacagaagagcaatcggttgagttatttgatcaatcagtcaatgagaccgaaattcagtccctttcaaccgtattacaatatgcagatgcagaaagaatcgccatgaatctcaggcaaaatacgcccgcactgataacaaaagagggtaaagttgattttgatcctgaaactaacagtctgattttacaggatacccccatcgccatcgcacagataaaaagctggctgaaagagatagatacaccacagcaacaagtgcagattactgcacatatcgtgaccagtagccgagaagcattacatgaactcggcatttactggggtatgccgataggagagcagattaatacatcaacgggtataaaccgcctcaatatcaaccaagcagccaacgataacatgcatcgatttgcattcaatattgcccgcattcacaccagtttgctggaaatggagctcagtgccttagaacaagaaaaccaactagatattatcgctagcccaagactaaccgcctcacatcaacagttagccagcatcaagcaaggctctgatattccctacgtcagccaagaaaaagagaaaagtaccgtgcaatttaaagaagccgtactaggaatggaagtcacaccccatatactgagaaaaaacaaaatcagactctctctaaaaatcagtcaaaacatgccagggatctcaataagtcaaggaggaggtgaaaatttaaccatcgacaaacaggaaataataactcaagttactgtaaaaaatggtgaaacacttattctcggtggcatttttcaacagaaaaaaggcgagcaaacccaaaaggtcccttatctatcagacatcccactactcggctcattatttaaccaaaaagctcataaacacagccgacgtgagttagtcatatttatcacacctcaattgatggacatttga

SEQ ID NO: 8794 - DNA, 522 bp, Photorhabdus luminescens
atggcagagaaacgtaatatctttctggttgggcctatgggtgccggcaaaagcactattggtcgtcagttagctcagcaactcaatatggagttttacgactccgatcaagaaattgagcgacgtaccggagctgacgtgggctgggtattcgatgtggaaggcgaagaaggcttccgcgaacgcgaagaaaaagtgattaacgaactcacggaaaaacaaggcattgtactggcgactggcggaggttctgtgaaatccagagaaacccgcaatcgtctgtcagcccgtggggtcgtggtctacttggaaaccaccattgaaaaacagttagcacgcactcagcgcgataaaaaacgtcccttacttcaagttgatgcaccagcacgtgaagttttagaaaatttagcaaacgaacgtaatcctctgtatgaggaaattgctgatgtcactatccgtaccgatgaacagagcgctaaagttgtcgctaaccaaatcattgagttactggaaaaaaactga

SEQ ID NO: 8795 - DNA, 1101 bp, Photorhabdus luminescens
atggaaaagatcactgtcactttaggggaacgtagttacccaattaccattgcaaaagggctatttgacgatccttctgcttttgcaccattaaaagcaggccagcaagttatgctggtgacgaatcaaaccctagctccgctgtatctggcaaaagtaaaagctactttgcaacaagccaggattcgggtagatgaagtgattctacctgatggtgaacagtacaaatctctttctgtattaaatgacgtattttctgctttgctggaaaatagccacagccgggacacaacacttatcgctctcggtggcggcgtaatcggtgatttaactggttttgccgctgcctgttatcaacgtggtgtccgttttattcaaatgcctaccacccttcttgcccaagttgattcctctgtcggaggaaaaaccgcagtaaaccatccctttggcaagaatatgataggtgcattctatcaaccagcctctgtgatggtcgatctcaactgcctgcaaacgcttccagcccgcgaactctcttccggtctggcagaggtcatcaagtacggtatcattcttgacagcgcattttttagctggcttgaagataatatggataaactcctggctcttgacaaccaagcaatggctcactgcatccgtcgttgctgcgaattgaaagctgaagttgtcgccgcagatgagaaagaattgagtggcttgcgtgccctgctgaatcttggtcacaccttcggtcacgccatcgaaacagaaatgggatatggtgtctggttacatggggaagcagtttccgccggaatggtcatggcagcaagaacagctcaacttattgataatttctctgaacaggatactcaacgtattatccgattgttggagcgagcaaatctgccggtacacgggccacaaaacatgccaccagaagcctacctcccacatatgatgcgagataagaaagttatagcaggtaaattacgactggttcttccaacaaaaataggtaaagctgatcttcgctcagatattgaacacaactgtgttgttgacgctatccttcagtgtttaccgtatgaaaatgtgtaa

SEQ ID NO: 8796 - DNA, 927 bp, Photorhabdus luminescens
atggacgaattcaaatcagaaaatgaacaaagagcaaataacgagtttaggccagatacctcagatcgccgtccttcacgctcgcgtcagccattaaacaaacccaaatttgcagtttcacgtcagcaaatgatgctcggcattgggattttagtgctgctactgctgattattgctatcagttctgccttaaaagccccaactgaacatgaaaaacagcaatcgccaaatgttgctgagaagaatattgatttatcaaattcatcatccaacaacgatgataatcaatccataacatcagagaataccaccacagatacaatcaacagaccacaggaaatccatgttcctcctgtcagtggtacttcaactcaacctcatcagcttcaaactaacaatggcaaaacccaaaatcagcgcattgaattaccaggaaatattcctgatgcactgactcaacaacagagtaatataaatcacgcagtacagaatctgaatcaagcccaacaatcacagccagtaacaccaccaccggtggtacagcagaaatcagaaaatatccgtccactgaaatcagaaacaccggctaaatcaaaaccatcgacaagtcatgctagcagtaaaaacaatgtggtcagtagcaccagtagtgatcaattaaaaaccccggcaaaccactacactttgcaattaagtagtgccagccgctcagatacactgaccgcttttgctaaaaagcataatcttacccattacaaagtttatgaaactaaacgtaatgaaaaagtttggtttgttttaattcatggtgattacccttccgtttctgaagccaaacgggctgtttcatctctaccggccgagattcaggcgaaaaaaccttgggttagaacgatgcagcaagtgcaacaagatctaagaaaataa

SEQ ID NO: 8797 - DNA, 813 bp, Photorhabdus luminescens
atgaaaaaaaaacgcgctttcttaaaatgggccggtggaaaatacccgttggtagatgatatcaaacgtcatctgccagccggtagtcgtctgatagagccatttgttggcgcaggttctgtctttttgaacacagactacgattcttatatcctcgctgatatcaacagtgacctgattaacctgtacaacacagtaaagctcagggctgatgagtttatagtccacacacgccctctgtttacccaagaatacaatacagccgaacatttttatcagttacgggagcaatttaaccaaagcactgacccgttccatcgcagcgtattattcctttatctcaatcgccattgttacaacggcctctgtcgttataattctcatggtaaatttaacgtaccttttggccgttataaaaaaccctactttcctgaagaagaattacactggtttgctgaaaaagcccaaaatgcgacttttatctgcgagcactaccaacacacgttgaacgaagcacataaagactcagttatctattgtgatcccccctatgctcctttgtcagcaacagcaaactttacggcgtatcacaccaatagttttaacattgcagatcaggaaaatctggcaaatattgcatttaagttatcatcagaacgtgcaattcctgttttgatatccaaccacgatacgccaatgacgcgaaaatggtactatcaggcttcacttcatattgtcaaagcacgtcgtactatcagcaggaatatccttgctcgcagtaaggtagacgaacttttggcattatatcgctga

SEQ ID NO: 8798 - DNA, 681 bp, Photorhabdus luminescens
atgaaagactttctgattgccccatccattttatctgcaaattttgcgcggctgggtgaagatacagataaggtgctggcagcaggggctgacgttgttcactttgatgtgatggacaaccattatgtccctaacctgactatcgggccgatggtctgccaggctctaagagattatggtatcactgcaccaatcgatgttcatttgatggtaaaaccggttgaccgcattatccctgattttgccaaagcaggagcaacttacattaccttccacccagaaaccagtgagcatattgaccgcagtttacaactcatcaaagagcatggttgtaaagctggcttggtattcaatcctgcaacgcctctgagtcatctcgattatgtcctggataaactggatatcattctattgatgtcggtaaatcccggtttcggtggccaatctttcatccctggaacactagagaaactgcgtcaggttcgcaaaattattgatgaaagcggttatgatattcgtcttgaagtagacggtggcattaaagctagtaatattgccgcagcagcaaccgcaggagcagatatgtttgttgctggctcagctattttcagccagcctgattacaaaactgttattgataatatgcgtagtgaattgtcaaaggtatctcatggcaagtaa

SEQ ID NO: 8799 - DNA, 705 bp, Photorhabdus luminescens
atggcaagtaaggtattaaaaggtattcgtgctatcgcttttgatctggacggcacactggtagacagcgccggtggtttggctgatgcactggatcaagcgctgttagccaaaggtctccctgctgcgggaaaagaacgagttgcagcttgggtcggtaatggcgcagacattatggtcgaacgtgcgttgacatgggctagaaccaaattgactgcgcaactgcataaagaaacccgtgagctgttcgaccgtttctatgaaacaaccgtaacaacaggcagccaactgttcccggaagtcaaagttacattggctgaactggcaaaacacaacttgccaatgggtatcatcaccaataaaccaacacctttcattgctcctctgttagcttctttagacatcagtgaatatttttcattagtgttaggtggtgatgatgttaaagagaaaaagccacatccggcacctatttatttaacaatgggcacattcggactgcgtaaggaagaactgctctttgtcggtgattcccgtaatgatattttagcagcacaagcggctggttgcccttgtgttggtttaacttatggatataactacggtgaatctattgcattaagcaatccagattgcatattaacgaatttttcggatctactatccacaattggcctcccatctttaaaacttcaggaagcataa

SEQ ID NO: 8800 - DNA, 1038 bp, Photorhabdus luminescens
atgaatgaacccactgtatctgaaacactaaactcccaaaaacctattgtattcagcggcgcacaaccttccggtgaattaaccatcggtaactacatgggggcgttacgtcagtgggttaaaatgcaggatgattatgactgcatctattgcattgttgaccaacatgcaattacagtgcgccaggacccaaaagagttgagaaaacgcactctggatacactggcgctctacctggcttgtggcattgacccagagaaaagtaccatttttgtccaatctcatgtcccacaacacgctcagttaagctggattctaaactgttatacctatttcggtgaactcagccgcatgactcagtttaaagacaaatcagctcgtcatgccgaaaacatcaatgcaggcttgtttgactatccggtactgatgacggcggatattttggtataccaaacaaatcaggttcctgtaggcatcgatcagaaacaacaccttgaattgagccgtgatattgctcaacgatttaatgccatctacggcaatatctttgctgtaccagagccgtttatcccaaccggtggtgcccgtgttatggctcttcaagacccagaaaagaaaatgtccaagtcagatgataaccgcaacaacgttatcgctctgttggaagatccaaaatcagcggctaaaaagataaaacgcgcggtcacagattcagaagaacctcctcgtgttcgctacgatctggaacaaaagccgggggtttccaacttattagatctcctcgcgggtgttactggcaaaaccattcccgaactggaagcagaatttgaaggccagatgtatggtcatctaaaaagtgctgttgctgatgccgtttccggtatgttgactgagctacaagagcgtttccactatttccgtaatgatgaaatcctgctgaacaaaatcatggcagaaggtgcagcgaaggcaaaagcccgtgcccaaattacgctagataaagtgtatgaagctgttggctttattgctcacccttaa

SEQ ID NO: 8801 - DNA, 222 bp, Photorhabdus luminescens
atgttcatcgtagtaggcgtgaaagcggggtgggttgtggtcgtcatagtacatttgtatcaggatgccaaaaaacttccgattaaacctcataaaaagcaggtgttaaaagtggtaaaaacaacggtcaaaaccttataccgattaaaactagaaggtaaaacaacggcctttaatcatggtttaaaatctgcccatcataaaactattaatggaaaataa

SEQ ID NO: 8802 - DNA, 294 bp, Photorhabdus luminescens
atgactaagcaaacgacaaaagcattactggccctggctttaggcagcgtatttattacggcaagcacttcagcaatggcggattccggcagcaaaatggagaaatgctatggcgtttctctgaaagggaaaaacgactgtaaagcaggtgcaggcaccacctgtgctggtacctcaaaaaaggattatcagggtaatgcctggaaaatggtaccggcgggttcctgcgtaaaaatgaagtctccgacctccccgactggttttggtcaactggacgcatttaaagaagtgtaa

SEQ ID NO: 8803 - DNA, 924 bp, Photorhabdus luminescens
atgacagtttctttgccctcacatagcgtctctcgtgatgctcctgaccgcctcatgctaaataggcttccagccagagcagggatcgggttaaagccggagcattttcgcgctattctgcacaataaacccgacattggtttttttgaaattcacgcggaaaattatctggttgcgggtggtccatttcatcaggcactgaccaccattcgccaagattatccgctctctattcatggtgtgggcctgtccatcggaggagaaaatcctctgaatcagacccatttacagcgggttgctgcgctggttgaacgctaccagccggccgttttttctgaacaccttgcctggtcgactcacaacgatctatttctcaatgatctgctgccactgccttataccgacgtcacgctgacgcgggtctgcgaacacatcgatcaagtacagaatgcgctgcgtcgtcccattctgctggaaaacccatccacctacattgagttcagtgcctcaaccatgagcgagactgactttatctccgaggtggtacgccgcaccggatgtgggctactgctggacgtgaacaatctctacatcagtggcgtcaaccataatcgctgcccaaggcagatgttattagagctgccacttcaccgtgtcggtgaaattcatctggcaggttatacggaaagccgcgatggggcaaacgacctgctgctgattgattcacacgacagtcatgtgaccggacctgtctgggatctctataacaaaaccctgcggaaaacagggccgatcgccaccctgatcgaatgggacagcaatattccaccattagacgtgctgctgaacgaagccagccatgcccagcattacattacggagagcaagaaacatgcaacaacaactgtatcaagcacttcttga

SEQ ID NO: 8804 - DNA, 750 bp, Photorhabdus luminescens
atgcaacaacaactgtatcaagcacttcttgatcccgacctcatggtaccagaggggctgacaacctggaacggtagcgatccggcggtacgttttgcggtttatcgtaataatgtcatagcatcgctaatcgatgcactggccgaaaactgccccgtccttctcgctcagctcggagagtgcttttttcgtgcgatggcagcggagtttatacgtcaacaaccgcctccctctcctgttttggcaggctatggcgcacaattgccggactggattgcgacatttcagccgttggcagactggccttggctgagcgatctcacccggctggaaatgttgtttatcgaatcactgcacgcggcggaccctgccgaacagacggcagaagcggcccccattgacgatcccgcacagttgctgatggcgctccatccttcggtacggctcttcagttcagattatgccgtcttcagcctgtgggcctcacaccaacaaagtgaaaacgagatgatgctggacccattccagccggaacatatgctactgtgccgcgttgacgacgacgtacgaataatgttgctcagccgtgcggaaatgcagtttgttaccatgctccagtctggtcgatgtcttaccgaagccttagagatcgccgccggagaggatgcaacttttgaacctcagtcggttttacaacgcatgcaacactatggactgatcctttctctatatagcaacacggagcgctaa

SEQ ID NO: 8805 - DNA, 480 bp, Photorhabdus luminescens
atggcattactcaaaacattagggtcaaaagggcaacatattgcgcaggaaaatgttcttccccttctggcacgcattagccttgccgcaacattttggctatcgggccaaagcaaagtggttggattaaacatagatattctggagacacgcacaccctggcaactagggattccgcgcgttaccgacagctccgtgtcgctctttaccaacgagtacaagcttcctctgctaccacctgatgttgctgctgtcatggccgcgaccgcagaacacttgtttccgctgctgctgattgtcggattagcaacacgcttctccgcgctagcattaatggtgatgacgctggtgattcagatatttgtttatccagatgcctggcctgtccatgctacctggctgacggctcagttgtatctgatgacttatggcggtgggaggttttcgcttgatcgcctgatttaccgccatcgtacctga

SEQ ID NO: 8806 - DNA, 174 bp, Photorhabdus luminescens
ctgatgtctcaggcgctggatgaaaaaatcgtgctttctcaacatgttcagctaatgctgcatttgaaaatatgcgacgggtgccgaaacttcagacaacagcttgccgacctgcgcactatgacttccgcattcgctcgtggcgaaaacgagaatcaaaataaagtaacgtag

SEQ ID NO: 8807 - DNA, 591 bp, Photorhabdus luminescens
atgtccgatatcaataatctgctgcgggatccgcagtttttttccatgctgcataaacagatgttgcagtttgccatcttgcagttgaatgattttcatcaggcggaagatgttgttcaagaggcgctggaaggggcgatgaagaatgcctcttcttttgccggacgagccgcctggaaaagctgggtgtttacgatcctgcgcaacaaaatctcggacgccttgcgtatgcgttatcggcacagcagcgtgcaactgactgatgatgttgatgagcaaaatttcgaagcgctgtttgatgagtctggtcattggccgcgaaacgagcatccgcagtgctggcatttaccggatgaagtggccgagcaggagcaattttggacgattttcgagctttgtctgacacagttgccaacgcaaaacgcgcgggcatttatgatgcgcgaatttattggtcttgagactcaggagatctgtcaggagatggcgctctctgtcagcaatctgaatgtgatgctctggcgtgcgcgtatgcgtttacgtgaatgtttgtcacaacgctggttttcccatgaggataaatatgcttag

SEQ ID NO: 8808 - DNA, 672 bp, Photorhabdus luminescens
atgtattgtccgcaggtatatacgggtaaaattgaaatatcaggaaaactttctgccagcgcaattaacaaacggatggttgatggtggcctgcgtctgacttctctaggattagacggtgatgagcaggccgaaacccatttccacggcggccctgatcgtgcactttgtcattatcctcgtgaacactatgatttctggaaacatcaatttcctgatcaagaagatttttttattgctccagcgtttggtgaaaatatttccacaactgggttgactgaagaaaatatttgtattggtgatattttcagttggggagaggcaatgattcaagtaactcagcctcgttcgccttgttacaaacttaattgtcattctggtatcagcaatttttctgccattatgcaggagagtggccgttgtggctggctttatagaattattgcagcgggaaatgtcagcccagatgaacctcttgttcttgtttcccgtaatagtgatgttttcgttagggaagcgatagcaattgcttttaatatgccatttgacgaagagcaatatcgtcggttgatgagtgccgctgggttatctgccagttggagcctgactatgcaaaagcgggtgatgtttggaaagattgaggattttaaccgtaggttgttcgggaaataa

SEQ ID NO: 8809 - DNA, 627 bp, Photorhabdus luminescens
atgagctattcattaccttctcttccttattcttatgaagctctggaacctcattttgataagcagacgatggaaatccaccataccaagcatcatcagacttacgttaataataccaatagcgccctagaagccttccctgagctggcaggactgggtattgatgatctgattcagcaattagataagatacctgctgataaacgtacttttgttcgtaataatgctggtgggcacgctaaccatagcttgttttggaaaggtctgaaattaggcacaactctgcaaggcccattaaaagaagctattgagcgcgatttcggtagcatagattcttttaaagagaaatttgagcaggcagcggctacccgttttggttctggctgggcgtggctagtactgaaagatgatggcaaactggcagttgtatcgactgctaaccaggatagcccattaatgggtgaagcgatttctggtgcatctggttatccgattactggtctggatgtttgggaacacgcttattacttacagtaccaaaaccgtcgtcctgactatattaaagcgttctggagcgttgttaactgggatgaagcagcgaagcgttatcaggaaaaagtgaaataa

SEQ ID NO: 8810 - DNA, 1956 bp, Photorhabdus luminescens
atgaccaaaataatgaagcaccctattcctatcgccattgcagaacatgccctgatgaatgagcaacaatatcagcaagactaccaattatcgttgcaagatcccgacaggttctggggtgaaaaaggaaaaattgttgactggattaagccttacaccaaggtaaagaatacctcttttgatcctggacatatcaatatccgctggtttgaagatggaacactaaacttaagcgcaaattgtctcgatcgtcatctaaaagaacgtggtgagcaaaccgctattatctgggaaggtgatgatccaacagaatccaaagcaataacctatcgtgaactacaccatgatgtatgtcagtttgccaatgtattgaaaaatatgggtattaaaaaaggcgatgttgttgctatttacatgccgatggtgccagaagcagcggttgccatgttagcatgtgcccgcattggtgctattcactctgttattttcgcaggtttttctcctgatgctgtatccgggcgtatcatcgattcaaacaccaaattggtcattaccgccgatgaaggattaagagccggacgtacaatccccctgaaaaagaatgttgatgacgcattaaataatgcagccgttgtcaatgtatccaatgtaatcgtttttaaacgtactggaaatattggtcactggcaatctggccgtgacctttggtggcatgaattggtcgcagacgcgagtgctgactgtccagttgaagagataaatgcagaagacccgctgtttattctctatacctcaggctctaccggtaaacccaaaggggtactgcacaccactggaggttaccttgtatatgcatctctaacatttaaatacgtattcgattatcagccgggggaagtctattggtgcacagccgatgtgggatgggttaccggacatagctacctgctctacggccccctttcctgtggtgctattaccctaatgtttgaaggcgtaccaaactatcctgcggttaaccgcctaagtcagattattgataaacatcaggtaaatatcctatatacagcacccacagcgattcgtgccctaatggcggaaggtgataaagctattgaaggaacaaaacgtacttccctgcgtattatgggatcagttggcgaaccgattaatccggaagcttgggaatggtattaccagaaaattggtaacagcaaatgcccgattgtcgatacctggtggcaaacagaaactggtggcttcatgatcacaccactaccaggcgcaaccgaactaaaagcaggttccgcaacgctacctttcttcggtgttcagcccgcattggttgataatcttggtgaacaactagaaggtgtttgtgaaggaaacctagttattaccgattcctggccaggacaagcacgctcactatttggcgatcatgaccgtttcgaacaaacctatttctctacctttaagggaatgtattttagtggtgatggcgcacgccgtgatgaagatggctactattggataactggtcgtgttgatgatgtgctgaatatttccggccaccgtctaggtactgctgaaattgaatcagctttggtctcccatcctaaaattgcagaagctgctgtcgtaggtaccccacataatattaaagggcaggcaatttatgcctatgtcaccttaaatcacggtgaagaaccctctccagaactctatacagaagtccgtaattgggtacgtaaagaaatcggcccgattgctacaccagatatcctacactggacagactccttaccaaaaacccgttcaggaaaaattatgcgtcgtatcctgcgcaaaatagcctccggcgataccaacaatctaggggacatttcaacactagcagatccaggagtagtagaaaaattgttagaagaaaaacaaacaatgagtatttcgtga

SEQ ID NO: 8811 - DNA, 312 bp, Photorhabdus luminescens
atgaatgatgacatttaccaagggatcgagaataacccgcgtttcaaagaattggttgaaaagcgaggacgttttgcatggttgctatcaataatcacattaattctgtatgtcagttttatttttctcattgcatttgcacctgaatggctaggcactcccctttataatggttccaatattacccgcggaataccggttggtattggtttaattgttatttcattcatcttaaccggcctatatgtcatcagagccaatagcgagtttgatcaccttacctcacaaattctcagtgaggtaacgaaatga

SEQ ID NO: 8812 - DNA, 1650 bp, Photorhabdus luminescens
atgaaaaatttcctgttattagcaataatgttatttcctcatcttacttgggctaacgtaatctctgaaactggagaaaggcaacctgtcaacattcaggctattatcatgtttgtcctgtttgttggtttcacactctatatcacttactgggcctcaaaaaaaacacgctcccggactgattactacacggcggggggacgtattacgggtttccaaaatggaatggcaattgcgggagattttatgtccgcagcatcattcctcggcatttccgctttagtctatacgtctggttatgatggactaatttattctatcggcttcttgattggctggcctattatcctatttctgattgctgaaagattaagaaaccttgggcgctatacttttgccgatgtcgcgtcttatcggttacagcaacgcccaatccgtatattatctgcaattggctcgctgtttgttgtcgccctttatcttattgctcagatggttggtgcaggtaaacttatcgaattgctttttgggcttaattaccatgtagcggtcgtattggttggtatcctaatggtactttatgttctgtttggcggtatgctagcaacgacttgggtacaaattatcaaagctatcctattactagctggtgccacctttatggcccttatggtcatgaaaatagtaaacttcaatttcaatacgttgttcaaagaagccattgcagtccactcaagaggtgaagccatcatgagtccaggagggttggtatctgacccaatatccgcactttctcttggtctggcattgatgtttggtactgctggtttacctcatattatcatgcgtttctttactgtaagtgatgcgaaagaagcccgaaagagcgttttctacgctactggctttattggttatttttacattctgacttttatcatcggcttcggtgctattttactggttagtccaaacccttcctttaaagatactaccggcgcactcattggtggtactaacatggcagccgttcacctcgctagcgcagttggaggcaacctgtttctgggttttatctctgctgtcgcctttgccacaattctagccgttgttgcggggctaacgctggctggcgcatcagcagtatcacatgacctatatgcaaacgccattaaaagcggtaaagccaatgaacgagatgaactgagagtttcaaaaataacagttgtgatacttgggtttatcgcaatcggattaggtattctatttgagaaccagaatatagctttcatggttggattagcattttctattgctgcaagctgtaacttcccaatcattcttttgtctatgtactggcataaactcactacccgtggtgcgttagtcggaggttggctaggattaattacagctgtcgttttaatgattctcggtccaacaatttgggtcagcattctcggtcacgagaaaccaatctatccttatgaatatccagcattattctcaatgattatcgcttttattggttcatggctattttctatcaccgataattcacaacaaggtatgcaggaaagagaacaatttagaatccaatttattcgatcacaaacaggacttggtatcgcacaaggaaaaacacattaa

SEQ ID NO: 8813 - DNA, 540 bp, Photorhabdus luminescens
ttgggtatattaattaagttattaatctgtatgcgaaataaatggccgattattatttttttgactctctctttactaccgataatcttcattagtgatttaaaaggtgagtataagttaaaaataatattactgagtttcttactagcaaatgttaacgcatttttttattgttataaatatcttaagccattggttttacttatttctatattgtggtcgcttaatatatccacatcattttttttctttaatgaacatcagataaatttttcttcaactattgccaacacttttatcaatacaaatagcaatgaagctgtaggtatgttgtcctacaataaatactatgtatttttctttattttcatgctgttaatatattttttgtctattagatggctctcaaataatatagacaaaagattactaaaattcagtttatgggtttttatttttttctgcctattagggcctattgactactatatctcagaaaaaaatattcagatgatattattttatcagaacactttttaa

SEQ ID NO: 8814 - DNA, 1074 bp, Photorhabdus luminescens
atgggaacaccattctataactcatcagcaatggtaaaagcaatatatgataatcaacaaattaaaaatatttcttctgttaaagtgaattttaattatataaaagaagataaagatattgatatctacatattactgataggagaatcagcaagaagagatcatatgtctctgtacggttatgagaaaaccacaacaccaacattagacacgatgcagaaaaatatgctgatattcaatcaagctatttctccagctccagttactatattatccgtacctatttcactttctaatattactttataccagctcagaaataaggctcattatgctgacaatgttatatctttagctaaagatgcagggtttaagacaacttggataagtaaccaaggaagatcaggtaaaaacaatagtctgatcacaattattgctaatatggctgaaagccaaaaatggaatgaatatattggatatgatgaagagttactaacctatttagatgattcattaaaacagaaaggtaagaaatttattattatgcatatctatggcagtcatgagccatcctgtaaccgatttcccgaaaataaactaatatctttttcatcgaacgaagatgataattgctatgacagctcaatagtttatacagatcagctaatagagaaagttattaataaaatcaaagattataaagcatctattctctatttttcagatcatggattacaacgtttagataaaaatggtgacatccgttatcaccacggagttagtcatcctcgaaaagaggcttataatgtccccttatttatctggtataacgataatgttaatccaagatatcatcatactggtgtaataaatacccctttctcaacttcagataattattaccttatcagtgattggctaggtatttatcataaatctccagaatactgccgttcaccattaagcaattgtttcaaatcagagaaagatctaatggtgatcgatggtaataaaaacttaataaaatataatgatcttcttggtgaaaaatatatcaaaaattcaaacaagtga

SEQ ID NO: 8815 - DNA, 513 bp, Photorhabdus luminescens
atggctaaaaatcagattcaattccaaaaaggcatttctattcatgaggttatttcattatatggtcatgaagaacaatgccagaaacaggtgttcgatatgcgctggcctacggggtatcactgccctcattgtgggcatgataagtattgccagttaaaatctcgtctcctttatcagtgcaatcaatgccatcatcagacatctttgacggccggcacattgttttctgcgtcaaaattacctttaactgtgtggtttttggcgatttatctcatgactcaggagaaaaatgggatttctgcacttgaattgtcacgtcaactgggcatttcctacaacgcggcatggcgtatgaaacacaagctaatgaaagcaatgaaagaacgggatgacgaaaagcctctcggcgggtttattcagcttgacgacgcatactggggaggggctcagcatggccccgagggcgaggggcaaaagggaaatgccctttcgttgcggaggtttcaatga

SEQ ID NO: 8816 - DNA, 516 bp, Photorhabdus luminescens
cgacgcatactggggaggggctcagcatggccccgagggcgaggggcaaaagggaaatgccctttcgttgcggaggtttcaatgaatgaaaagggccaccctatgttcatgcgtttcagcgttgtgaaagggtttaagaccgaggaacttacccgttgggctaaagtgtatcttaaaccaaaatcccttgttatttcaaatggattagcttgctttcgggggattaagcaagccgggactttccatttgccccgcgtcaccggcggtggagcgcagagtgttaagcttccttattttcagtgggttaacacaatgataagtaatgtaaaaaattcgatacgcggaacatatcattcgattagcaaaaagtatttacctcgttatcttgccgaattctgtttcaagttcaattggcgctttaaccttaaaaaaacattcgaacagcttatttattcatgtatccgggcagcacctatacctgagtatttactcaagctagctgagattcgatggtaa

SEQ ID NO: 8817 - DNA, 255 bp, Photorhabdus luminescens
cggggggtgccgatagacaacaaccgggcggagaatgcggtccggggtgtggcgctcggccgaaagaactggctttttgcgggttcactggccgcggggcaacgggcggccatgataatgagcctgctggaaacggccaaagccaacggacatgagccctgggtctggttacgtgatgtcctcagccggctgcctgtctggccgaacaatcggttgaatgagctgttgccctggcctgagaatcccttccgttaa

SEQ ID NO: 8818 - DNA, 1266 bp, Photorhabdus luminescens
atgacgctcaatgacttaatcgcgctggatgaccccggccagttccgcctgcgggcactggcgctgcttcagcaacaaggtgattatattcgccagctggaagaggccctgaaacaggcgcaacgctggcgttttggcgcgcacagcgaaaccctgcctgccggtcccaaacgcagtcagtttgaggaagatgccgataccgatatcgcggtgctggaaacccggctgtcacgcctgcatatcaaggaaaacgcgaccccggcccagcctaaacgtcagcctttgccggcgactttaccccgtgaagatatccggctggcgccggagacggagagctgcccggattgcggtcatgccctgcgctttttgcgtgatgaaatcagtgagcgactggaataccgtccggccacgtttatcgtccggcgctatatcagcccgcagtacagctgcgcgcgctgtcagtgtgtgcatgctaaagcccagcccgcccatcttattgaaaagggccttccagagccggggttgctggctcaggtggtggtcgctaaatatcgtgaccacctgccgctctaccgtcagcagcaaatctatgcccgcagcggtgtcaccctggcccgcagcaccctgtcggactgggtggggcaggtggcggtggcgttgcaaccgttagccgatgccctgaagcagacgctgctgacgtccccggtgctgcatgccgatgagaccccgttgccgatactggccccgggaaaaggccagacccagcgagcttacctgtggacgtctgtcaccggccccgatacctcgccggcagtggtatactatgagctgcatcccggccgcagcggccgttatgcccagagcctgctgaaagactggtcgggcggcacgttggtgacggatgactatgccggttacaacgcactgcatgcccgggcggatatcaccgaagcgggttgctgggctcacgcccgccgcaaattctttgaccaatacaaagcgagccaaagtccggtggcgaaacaggcgctggatggcattcgtgacctgtacaagctggagcgaaaaatcaaacaccagccgccggataaacggcgtcagtggcggcagcgttatgcccggccgtggctgaatgagttccggtcctggttgcaaacgatgcagacccaaacggcccccaactcggggttacgcaaagcgatagattacacgctgaagcgctggtcggcgctggtgtgttatctggatgacggggggtgccgatag

SEQ ID NO: 8819 - DNA, 336 bp, Photorhabdus luminescens; identical to SEQ ID NO: 7802

SEQ ID NO: 8820 - DNA, 303 bp, Photorhabdus luminescens
atgagccgtagccgatataccccggaacaaaaacaacaccatgtgacccaatggcgccacagtgacctgacccgaaaacagtattgcgaacagcatcagctgagtttttccgctttccgcgactggattgccgacagtaacaacatcccccaacctctcagccagacactgcccgccctcttaccggtttcactccagcctgacgacgcgcgcaccgtcaccctgcataccccagacggctatgccatcgcctgtccattgacgctgttgcctgacgtgatgcgggtactgacccgatgctga

SEQ ID NO: 8821 - DNA, 135 bp, Photorhabdus luminescens
ctggaaaggccggcgagagagggtgacagccccgtactcgaagatggtatggctgtgagttcgatgagtaaggcgggacacgagaaatcctgtctgaaggtggggggaccatcctccaaggctaaatactcctga

SEQ ID NO: 8822 - DNA, 222 bp, Photorhabdus luminescens
atgccaacgattcattggaatttccttgatcaggatttattaaagtggtggatgaatcgtgacaatcttagtcaagtggtcgaacatttccatatagtaagattagtaatagaaccacaagtttgctttcttgctgcacaaaatgccacacaaaagcaaaagaagcagctcttacagataatagatgaaatgtatctactaaaaaccgggaaaaatggatag

SEQ ID NO: 8823 - DNA, 246 bp, Photorhabdus luminescens
aaaccgggaaaaatggataggatcgattaccagtttcactacaccatttataaatcttgtggaaatccattcttatgctcttttgccaacctgtttaacctagtttaccagaactgctttgaagctattattttcgataaagttgtaccactgaaagctcataaaacaattgttaattctattacccaaggtgacagttacagtgcacttctcgcttgccgaaagttattaacagaacgcgaatga

SEQ ID NO: 8824 - DNA, 1392 bp, Photorhabdus luminescens
atggtaaaaaccgctcgtaatatggcggggctaccctggattgctgcaatagctttctttatgcaagctttagatgcaacaattctcaacacagcattgcccgctattgctgaaagcctcaaacattcacctctggcgatgcaatctgctgttgtcagctatactctgactgtcgctttgctaattccagtcagtggctggttagcagatcgtttcggtacccgccggatatttatgtttgctgtatccttattttctttaggctcccttgcctgtgctttgtcaggtaatttagcttttctagtggtttcacgtgtaattcaaggaattggtggcgcaatgatgatgccagttgcccgtcttgctttattacgtgcatacccacgcagcgaacttctacctgttatgaattttgtcaccataccagggttagtaggaccaattcttggtcccatgctcggcgggctattagtcacttatgctacctggcactggatatttattatcaatattccaatcggtttattggggattatttacgctaaaaagcatatgcctaattttacaatgccaaaacgttcatttgactttttcggtttcatactttttgggctgagtttaatcatggtttctgtcagtttggatttactaggagagagttcgttacccggctatatacctctgacaattatggttggtggttttatgatattatttggttatctgatgcatgctagaaaacaaccccaaccccttatcagcctggaattattccgtattcgcacattctctatcggtattataggtaatattgttacacgcttgggaacgggttgcattcccttcctgatgcctttgatgctacaagttggatttggttattcagcggtcattgccggaatgatgatggcaccaacagctattggttctgttatagccaaatctttcgttactaatgtattaactggctttggatatcgtaaaacgctggttagcataaccattattattggattaatgatttctcaattttcactgcaatcaccagaaatgtctgctgttcttttgtctattccactattcttactaggcatggctgtatctattcaatttacttcgatgaataccattactctcgctgatctgaccgataataatgccagttcaggaaatagtttattagctgtaactcagcagttatctattagcttcggtgttgcggtaagtgcagctattcttcgtttctatgaatctatgcctaatggaacaacagttgataacttccacagtacttttattaccgtaggaataatcactttactctcttcttccaccttcctactattacataaggaagatggagataacatgatcaagaaaaagaacacttaa

SEQ ID NO: 8825 - DNA, 1002 bp, Photorhabdus luminescens
gtggctacaatgaaagatgttgctcgttttgcaggtgtttctacatcaactgtatctcatgttattaataataatcgttatgtcagtgatggtgtgaaaaagaaagttaatgatgcgattgagcaattgaattatgcgccatcagcgcttgcacgaagtcttaaaatcaagcaaaccaaaaccattggtatgttggtaacgaccagtaataatcctttttatgctgaaattgtaagaggggttgaacgaagctgttatgagcgtggttacagccttatcttatgtaatacagaaggtgataccaaacgaatggattacagcatggaaacgttgctgcaaaagcgagtagatggggtgctgattatgtgtactgaaaatcaacacaattcctgtgatgttttgcgccgttatcctcctttacctgtggttatgatggattggtctccatttgatattgtcggtgatgttattcaggacaactccttgttgggaggtgagatggccactaatcaccttattagctgtggttttaaaaaaatagcctgtattgcaggtccacaagataaaacacctgctaatcatcgattgaaggggtatagaaaggcaatggcaaatgctggccttactattcctgacggatatgaaatttacagtgattttgaatttgctggtggttttaaatcaatgcaggaattactacaacatccagaaccgccagaagctgtttttgcaggaaatgatgcaatggccgttggcgcttatcaggctctgtaccaagccggactttctgtaccggatgatatttccatcataggttatgatgatatcgaccttgccccttatatgatcccaccattgacaaccattcatcagccaaaagatgagttaggaaagttagctgttgatactttgctttatcggatggataacccagaaagtgatcctaaattattagtattgactccgacactgattgagcgtagttcagtttctcgttcttaa

SEQ ID NO: 8826 - DNA, 930 bp, Photorhabdus luminescens
atgagtacagcaaaacttgcggtgcttggcagcattaatgctgaccatattttgaatcttaagtcattccctcgaccgggggaaacggtgatcggagaacaatatcaggttgcttttggtggtaaaggtgctaatcaggcggtagcagcaggccgtagcggtgctgacattacatttattgcttgtgttggtgaggacgatattggttttcgtatctgtcagcagttagcaaaggataatattaacacttctggcattgaagtgattaaaggagaaacaacgggtgtagcgttgattttcgttaatcatcaaggtgaaaacattattggtatcaatgcaggcgctaatgcagcgttgacaccggaatatttctatcgctaccaaaatattattgaggaagcagatgcattattgatacaacttgagtctccattggaaacagtgcaacttgctgcaacaatagctaaacaaaataatacaaaagtaatactcaatccggcgccggcccgaaaattatctgatcaattgctctcattggtggatatcattacaccgaatgaaactgaagcggaatatctcaccggcattaaagtagaaaatgattcagatgcggaaaatgcggctcaaatactgcatgggaaaggtattgaaactgtaattatcacattgggtagccgtggggtatggttgagtgaaagtggtcagaaaggaaaaattgttccgggatttaaagttaacgttgtagatactgttgcggcaggagatactttcaatggtgcgctggtgacagcattattggaaagaaaatccatgttatctgccatacgatttgctcattctgctgctgcgatagcggtaacccgtcagggagctcagccttctgttccgtggcgaaatgaaattgatgcatttttaattgaacaggattaa

SEQ ID NO: 8827 - DNA, 891 bp, Photorhabdus luminescens
atgaaagtgaagaaattagtaacaattttatctgctgttgcgctaagtatgactgtaagtgtaaatgcattggcgaaagacactatcgcgttagtcatttctaccctgaataatccattctttgtcacaatgaaagatagtgctcaaaaagaggcggataagttgggctataacctaattgtgttggattctcaggataatccagcgaaagaattagctaatgttcaggatttgacggtacgtggtactaaactcatgctaattaacccgactgactccgatgctgttggtaatgctattattatggctaacaatgccaaaattccggttattactctagatcggatagcgaataaaggtactgttgtcagtcatattgcttctgataaccgcttggggggtaaaatagcgggtgattttatcgccgaaaaattagggaatgaagccaaaattattcagctagaaggtattgccggcacttctgctgcccgtgaacgtggtgaaggatttaataaggtagcacaggaacataaatttaatgtgctagctagtcagcctgctgatttcgatcgaaccaagggactgaacgttatgcagaacttactgacggctcatccggctgtacaagctgtatttgctcagaatgatgagatggcgttaggtgctttgcgcgctttacagacagcaggtaaaagcgatgtattagttgttggttttgatggtactggagatggtatcaaagctgttcaacgtggaaaactaggagcgacaatcgctcagcgtcctgatcaaattggtatcgttggtgttcagactgcaaataaagtgctgaggggcgaaaaagttgaggccgtcatccctgtagaattggagttagttattaaaaaataa

SEQ ID NO: 8828 - DNA, 972 bp, Photorhabdus luminescens
atgaattctaatatatcaccgacatttaaacgttggtttactaaagagtggttactgaaacaaaagtcactgattgcgttgctagtgctgatagcagtagtttcttctcttagccaaaactttttcactttaaataacttgtttaatattctgcaacaaacatcagtcaatgccattatggccgttgggatgacattggttatcctgacatcaggtattgacctgtctgttggttcattgcttgcgttaacaggtgcaatagtagcttcattggttggtacggaagttaatgctctggtggctatcgtgagtgctttggctttaggtgctgcaattggtgcttgtacaggaataataattgctaaaggtaaagtacaggcttttattgccactctagtcatgatgttattacttcgtggaataacccgtgtctatactgatggtagtccaataaatacaggattcagtgataatgccgatctgtttggctggtttggtattggtcgcccactgggaattcctactccagtatggctgatgttgatagtttttgttatcacatggtatatcctgcatcacacccgtttaggtcgttatatttatgccttgggggggaatgaatcggctacccgtttatctggtatcaatatcgataaaattaaaattatcgtttactccttatgcggtttcctgacggcattggcaagtattattgaagttgctcgtctttcttctgctcaacctatggcggggggaggttatgaattagatgctattgctgccgtagttctgggaggaactcgcctggctggtggtaaggggttaattattggtactttgattggtgcactaatcctcggttttttaaataatggcttaaacttattaggtatttcttctaactatcagatgattgttaaagcaattgtaatattgttggcagttctggttgataacaaaagtggtaaataa

SEQ ID NO: 8829 - DNA, 1506 bp, Photorhabdus luminescens
atgcagcctgtactggaactaaaaggaattagtaaatcttttcctggtgtcaaagcattatctggtgcggcattacgtgtttatccaggtaaagtgatggcactggtgggagagaatggtgcaggtaagtccacgatgatgaaagtgttgactgggatatataccagagatacaggcacagttcattatttaggaaaagaagtgattttttctggccctagatcctctcaggaagcggggatcgggattatccatcaggaattaaatcttattccccaactgactattgctgaaaatattttcctgggacgcgaatttgttaataaattcggtgcaattgactggagaaaaatgtatcaggaagccgatcgcctgttaaaaaaattgaatctgagttacagcagtcaccgtttagtcgctgaactttctatcggtgatcaacaaatggttgaaattgctaaggtgctgagttttaaatccaaagttatcattatggatgagccgacggatgcgctgactgatacagaaactgaatcattatttcgcgtaatatatgaactaaaatctcagagatgtggcattgtttatatctcccatcgtttgagagaaatttttgaaatttgcgatgatgtaacggtatttcgtgatggacaatttattggtgaaaagtcagtaaaagagctaaaagaagagactctgattgaaatgatggttgggcgaaaactggaagatcagtatcctcgcctgaatttacctcggggtaaaaaacgacttgaagttaagcagatttctggccccggtgtgacaaatgccagtttttccctttatagcggggaaattttgggtatatcagggctaatgggggctggccgcactgaattgatgaaaattatttatggtgcgttgccaaaaactcaggggcaaatcacactggatggaacccccattgtaattcgtaaccctcaggatgggttagcttgtgggattgtttatatttcagaagatcgtaaacgtgatggcttagttttgggaatgtcaatcaaagataatatgtctcttactgccttgcgttatttcagtaaccggttaggtggtcttaatcataaagaagaacagaatgcagttagtgactttattaaattgtttagtatcaagacaccttcaatgggacaagttattggtttactttctggtggtaatcagcaaaaagtagctattgcccgtggattaatgaccagaccaaaagttcttattctggatgaacctacgcgtggtgtagatgttggtgcaaaaaaagaaatttatcagttaattaatcaattcaagaaagaggggttaagcattattctcgtttcttctgaaatgccagaagtgataggaatgagtgatcgtattttggttatgtgtgaaggccagatcagtggagaattttttgctgaacaggcaactcaagaaattttgatggcagcggctgtaggcaaacaatatggagcgattcaggagtaa

SEQ ID NO: 8830 - DNA, 420 bp, Photorhabdus luminescens
atgaaaaaaggtgtattacttaattctgaaatttcagccgtaatttctcagctagggcatactgaccagattacaattggtgatgctggattaccaattccttctttagcccagcggattgatttagcgctaacccagggaattcccagttttatatccgttcttaatgttgttacacaagaaatgcagattgaagctgcattcttagctgaggagatcattggccataatcctttaatacatcaattaatattaactcaaattaaagagcttgagaaacagcaagggaattcaattactgtagattatattagtcataatgtgttgaaagaaaaaacaaaacatagccgagcagtgattcgcacaggagagcattctccttatgccaatattatccttggtgctggtgtgactttctga

SEQ ID NO: 8831 - DNA, 1512 bp, Photorhabdus luminescens
ttggtaagaatcatgttgttagcagaaaaaatagtttgcttaagtcattatctggaaagtggtctgtatgaaagacaacagactattcgtttatgtttgctagcggcattgtgtggggaaagtgtttttctacttggtcctccaggcatcgcaaaaagtttgatagcccgccgattgaaatttgcatttcgtgatgccagagcatttgaatatctaatgactcgcttttcaacccctgaagaaattttcggccctctctctattcaggcactgaaggaagaaggacgttatcaacgtctaaccaacggatacttacctgaaactgaaattgtcttccttgacgaaatatggaaagccggcccggcaattcttaataccctactgactgcaattaatgaaagaaaattcagaaatggggatacagaagataaaattccaatgcgattacttataactgcatccaatgagctacctgaagcagataacagtctggaggcgctttatgacagaatgctaattcgtatctggctggataaaattcaagaaaagaagaatttccgagcgttactctctagccacaaaaatgaaaatgataaccctgttccggcaaacattcaaataacaagtgaagaattccatcaatggcaaaaagagattgataaaatagttttaccagacagttgttttgatattatttatcatctacgtcagcaacttgatgcaacagaacattcaccttacgtttcagacaggcgctggaagaaagccattcatttattacaagcaagtgctttcttcaatggcagaaaagagatatcacctcttgatttaatattactgaaagattgcctgtggcatgatcttcactcttttaaattattaccccaatacttgaatactctgatgaccgaacaagcatataggcaaagaatattatctcaacaaattgattcgctttatcaccaatggactcaagcctgtcaggataaaaatgatcagcaggcgttaaagctggaaaaacaaacccgtctgtttggacgtaaaatacaatattctctacccgatcatatcaatgaagaaaaattgattctattcctgcatacacctcttcatctccatgatattaaagttaattttattgaattggaaaaaaaagcgttgaatatctggataaacaaaggcagagaattatcagcacgtctgaacggcattggttttccacaaaatatagcagccgaagttaattcagcacatcagccagagatttttgatatcagccgccgttcatccacgctatatttaccagatcatcaacatcagcaaaatgaagaaaacaacgagtggcaggaaagattagaaaaatttaatcaagaaatccatcaccaacaccaattgtttaatcagcatcagccatgtttatttattgaaagtcattggcttgctacgatagagcaaagctttatccagttatcagataaaattaagcagttgaaaataaaaataggcagctaa

SEQ ID NO: 8832 - DNA, 1458 bp, Photorhabdus luminescens
atgattagtttgacaacccttgatctcttactgtcaataaacgaaggagagatgatagaagagatcatattaacgcttttagcttcacctcagttagctatcttttttgaaaaacatcctcgcttgaaacgtgcactattaaaagatatccctggctggaaacacgatttacagcaaaggattaaagaagcgctcattcctgtaactctggcagaagaatttcagttatatcaacaaatactgtctgccaatacaaattatttttaccttaaacttcccgatattttagaaacgctgaaccgaattgaatccccttttagtgaagaagcacagaaactcgcaaccaacaccattgctgattcaaatacactacaaaccctatttattcaacgatggaggatcagtttgatcctgcaaactacaaccttccataagcaattgctggagcaagaaaaagagcaattactggcagaactgcaacaaaagctgacactaagcggtaatcttgatcctgtttttagtgaaaatgatagggcagcggggcgattatgggatatgagcaaaagtcagttaaatcattctcaaaatgataagcagttattgatccactatagtgaatttcttcaccaacagccggaactgaaaaaattagctcaattacttggacgcagccaatctgtaaaatcaaaaccacaagaaaaccattttttcgaaccagttactacaatcgagcgaacacccgacatcattcctgaacaggtaaatggtatcggacaaagtgatgatattctgcgcctattaccaatagaattagcaatattaggaattgaagatctggaatatgagttttatcgcaaattagtggaaaaaaaactcctgacctatcgcttacaaggtgataactggcgagaaaaaacaacattacagccagtcactcattatagccaggaagaaaaacctcaaggaccatttattatttgtgtagatacttccggttctatggggaaattcaatgaaaaatgtgccaaagctttttgtctggcactgttacgcattgctctagctgataatcgcaactgtcatatcatgctatttacaacgggaattgtgcactatgaactatcttcaccagatggtctggagcaagctactcgttttctcagccaaactttcaaaggagggacagatctcgctttctgtctgacaagcacaatagaaaaaatgaaagaaaaatgttggaaaaatgctgatgctgttgttatctcagatttcattgcccagcgtctgccgaactcactaatccatcagataaaaaatctgcaactgcatcagcaataccgcttccatgcggtctccatgtcccaatatggtaagcccgatattatgcggatatttgatcatatctggcactttgataccggacttaaaagccgtttactgcgaaaatggcgtcactaa

SEQ ID NO: 8833 - DNA, 993 bp, Photorhabdus luminescens
atgaaaaagtcgtttattgaaaagcagcaacaaatcagttttgttaaatccttcttttcccgtctgctggaaagcaaactgggtctgattgaagtacagggaccaatcctaagttgtttgggagatggtattcaggacaacttgtccggccatgaaaaagctgttcaggtgaaagtaaaaactttaccggattcaactttcgaagtcgtacattcgttggctaaatggaaacgtaggacactgggtcgttttggctttcagcctgaacaagggctttacactcacatgaaagcattgcgtccagatgaggatcgcttaacaccaattcactctgtttatgttgatcaatgggattgggaaaaagtgatggaagatgggcaacgctcacttgcttatcttaaacagacagtaggtaaaatctacgaagcaataaaagaaacagaaaaagctgtcaacaaagagtttggtctggcaccgttcctgccagatcaaattcactttgttcatagcgaaacgcttctgagccgttatccggatctggatgcaaaaggccgtgaacgggctattgctaaagaattgggtgctgttttcctcattggtattggtgcgaaattatctgatggtcaatctcatgatgtgcgtgcgcctgattatgatgactggacgacaccaaacagcgatggtttcgttggtctaaatggcgacatcattgtctggaaccctgttttggaagatgcgtttgagatctcttctatgggtatccgtgttgatgcagaagcattggagcgccagttagctctgactagtgatgaagagcgtttacaatatgattggcatcaggcgttactcaaaggcgacatgccgcagtcgattggtggcggtattggtcaatcccgcttagtgatgttactgctgcaaatgaaacacattggtcaagttcagtgcagtatctggtcacctgaagtacgcgaaactgtagaagatatgctttaa

SEQ ID NO: 8834 - DNA, 462 bp, Photorhabdus luminescens
atggcagaaatttatcagatcgacaatctagaccgtgacatacttcacgctttaatggacaacgcacgtacaccttatgccgaactagcaaagaaatttgctgtcagtccgggaacaattcacgttcgcgtggaaaaaatgaagcaagcaggaatcattaccggtaccagagtcgatatcagcacgaaacaacttggttatgatgtgtgttgctttattggcattattctcaagagtgctaaagattacccatcagctctaaaaaaactagacaacctggatgaagtagttgaggtttactacacaacaggccactacagcatctttattaaagttatgtgccgttcaattgaatcccttcaagatgtacttatcaacaaaatacagactatcgatgaaattcaatcaacagaaaccctgatctccttacaaaacccgattatgcggacaatcaagccataa

SEQ ID NO: 8835 - DNA, 441 bp, Photorhabdus luminescens
atggctactattaccttaatcagcggcagcacaatgggcagtgccgaatatgtagctgaacatatggctgaaattctggaagatgctggtttttccactgaaatgctacatggcccctccttagatgaacttcctcaggaaggaatctggctagtcgtcacatccacacatggagcaggagaattgccagaaaatatacaaccattggccgcagaaatttctgaccaaaaacccgatctcagcaaggtaacgtttggtgctgttggccttggtagttccgaatacgatactttttgcggtgcaataagatcatttgaccaactattgatagaaaatggtgctaaacgtctcggcgatcgtctggaaattgatattcaacaacatgagatccctgaagatccagcaggagaatgggttaaatattgggcaaacacactctaa

SEQ ID NO: 8836 - DNA, 1890 bp, Photorhabdus luminescens
  misc_feature (455)..(455): n is a, c, g, or t
atgttttatccagaacaatttgacgtcatcattatcggtggtggtcacgccggtaccgaagcggctatggcagccgctcgtatgggtcgtcaaaccctattgctgacccacaatattgacactttgggccaaatgtcatgtaacccagccattggtggaatcggtaaagggcatctggttaaagaaattgatgcgcttggtggcttaatggctaaagcgactgatcaagctggtatccaatttagaactttaaatgccagcaaagggcccgcagttcgtgcaacacgtgcccaagcagatagggttctctatcgtcaagctgtacgcatggcattggaaaaccaacctaatctaatgatcttccaacaacctgtagaagatctcattgttgaaaatgacaccgttactggcgcagtaacacgcatgggccttaagttcagagctaaagctgttgntttgactgtaggaacatttcttgacggtaagatccacattggtttggaaaattatagtggtggaagagctggtggtcccccagccatttcgttggcacagcgcttacgtgaattgcctttacgtgtaaacagattaaaaacaggaacaccaccacgtattgatgccagaactatcgattttagtcagctaacacaacaactaggtgataatccaacgccagtattctctttccttggaaatgtgaagcaacatccacaacaaataccgtgttacatcacccatacgaatgaaaaaacccacgatgtgatccgcaataatttagatcgtagcccaatgtatacggggatcattgaagggatcggtcctcgctactgcccttcaatcgaagataaggtcatgcgttttgcggatcgtgatgcccaccagatcttccttgaacctgaaggattgactagtaatgaaatctatccaaacggtatttctaccagcttaccgtttgacgtacagatgcaaattgttcactccatgaaaggaatggaaaatgctcgaattattcgtcctggttatgcaatagaatacgatttcttcgatccaagagatctgaaacaaacattagaaagtaaatttatccacggtctattttttgctggacaaatcaacggcacgacgggttatgaagaagcggctgctcaaggactcttggcaggccttaatgcagctcgttacgcttcagaagaagaaagttggttccctcgccgtgatcaagcttatattggcgttttagttgacgatttatgtactttagggactaaagagccgtaccgtatgtttacttcacgagccgagtatcgcttaatgttacgtgaagataatgcagacctgcgtttaacagaaaaaggccgtgagttaggtctggtagatgattcacgttgggaacattattgccgtaaattggaaatggttgaacaagaacgccagcgtttacgtaatatttggattcaccctaattcaaataatcttaatgatataaacaatatattgaaaatgccattgtcgaaagaagctaatggtgaagatctactacgtcgtcctgaaatgaactataaacttttgacctcattgcccctgttttctccaagtcttgaagaaccacaagccgctgatcaagttgaaattcaggtcaaatacgagggatatattgcccgtcagcaggaagaaatcgaaaagcagctacgtaatgaaaacacatcattaccagtcgatctcgactaccgccaaatcagcggtctttccaatgaagttgtcgctaaactcaatgatcataaaccgagttcaattggtcaggcttcacgtatttcaggggtaacacctgcggcaatttcaattttacttgtgtggttgaaaaaacaaggattattgcgccgcagctcctga

SEQ ID NO: 8837 - DNA, 621 bp, Photorhabdus luminescens
atgcttaacaaactagaattgttgctgaccaaagcaggaatagaactgtcactacagcaaaaacagcagcttgtagcctatgttgatatgctcaataagtggaataaggcttacaatctcacatcagtacgtgagccagaacaaatgctggtgcgtcatatcatggacagtattgttgtcagcccttatctgcaaggccatcgttttattgatgtgggcacgggcccggggttgccaggtattccgttagctattgttcgtccagattctcatttcacattgctggatagtttaggcaaaagagtgagatttttgcgtcaggttcagcatgaacttgatttggtaaatatcgaaccagtacaaagtagggttgaagcgtattcttctgaaccaccttttgatggcgtaataagccgtgcttttgcttcgttaaaagatatggtctcttggtgtagtcatttgcctgagcctattcatggacgtttctatgcacttaaaggtgtgcttccagaagaggaactgactatcttgccttttggaatttctatcgattcggttattaaattaaatgttcctgaactggaagggcaacgtcatttggttatccttaaatcaaactaa

SEQ ID NO: 8838 - DNA, 378 bp, Photorhabdus luminescens
atgtctgtatccctttacagcggtaaaattgcactgaagctgctttttttgcagttaatgacttttgttgttctcagtgtggctttttgcaccaaaagtatagaatggggcgcttctgcttttgctggtgggttagcatgttggttacctaatgccatattcatgctgtttgccagttttcaaaaagcaaaagaagaagaggttcctgtacgtattgcgtggtctttcgctgttggcgaagggttgaaagttattattacaatagctgtgctggttgttgctttaggcgtgtttaaagcggcgtttgcaccactaggtttagcttatttagcggtgctgattgtgcaaattatcgcacctgctgtgataaacgattag

SEQ ID NO: 8839 - DNA, 825 bp, Photorhabdus luminescens
atgtctgcatcaggagaagtttcaactgcaagggactacataggccaccacctgaataaccttcagttggacctacgtacctttgagttggtcgatcccaactctggtggttctgcaacgttctggacgttgaacattgactcgctttttttctcagtcgtattagggattttatttctgtatgtattcagaaaggttgcggttaatgccaccagtggcgtacctggcaaacttcagactgctatagaattgatcatgggttttgttgataacagcgttcgtgatatgtatcacggcaagagcaaggttattgcccccttggcactgacagtgttcgtttgggtgttattaatgaacgtgatggacttattgccaatcgattttctcccttatatcggtgaacatttctttggtttacctgctctgcgtgtcgtgccaacagcagatgtcagtgttaccttgtcgatggctattggtgtctttgtcctcatcctctactacagcattaagatgaaagggattggtggttttacaaaagagctgactttacagccttttaatcatccactgtttattccaattaacttaattctggaaggagttagcctgctttcaaaaccggtatcactcggtctgcgactgtttggtaacatgtatgcgggtgaattgatctttattcttatagctggtctgttaccgtggtggtcgcagtggttactcagcctgccttgggctattttccacatactgattattacgttacaagcctttattttcatggttctgacgattgtttatctgtcgatggcatctgaagaacattaa

SEQ ID NO: 8840 - DNA, 240 bp, Photorhabdus luminescens
atggaaaacctgaatatggatctgctgtacatggctgccgctgtaatgatgggcctagcggcaatcggtgctgcgatcggtatcggcatcctcggaggtaaatttttggaaggcgctgctcgtcagccagatttaatccctcttctgcgtacacagttctttatcgttatgggtctggttgacgccatcccaatgattgctgtgggccttggcttgtacgtaatgtttgctgtcgcgtag

SEQ ID NO: 8841 - DNA, 471 bp, Photorhabdus luminescens
gtgaatattaatgcaacaatcctcggccaggccattgcgtttgtcttgtttgttatgttctgtatgaagttcgtatggccaccgatcatggcggccatagaaaaacgtcaaaaagaaattgctgacggtttatcttctgcggaacgtgccaaaaaggacctggacttagcgcaagccaatgcgaccgaccaaatgaagaaagcgaaagtggaagctcaggtcatcattgaacaggctaataaacaaaaagcccagatccttgatgatgcaaaagcggaagctgagcaggaacgtaacagaatcgtaacgcaagctcaggcagaaattgatgccgagcgtaagcgtgctcgggaagagttgcgtaagcaggtcgctatgttggctatcgcaggtgccgagaaaatcatcgaacgttccgtggatgaagctgctaatagcgacatcgttgataaactggtcgctgaactgtaa

SEQ ID NO: 8842 - DNA, 534 bp, Photorhabdus luminescens
atgtctgaatttgctactgtagctcgcccctacgccaaagcagcttttgactttgctgtggaaaaacaatcgcttgaacaatggcagaatatgctggcgttcacagctgaggtgactcgtaatgagcaagttggtgagctgctttctggttcattggcatcggaaacattagctaatacctttatcgcaatttgcggtgaacaggtcgatgaacatgctcagaactttattcgtgttatggcagaaaacggtcgcttattggcattgccggaagttttgcagcaatttattcaattgcgtgcatcacttgaatcaaccgttgatgttgaagtgatttctgccaccgaactgagagaacaacagctggctaaaatttctgtagcgatggaaaaacgtctgtcacgcaaagttaagctgaattgcaaaattgataagtctgttattgctggtgtggttgtccgcgcaggtgatttggtgatcgatggcagtattcgtggccgtttagatcgcttaacagacgtcttgcagtcttaa

SEQ ID NO: 8843 - DNA, 1542 bp, Photorhabdus luminescens
atgcaactgaattccaccgaaatcagcgaactgatcaagcagcgcattgctcagttcaatgtagtgagtgaagctcacaatgaaggtacgattgtatccgttaacgacggtatcattcgtattcacggtttagccgaagttatgcagggtgagatgatcgcactgcctggcaatcgttatgcaatcgcattgaacttggagcgtgactccgtaggtgcggttgtaatgggtccgtatgctgacttagcagaaggtatgaaggtcaaatgtacaggccgtattcttgaagtacctgttggtcgtggtctgcttggtcgtgtagtaaacacgctgggtgagccaattgatggtaaaggccctgttgagcatgatggtttctctgctgttgaaatgatcgctcctggtgttattgatcgtcaatctgttgatcagccggtacaaactggttataaatccgttgacgctatgatccctatcggtcgtggtcaacgtgaactggttatcggtgaccgtcagacgggtaaaacagcactggctattgacgcaatcattaaccaacgtgactcaggcataaaatgtgtctatgtcgcagttggtcagaaagcttctactattgcgaacgttgttcgtaaattagaggagcatggtgctcttgccaatactattgtggttgttgcgactgcttcagaatctgcggcattacaatacctggcaccatattcgggttgtgcaatgggcgaatacttccgtgaccgcggtgaagatgcgctgattgtttatgatgatttgtctaagcaggctgtagcttatcgtcaaatttctctgttgctccgtcgtccgccaggacgtgaagcattcccaggtgacgttttctatctgcactctcgtctgctggaacgtgctgcacgtgttaatgctgaatatgtggaaaaattcaccaatggtgaagtgaaaggtaaaaccggttctctgacggccctgcctatcattgaaactcaggcaggtgatgtatcagcattcgtaccaacaaacgttatttcaattactgatggtcagattttcttggaatctagtttgttcaatgcggggattcgtccagcagttaacccagggatttccgtatcccgtgtaggtggcgctgctcagactaaaatcgttaagaaactgtctgggggcattcgtactgctctggctcaatatcgcgaactggcagcgttttctcagtttgcttctgaccttgatgatgcaacccgtaagcagttggatcatggtcaaaaagtaactgaattgctgaaacagaaacagtatgcgccaatgtctgttgcacagcagtcattgtctctgttttctgcggaacgtggttatctggaagatatcgaaattgctaaggttattgatttcgaatctgcgttgcttgcatatgccaaccgtgaacatgctgatcttctaaaagagattgaccagtctggtggttacaacgaagagatcgaagcaaagctgaaagctctgctggattccttcaaggcaactcagtcctggtaa

SEQ ID NO: 8844 - DNA, 864 bp, Photorhabdus luminescens
atggccggcgcaaaagagatacgtaccaagatcgccagcgtgcaaaacacgcaaaaaatcactaaagcgatggagatggttgctgcgtccaaaatgcgtaaaacgcaggatcgcatggcggccagccgtccttatgcagaaaccatacgcagcgtgattggtcaccttgcgttaggtaatctggaatataaacatccgtaccttgaagagcgtgaaaccaaacgtgtcgggtatctggttgtttctaccgatcgtggcttgtgcggtggtttgaatactaatctgttcaaaaaactgctttcagaaatgaaagactggtctgataaagatgtccagtgtgagctggcgcttatcggctctaaggctacctctttctttgcttctgttgggggtaacgttgttgctcaggtaacaggcatgggagataacccttcactgtctgaattgatcgggccagtgaatatcatgctgcgggcatacgatgagggacgtctggataaactgtatgtggtgacaaacaagttcatcaatacaatgtcccaggaaccgactattactcagttattacctctgcctgccggagatgatgaaacactgaagaagaaatcctgggattatttatacgaacctgatcctaaggcgttgctagatatactgctgcgtcgttatgtagaatcgcaggtttatcagggcgtcgttgaaaacctggctagtgaacaggccgcacgaatggtggcgatgaaagccgcaactgataatggtggcagcctgatcaaagagttgcagttggtttataacaaagctcgtcaggccagcataactcaggagctgaccgagattgtctcgggtgcttccgcggtttaa

SEQ ID NO: 8845 - DNA, 1383 bp, Photorhabdus luminescens
atggctactggaaagattatccaggtaatcggcgccgtggtggacgtcgaattccctcaagataccgtaccaaaagtatacgatgctcttgaggttcaaaacggcgaagctaagctggtgctggaagttcagcagcagttgggcggcggcgttgttcgttgtattgcaatgggtacttctgatggcttaagccgtggtttaagtgtcactgatttaggccacccaattgaagttccggttggtaaagcgacattgggccgtatcatgaacgtattgggtgaaccaatcgacatgaaaggcgatatcggtgaagaagagcgttgggctattcatcgtccggctccaagctatgaagaattatctaactctcaagaactactggaaaccggtattaaggtaatggacctaatttgtccattcgctaagggtggtaaagttggtctgtttggtggtgcgggtgtaggtaaaaccgtaaacatgatggagttgatccgtaacattgcgattgagcattcgggttactctgtatttgccggtgtaggtgaacgtactcgtgaaggtaacgacttctaccacgaaatgactgactctaatgtactggataaagtatctctggtatatggtcagatgaacgagccgccaggaaaccgtctgcgtgttgcgttgacgggtctaacaatggctgagaagttccgtgatgaaggccgcgatgttctgttatttgttgataacatctatcgttataccttggcaggtactgaagtatccgcactacttggtcgtatgccatctgcggtaggttatcagccaactctggcggaagaaatgggtgttctgcaagaacgtattacttctaccaaaaccggctctatcacttccgtacaggctgtttacgtacctgcggatgacttgactgacccatctccagcgacgactttcgcccacttggacgcgaccgtagtactgagccgtcaaattgcttctttgggtatttatcctgcggttgatccgttggattctaccagtcgtcagctcgatccattggttgttggtcaagagcactataatgttgctcgtggcgttcagtctatcctgcaacgttatcaggaactgaaagatattatcgctatcttgggtatggatgaactgtcagaagacgataagctagtagttgcgcgtgctcgtaagatccagcgcttcctgtctcagccgttcttcgttgcagaagtctttactggttcaccaggtaagttcgtttccctgaaagatactatccgtggctttaaaggtatcttagacggcgactatgaccacctaccagaacaggcattctacatggtaggtaccatcgaagaagctgtggaaaaagcgaagaaactttaa

SEQ ID NO: 8846 - DNA, 423 bp, Photorhabdus luminescens
atggctgcaatgacttaccatctgaatgttgtcagtgctgaaagccggatgtttgaaggcttggtacagaaaattcaggtgacaggtagtgaaggtgaactgggtatttacccagggcatgctccgctactgactgccataaaacctggcatggtacgtattgttaagcagttcggtgaagaagaggtcatttacctttctgggggtatccttgaggtacaaccgagcggcgttatcgtactggctgacactgcgatccgtggtaaagatttggatgaagctaaggcgttggaatctaaacgtaaagctgaagaacacatccgtaattctcacggtgatgttgactatgctcaggcatcagctgaattgtctaaagcgattgcgaaacttcgtgtaatcgagttaacaaaaaaagcgatgtaa

SEQ ID NO: 8847 - DNA, 1374 bp, Photorhabdus luminescens
atgtctaacagtgcaaaaagtgttgtgatccttgccgcgggtaaaggaacccgcatgtactctgatctccctaaagtgctgcacttgctggccggtaaacctatggttcagcatgtgattgatactgcaatggcattaggggctaaaaatgttcatctagtttatggacatggtggtgacctgatagagcaaaccctttctgatcaaacactgaactgggtattacaagcagagcagttagggactggtcatgcgatgcagcaggcagcaccacatttcgctggtgatgaagatattttaatattgtatggcgacgtaccgcttattggtgcagatacccttgaacgcctactcgctgttaaacctgagggtggtatcggtttattgacagcaattttggacaatccaacaggttatggtcgtattgttcgtgaaaacggagaagtaacgggcatcattgagcaaaaagacgcgactgaagaacaacgtaaaatcaatgaaataaacacaggtattttggttgctaatggtagtgatttaaaacgttggttgtcccaattggataacaacaatgttcagggtgaatattaccttactgatgtgattgcgttggcttataaagaaggtagaaaaattgaagcggtgcatccaactcgcttgagtgaaatggaaggtgtaaataaccgtcttcaactttccgctcttgaacggatttatcaatctgagcaagcggaacaattattactagcgggtgttatgttgttggatcctgcccgttttgatttacgtggtacattaattcatggccgtgatgtggttattgacactaatgtcattattgagggtaatgtaacccttggtaataacgtacagattggtaccggttgtgtgttgaagaattgcatcattggtgatgattctattattagcccctatacaatagttgaagattctgaaatggaaactggttgtactgttgggccttttgcacgtttgcgtcccggttctaaacttgctgaaaaagcccatgtagggaatttcgttgagatgaagaaatcttatctgggtaaaggttctaaagctggacatttgacttatcttggcgacgcagatattggtcgtgatgtaaatattggtgcaggtactattacctgtaattacgacggcgctaataaatttaagaccattattggtgacaatgtttttgttggctctgatactcagcttgttgctccggtgattgttgctaaaggcgctacaatcggagcggggacaacagtgacaaaaaacatcgctgaaaatgagctggttgtaagcagaactaaacaaacacatattcaagggtggaaacgccctgtgaaggaaaaaaaataa

SEQ ID NO: 8848 - DNA, 1830 bp, Photorhabdus luminescens
atgtgtggaattgttggtgcagtagcacaacgagatattgccgaaatcctgattgaaggacttcgtcgtttggaataccgtggttacgactccgctggtttggcggttgttgataacgaaaaaaatatgttccgcctgcgtgaagtcggtaaggtacaagtacttgctgatgaggttgataagcagccagtccttggtgggacaggtattgctcatacccgttgggctacacacggcgaaccgaacgagaaaaatgctcacccgcatgtatctgattatattgctgttgttcacaacggtattattgaaaactatgaagaattacgcgttcaattaattgcactcggttatcagtttatctcggatactgatacagaagttattgctcaccttgttcattgggaacaaaaacaaggtggtactttgttggaagctattcaacgagttattcctcggttgcgtggtgcttatggtgcagtcatcatggatagccgtgatcctggaacaataattgctgcaagatcgggcagtcctttagttataggcttgggcgttggagaaaactttctggcgtctgatcagttggcgctattgcctgttactcgtcgttttatcttccttgaggagggggatatcgctgaagtcactcgtcgtactgtgcgtatttttaatactcagggcaaaccggttgaacgggaacagattgaatccaatattcagtacgatgctggtgacaaaggtatctaccgtcattacatgcaaaaagagatctatgaacagccaatggcaattaaaagcactttggaaaggcgcttgagtcatggacaagtagatctgtctgaacttggccctaatgcagctaaattattagctaaagtagagcatattcagattgttgcctgtggtacatcctataacgcaggtatggtttcccgttattggtttgaagcattggctggtattccttgtgatgtggaaattgcttctgaatttcgttaccgcaaatcagcacgccgttcaggaagcttactgatcacattgtctcaatcgggtgaaactgcggatacattagcagcactgcgtttatccaaagaacttggctatctcacatcgttaactgtctgtaacgtagcgggttcttcattagtacgtgaatctgattttgctctgatgaccaaagctggtgcagaaattggtgttgcttcaactaaggcatttacaactcagttgacagtattactgatgctggtggcttaccttggacgtttgaaaggtgttgatgcagaacaggagcaagaaattgttcatgcattacatgcattgccaagccgtatcgaaggcatgttatcgaaagataaaattattgaagtgctggcggaagatttttctgacaaacaccacgctttattccttggccgtggtgatcaatatccgattgcggttgaaggtgctctgaaattaaaagagatttcttatatccatgctgaggcttatgctgccggtgaattaaaacatgggccattggcactgattgatgcagatatgccggttatcattgtagcaccgaacaatgaactgctagaaaaactgaaatctaatatcgaagaagtacgtgcccgtggtggattgctatatgtttttgctgatcaggacgcgggttttaccgatagtgaaggaatgaagattattccattgccgcatgttgaagagctgattgcaccaatattttatacagtaccactgcaattgctttcctatcatgttgctctgatcaaaggaactgatgttgatcagcctcgtaatttggctaaatcagtgactgtagaataa

SEQ ID NO: 8849 - DNA, 255 bp, Photorhabdus luminescens
atgaaaccagatatccatccaaactatcgggtagttgtatttcacgataccagtgctaatgcctattttacaattggctccacgattcgcacagaacggacaattactctgaatggggaagagtatccatatgtcactgttgatgtgtcatcggaatcacaccctttctatacgggtaagcagaaaactttatctcaggaaggcagtactgcgcgattccagaaaaaattcgggcgttttattggtaataaataa

SEQ ID NO: 8850 - DNA, 141 bp, Photorhabdus luminescens
atgcaggtgttaagttcacttaaaacagcaaaaactcgtcatccggattgtaaaatcgtcagccgtcgtggtcgattatatgttatttgtaaatctaatccgcgttttaaggcagttcagggaaagaaaaagagacgttga

SEQ ID NO: 8851 - DNA, 1056 bp, Photorhabdus luminescens
ttgatagaaacgatgaatttggcgaaaaatgctcttcctaaggactcaactgaatcattcacatcaggcaatcacaatattaaaacaggtggaaattattccagtttgtcactaacaaagggagatggccgatatgttttcatagaaactacttctcatgaagaaggatctttttgtgcaataggacatcgtgagtctaattcctcaaatataaatgttgttcacctccctcgaaagagtggctatattgcaatagctaatgaacattattctaaatcagagtctgacagtcgatttattcagttaaataccgatacaaaaacatcaggttatatattagttaaaaccgcaaactattatgatgatcctaattcacgtcatttggggcgttcgggatttttgaggcccaatggaattgataatctgggggcattagcaattcatatagctcatcctgacgttgatagtccgcagcacgctcgtgggctttctttcggatatggcggttattcagaagcattcagcgtttctacttatgctttcgatgaaagtggtaactttagggggaaacgtaaaatattaacagaggatgatattcttgttggtattccactaccgtggtctaaaccaactgcaccagcaggttatcttatttgtagtggtcagcagtttgacaaatctatgtaccctaaattaggggaagcatatccctctggtgcactccctgatctacgtggtgaatttattcgaggttgggataatgggagaagtattgattctgggcgggagattttatctcatcagaattcaacaaagttaccgaatctttacacccatgcagcctctgaaaatatagggctactggtatctcctcctattaatcatttttcaagtaattatccatcagaaattatggctagtgattttgaggaagcagaattcgggagcggccaatatttttcgaccccattaaatcctactggttcagtttcattatctacatttagagtacgtccccgtaatatcgcatttaactatatagtgagagcagcgtaa

SEQ ID NO: 8852 - DNA, 585 bp, Photorhabdus luminescens
ttgggaaataatggattagcaaccaaagccggttggttgataatctaccatgcagagccttattccagagaatttattggtgccagaccagaatatttaatggaaggagtgggacttcctgccaattcttatccagatgcaccacaacttccagattctgatgacatggctgtttgccgcagcgaagataaaagttgttggcaaattgtacctgattaccgaggaaaaatagtttataacacacaaaccttagcacaatatgaaattacagagttaggtgaactaccagaatctctgacattcaaacaacctgtcactgattttgataaatgggatggtaaacagtgggtaactgacaaatatgcaataaaggatagccagattaaacaggcagatcagcagcgggtagcactattacgacaagcgaatgaaacagttacattattacaacatgctgtagatattgagttggtttcagaaaaagaaaaattattgttgttagattggaaaaagtatttagtattgcttagccggattgacatttcatcagcaccagatattaactggcctgaaaaaccagaataa

SEQ ID NO: 8853 - DNA, 342 bp, Photorhabdus luminescens
atgataatattaaataaattaatagacaaaaatggctatgaatatgttaatgtgccagctgaaccccatcaattaatctcaatgggtttcagtgctcaagaagctcaagcattatatcagcaagccattatcgaacagaaaaataaaacctatcaccgccaaaaatattatttattagaacaagcaacaattaaaatttcaccattgcaagatgctattgatttaggcattgctactgatagtgaaataacaatgttgatggagttgaaaaaatatcgcgtggcgttaaatagaatggataccacggcaaaagatattaagtggccggaaaaaccagaataa

SEQ ID NO: 8854 - DNA, 1011 bp, Photorhabdus luminescens
ttgatagaaacgatgaatttggctcagggagcagtgcaaaatagccggaaagtgaatggcaaagttctgactgaggatatcaatattacgtctcaggatatctttaatgggcaagtggtttatttgggtgataaggcaaatttggataactacaaaataccaggagtttattatcaagattacaatctttatgctcaaaatggtgctaactaccctgaaccgcttgctggttcgcttgttgttttacaggctgcagggatcattcagcgttattttgtttataacagtagtcgagtatatacgcgcagccaatatcataatttaccgtggacaccttgggctcaagaatataacacgctcaatagacccacggcatcggatattcagagtgaaccgcgctataccaccacgattgatcttactggcctaagtactgaacgctattatccggtttggtggagcctcccacctaatgtcggagcgaattcttggttaacacttcatagaccctatccatatgatgcagaaaaaaaaccattcggtgaaggtgtgacacatgttgctggactacttgtacaaatagaaggaggagatgtgccatggggaggtgatgcccgctatcttaatattaaacgcataaatcaaacctatcgtaaaacggtaaaagcaatccatcatgccatgataagcatcgctagacccattgacggcaaatatcccctttatggtgatgtaaaatccggtgatattgtagattgttacgtttatagtggttgttatttacgtggtggtttaacctattttacgacaagcaattttcagtcaatccattattcacgtgaagaaggagaggcagaaatacatagatggtcaagtgaagatattaaacgggaaatgaagtggatggtgaaatcattagccatcaatgatccattattaggtgaagaatatactgataatacagtaccttattctcttgaatatgacgcgcgttatcaaaagaaaccgtaa

SEQ ID NO: 8855 - DNA, 573 bp, Photorhabdus luminescens
atggcgaagattggctatattcgggtgtcaacaaatgaccaaaacagtgatttacagcgaaacgcattgataagtataaattgtgagcaaatttttgaggataaaattagtggaaaaacatccaacagaccaggtttaaaacgagctttaaaacaacttaaaaaaggtgacactctagttgtttggaaactagatagattggggcgtagcgtaaaaaatatggtaactttaatttctgatttaagtgaacgcggtattcattttcaaagcttgactgatagcattgataccagcacttctatggggcgatttttctttcacattatgagtgcactagctgaaatggaacgggaattaatcgttgaaagaacgaatgcaggattaatagcggctcgtgcccaagggcgaattggtggtagaccagtatcactttcattcgttgaacaacaacaagcagcaagattgctggcgaaaggccacacacggaaacagttatcattaatttacaacatatcgttatctacaatatataaatattttccagtaaataaaacaaattgtcgatcaaattag

SEQ ID NO: 8856 - DNA, 615 bp, Photorhabdus luminescens
atgaaaaaaaacataactgagataaaaatgggtgcagatagtggaggaaaacaagctatcgaacgccttgttagtgcatatgggtttaaatcgcgtcaagcattgagcgaccatttaggtgtgtctaaaagcacaatggcgaaccgttatttaagggacagctttccagccgattgggttattcaatgcaaccttgaaaccaatgcttcattgttatggctaagcacaggacaaggagagatgttccctgatcgagaaaagaaaaaggaatctttaaaaaacattattaccccaaaaatacaacgcgttaaattggttggtggaaagctaagcgatgacgacccagtgattttagataatcaacttattgccagaaaaataaaaaaacctcttattatcgataataataatacctggtatttgctagatacagaagaacatgatgttcaggatggtttatggttaattgatattgaaggcatgcacagcattaaaaaaattacaaaaatcccagtcagtaagatccgagtttgtgataatgacgtaacttttgattgtgcaattaatgaaatcaactttattggtcgcgtttacctaatgatttccaggtactga

SEQ ID NO: 8857 - DNA, 183 bp, Photorhabdus luminescens
ttgtcagtggactttcttatggaatcagtaatagcgcaacgtattaattttatagccagaatggcaacgagctgtgaatgtaatcatgctgaagataaagaacttgctttagtttggattgctgagttgtcgacaccacttgcagaacaacttattaaccaccacgaaacgcttgaagaataa

SEQ ID NO: 8858 - DNA, 204 bp, Photorhabdus luminescens
atgaaaataattgcacagcagaatgatactgttgatgctttatgctggcgtcattatggtcggactcaaggcatgacagaacaagtactattagttaacccaggtttggctgaatatggtgtaattctgccacatggtacagaagttgagatgccggaaattatgacagctacaacgaaacctattttgcaactatgggattaa

SEQ ID NO: 8859 - DNA, 843 bp, Photorhabdus luminescens
atggatacacaactaacagaacttttgcgcttattgcgtaatctgatcagaactggtgttgttaccgaggtagataccaaccggggagtgtgccggattgcaacaggcaatctcgaaactgactggcggccttggttaacaatgcgagcaggtaattcccgaacttggtgggctcccagccgtggtgagcaagttttgctgttatctgttggtggtgaattgaccacctcctttgtattgccagctatttattctaatcaatttccggagccatcgacttttgaccatattgattttcctgatagtggattaccagccatctattctaatcaatctgcggcaccatcgggtcgttctgaacaagctgttcatattgtttttcctgatggggcaagaatggaatatgagccgaaatttggagccttaaaggtaacaggtattaagactgctaaggtacaggcttcatattctatagatcttgaagcgacgaatataaaactaaaagcaaacaacgaaataaaactagagtcatataacgagattaaattggagtcatacaacgagattgggctggatgcaaaaaacaaaattgacttgaaagcactcaacaagattgggctggatgcaaaaaaagagctcgaactgaaatcacatgaagtcaagtgtgaagcagaagaaaaaatcgaattgaaggcatcagaactgacgttgaaaggtaacacgaaactggaaggtaatgtcgagaacacaggcggaaaactcagttctaatggtgtaaccctacattcgcaccaacacaccggtgtcatggcaggcggtgcaacaacaggaggcccagtataa

SEQ ID NO: 8860 - DNA, 342 bp, Photorhabdus luminescens
atgatgtaccttggaatgaatcgacaaaccggtcgtagcctgacggatttggatcatgtacgccagtctgtcagcgacatcttactaacccccgttggtagtcgtttggaacgtcgtacttatggctccctgctacccgaattaattgactggccacagaacgcggctctacgcctgcaaatgatggcagccacctatacagctatcagccgctgggaaccgagaattaatctgacagctatcaccataaatacccaacaagacggcaaaatgacagtagatatctctggtcattatcagctgtcccctggggggttttctctatctatccctgtgaggtaa

SEQ ID NO: 8861 - DNA, 999 bp, Photorhabdus luminescens
atgccgaccattgatctaagccagttgccgccacctgatgtagtcgagccactggattatgaaagcctgttggctgaacgtaaagccaaattaatatctctttatcctgaagagcaacgggatgctattacacgaacattggaattggaatccgaacctctggttaagttacttgaggaaaacgcgtaccgggagttgatattgcgccagcgggttaatgaagccgctcgtgcagtaatgttggcctatgcaaccaatagagatttagaccagttaggagcgaactataacgttactcgggcagttatggagcctgatagtaccttccgtgatcgtatccaaagagccttcgaagggctaagtgttgcagggccgataggtgcgtatgaatatcatgcccttaaagttaatgaaagtattcatgctaatagaaatgaatacaaaggcgaatatcaaactgttgcagatgtttccgtcgtcagcccatcaccagccaatgtgacggtgactgttttgtcgcggaaatggaaatgggaaaaagataaagaagacgaagaggataaagagcatagcggtgtagcttcacaagagttattggataaagtgattgcggcacttaatgacgaaaacgtcagaccggttgctgatcgggtaaaagtacagtcagccaacatagtggaatatcaaattgatgctgtgctttatctctatccgacacctgaatctgaacctatccgtaaactggctcaacaaaatatggataagtacgtgctagatcaacataagttggggagagatattcggttatctgccatttatgctgccctgcatgtcgcaggagtacaacaggtagaactgagagccccgacgaaggacataattctgtgtaaagatcaggctccttattgtaccggtgcaaaactggaaatagggaaaacacaaactgatgattgttccaagccaaatccaggtttgatagtgggaggttctgatgaatga

SEQ ID NO: 8862 - DNA, 615 bp, Photorhabdus luminescens
atgaatgaccgcctgttaccaacaggttctacggttttggaattggctgctgctaaggcatgttcgcaattgcagaatattccagtaccacttcgccaactctggaatcctgatatttgccctgaggaattactaccctatctggcgtgggcgtggtcggttgatcgttgggacgaaaactggcctgtaagcactaagcgggacgtaataaaaaattcgctatttctgcacaaacataagggaaccattggtgctgtccgtcgtgtggtagaaccgcttggctatctcattcaaataaaggaatggtggctgaacaacgaaacaccgggcacattccggttggcgataggggtacaggaaaatgggatcaccgaagaaacttttttagagctggaacggctaatttctgatgccaagcctgtaagccgtcatttgataggtttgtcaatcaacctggatgttaagggcgagttttattgcgctgcgacgagttatagtggagatgacctcactgtttaccaatatctccctgacgtcatcacaactagcgacaatgctcctttaggagctgcaattcatttgatcgagacagatacattgagggtttcaccatga

SEQ ID NO: 8863 - DNA, 1128 bp, Photorhabdus luminescens
atgaaatactttgcaattttaactaacctaggcgcggcgaaactggcgaacgctgctgctttggggacaaaagtcgatattactcacatggctgttggtgacggtggcggtaaattaccagatcctgacgtcaatcagacaaaattaattaatgaaaagcgtcgtgctgcaattaatacattaagtgtcgacccggtaaacacaaaccaaattattgccgaacaaattatccctgaaggtgagggtggttggtggatgcgtgaaattggtttgtttgatggtgaaggtaacttgattgcagtagcaaactgcccggaaacctataaaccacaattacaggaaggttcgggtagaacacaaactatcagaatgatcttgattgtcagcaatacggattcggtaacgctgaaaatcgatccctctgtcgttctggcgactcgtgattatgtagatagctctatccagaaacatgaaaaaagccgtaatcacccagatgccacattgacagagaaaggttttacaaaacttaatagtgccattaacagtaatgatgaaactacagcagcaacacccaaagcggtaaaagcagcttatgataatgctaatagtaaattggcaaaaaaccaaaatggcgcggatatcctagataaaaatgcttttgtgaaaaaccttggtttattggaaaagctaattccgataggtgtaccacttccttggccgacggcaacactgccggatgggtggttacaatgcaatggtgcggcctttgataaagcgaaatttccggaattagccaaggcttatcctggtggtaatttgcccgatttgcgcggggaatttattcgcggttgggatgacaaacgtggcgttgatccagaccgtacattattggtatggcaagaagggtcttatttactacaggaaactcaacaagctgctgataatgttgttaacttctcagttaatgagcgtacgaaattacaatgggatactccccaaaataaagatattccattaagagctagagcttctggaggttcagcaacaacctggactaccaatgcagcttatataggggtatcaaggccacgtaacgtagcgtttaactatattgtaagggcagcataa

SEQ ID NO: 8864 - DNA, 489 bp, Photorhabdus luminescens
atgctcatgtctgtacttgaagagatcccgggaggaataccgactgacataccaccaaatggttgggtgaaatgtaatggggcaatctttgataagtctttatatcccaaattagcggaaacttatcccagtggtagattacctgatttacgtggtgaatttatccggggctgggatgatggacgtggggtggatgtcggtcgatatctcctatcctttcaattggcagatattgctccacatagtcacagaattgaacggatgtggtccaactcaaatggtggaactgagaaggtgggtacaccaagctatattctcaatagtgtctaccaaaacgttaactacggtattgatcctcgcggactaggcatcgctatgggaatgggagctggtggtttcggttatatggataatgcgattgctgcttcaacaggaatagaaacacgcccacgaagcgtggcatttaattacattgtgaggattgcctga

SEQ ID NO: 8865 - DNA, 597 bp, Photorhabdus luminescens
atgaataaggctgtactggataaaaataatattgctatcagtaccggaagtatcgttgtgtttaattacgatgcgattacgctggaatatttaaacagttctgatgagtatcttcccgttggtgtcggtcttcctgctaattcttgcacagacgtgccacctgataccgaagagggatatatcgcctgccgttcatctgatttaaccgattggcaaattgtaccagattatcgaggaaaaatagcttacgacacccaaactggggaacagaaggaaatcattaaaccgggcgaattaccagaaacactgacgtgcaaacaaccaaacactgattttgataagtgggatggtgaaaaatgggtaacggacattgaagctcaaaaaaacagtcagattgaacaggcagaacaacaccgtgtcactcttcgccaacaggctgatgaagtcatgactttattacaatatgctattgagactgagatggcctctgacacagaaaaagcattattgcttgcctggaagaaatatgtggtattactgagccgtgttgatacttcaatggtttcagatgttgattggccacaaataccaaaataa

SEQ ID NO: 8866 - DNA, 531 bp, Photorhabdus luminescens
atgcaaaacattaaaaatttttcccaatatacacctgactcagaacaagccagaaaaatcattgaagattttaatgtcatttatttgaaatcagaagacggtcaagactggtatgaatgccagaaaagctttaatcctgatacaatcaaagtaatgtatgattttaataatgtaatccgttctatatcaggagatgtatcagcttttaatccagagggaatgagtgtggctgaagtaagtaatctgcttgattcttgtgatatttcaggccaatggcaatatataaatggcgctattgttccgcgtaagtacacaaagggcgagttagttgctcaagcagaaagacgtaaagaagaattgttagcccttgccagcaatactattgctcccttacaggataccgttgagctagaagaagcaactctggaagagatagagcgactcaaagcctggaaaaaataccgaatgcaagcaaaccgcattgatcccaccatagcaccagatattgagtggcccgcacaaccagtataa

SEQ ID NO: 8867 - DNA, 552 bp, Photorhabdus luminescens
ttgatagaaaccgttactaaagccgcagacgcgttgcaacgcagcggtggcaatgtaacaggtgacataactattactactgattctatgctgagttggaacagaaacaccgactttgcctctatcggttttaaaaacaccggagatggtgatgcagactcctatatgtggtttaaaacaggggataatggtaacgaatatttcaaatggcagcatgccctttctggagggccaactaatgaatggatgagccttaaatctgataatcttcgggttagagggtatcaagtctatcatgaaggatatagaccaaccgctgcgattattggcgcttatacaaaatcagaatcagacacgcgttatattcaagatattcgttttggtgccaaagagagcgcgcaagtacagaaaagttctggagatacaaacgcaagtgggtatgccattactgctgtaataaatggaaacagaaatgagctagttgacaccgtaaaccgtaggccgatacagaagaaagttaacggcatatggatgaatatatccaatatttag

SEQ ID NO: 8868 - DNA, 207 bp, Photorhabdus luminescens
ttgattattttttcacagattttccctacaaaaatagatgataatttatacacatcaacgcatttctctgtaaaccacagttctggtcatttattgacacccgaatatagccaatcttcgccatatgtaaccctgcctaataccattatgagactattattatcgaaattatcacggattggcgagcttttaaaaaccttggtttga

SEQ ID NO: 8869 - DNA, 1173 bp, Photorhabdus luminescens
atggcacaagattatcatcacggcgtccgtgtacaggaaattaacgagggcacgcgtaccatcactacagttagcaccgctattgttggtatggtctgtactggtcctgaagcagacgaaaaaacttttccactaaacactccggtcttgattactgatgtttcactcgccattggcaaagctggtaaaaccggtacattgcctcaggcacttaaagctatttcagaccagtctaaacccgttactgttgttgtccgtgtagcacaaggtgaaacggaaggtgataccaccaccaatatcattggtactacaactagtgaaggtaagaaaaccggtatacaggcactgttggcagcacaaagccaattaggtgtgaagcctcgtattctgggagtccctgggctggatacaaaagctgttgctgttgagttggcgagtatcgcgcagaaactgagagcaatggcttatatcagtgcctatggcagtaagactatctcagaagttatcgaatatcgcaaaaacttcagtcaacgagaactgatgttgatttggcctgatttcctgagttgggatacggtttctaataaagaaactatcgcctacgcgactgctcgtgcattgggtttgcgtgcaaaaattgatgaagaaacaggttggcacaaaacactgtccaacatcggtgtcaatggtgtgaccggtctttcagcagacgtcttctgggatcttcaagatccagcaacagactcaggcctgctaaaccaaaatggtatcacgacacttatccgtaagaacggtttccgtttctggggttcccgtacttgcgctgatgacccattgttccagttcgaaagttacactcgtactgcccaagtattagctgacactatggcggaagcacatatgtgggcaatcgataaaccactgactccttcactggtacgagacattatcgaaggtatcaatgctaagttccgcgaactgaaatctgggggttacattattgacggtcagtgttggtatgacgaaaacgccaatgataaagacaccttgaaagcgggcaaattgaccctcgattacgactatacacctgtaccaccactggaaaacatgatgttacgccagcgtattacagatcgttacctgatggatttcgcgaaaagcataaacggctaa

SEQ ID NO: 8870 - DNA, 516 bp, Photorhabdus luminescens
atggcattacctcgcaaacttaaattcctgaacttgtttaatgatggcaatagttatcagggaatcgtggaagaaattactctgcctaagctgagtcgtaaactggaaacctatcgtggcggtggtatgaacggtagcgcaaccgtggacttaggcttggatgaaggtgcattggacgttgaatttactctgggaggtatggaagctcaacattatcggcaatggggtctgaccaaagctgatggcgtaatgttgcgctttgcgggctcctgccagcgcgatgataccagcgatgtgattgctgttgaaatcgtgatgcgtggccgtttccatgagtttgaccacggtgcttataagcagggagataatactcagaccaaaatcagcgctaaaaacacctatttcaaattgacatgggatggtgaagttctgatcgaagtggataccgttaacatggttgaagtcgttaatggtgaggatcgcttggcagatcaccgtcgcgctatgggtctttaa

SEQ ID NO: 8871 - DNA, 318 bp, Photorhabdus luminescens
atgacagaaacactaattactcaaaacgacgagcagcgcacaatcgtattagaagaaccgcttgcacgtggtagtagcaacatcactgaagtggtggtgcgcaaaccgaacagtggcgcgctgcgtggtgctcggctacaggctttgctggagatggatgtggattcaatgatattggttttgccacgtgttaccacaccagcgctcactaaaagcgacctgttgtcaatgacacccggcgatctgattaatctcagtgttgaggtggtcaattttttgttaccgaagtcggcgaagtccggtttccagaccgactaa

SEQ ID NO: 8872 - DNA, 120 bp, Photorhabdus luminescens
gtggcagatattgccaccgttttccactggtctccggcagtgacagatgaaatgtcactaccggaattactggactggcgacatcgggccatcttacgaagtggtgcagaaaatgagtaa

SEQ ID NO: 8873 - DNA, 2439 bp, Photorhabdus luminescens
gtggtgcagaaaatgagtaatacacagtcacagcttaaattggtaatacagtccgttaataagctgaccagcgccttgaaatctgcccagcgaaacaataaaaggttggcagattctctccggcaaaatcgtgatgaatttaagcgattaaatcagacttatgaagcaattaaatcttattctgctcctgaatatgcgcaggaaactgcgcataccagtgacaaaaaggaagaaaatcgcggtgaaggtcgttatagcaaaatcaaagagcttcgtgaccgcgttagtcaatatggtgctagtgcaaaatcagccggtagtaagatactgacaaccagtaaaaactttctgatgcccggttatgatcttaatgttcaaatgtctaaaattcaggcacaaaccaatattgaaaaaaattctcctgaatacgccatgttgcttaaccaaagtcgtgagttgagcaaaagtacagggattccggccagtcagattgcacagggacagagcctgtatgcctccaaggggtattctcctgaccagataaagaatgtgatgcctggtgcggtattaatgtctcaggcaagcggtacagatttcgccaatgtggttgatattagtactaatgtactggaagggtttaaattacaatccgaagagatggggcatgttagtgatgttttgacggcaacgcttattggctcaaaaacaacgttggcgggattgggtgacaccatgaaatctgtcgctccagcggccacttctttggggattgatattgaaaccgttgcggctgctacaagaaagttaagtgatgccaatattaagggaagtgaagctggagaggctttaagcaatgtactaagtcggttggctgaaccgcctaaagctgctgctgccgtattgaaacaactagatattaaaactcgtgatgctaaaggtaatttacggcaattacctgatattctcgttgaactagatgataaaacccgttcaatgagcggtaaacaacgtacgagttatttcaccgcaattggtggtgaaaatgctgctcctgctttggatgtattggtaaatcaggcagggcagggaggattgcaaacttttatcgctgaactaaaacgtgttcaaggcgaatcccaaaaagttgcatctgtagtgacgaataatctcaccggtgatatccaaaaactcaatgccgcttggagtaatctgggcgttcagatgttttctggcgtagaaggtcctgcaagagaagtcactcagcaagtaacaaatgtagtcaataaagtcagtgaatggatggaagccaacccacgcttggctgcaacgcttgcgactattacggtggtggtcggaggcatattaactgtgtttggcgcattggcacaggcgatcgcttcgatattgcttccattagctgtagcgaaatatagtcttactttctttggtagtactggtgtgagggcgctcggattagtcgggaatgctctgaaaatgttgggtagcaccatgatgatcgttggtcgtttgatgatggctaacccaatcctcgccattattggtgtcattgctatggctgctgtttatatttggcaaaactgggaaacattggggccgaaaatttctcagctttgggaaaatattaaaattagcctaagtgagaaatgggaatccattaaacagagtgttctgcaaacctgggaaagtattaaaactaatatcagtaatgcttgggaattagttaagcagaacacgttggatatctgggagaatattaaaatatcgatttcggataaatggaatgaaattattactgacgtaatgaatctgcccagtaaatttaaagaggttggcacagcgatagttaacagtttattggaggggattaatgaaaaatgggaagccctgaaaaataaactgacttcattgtctgagtatctccctgactggatgcggtcaaaggaagatatttcaaaagacgccagtaataatgtgagtcctaatgttagttcggttctgcccaagcatgacaaagggggcattattccggctggccgatttggtattgtgggtgaatatggaccagagattgtcactggccctgtcaatgttattagccgacgacagactgccaaacttgctgccgctgcggcattttctttgagcgtaatggcaccttctgccgcagccagaaccgcaccattgcatgttcagagcttaccggttcatgcttatcctcagattcaggaaaagaaagcagacaaacggcagatggtagagtatcgcagtgaatcaccggtctatcatataaatatctatggtgcaccggggcaatctgcgcaggatattgcagcagcggttaggcgcgaattggatgatcgggaacgtaaacagcaggcgcgtttacgcagttcattctctgatagaggagaattctaa

SEQ ID NO: 8874 - DNA, 465 bp, Photorhabdus luminescens
atgatggctgcactgggtttatttgtttttatgttgaagaccacaccataccagagtatgcaacatcagcagtcatggcggcatgcttttaacagccgtatcgggatacggcctgcttggcaatttctggggccgggtaacgacacaatgacactttccggttcgttatatccagaaattaccggtggtcgtttatcattgacggtattacaagtgatggctgatagcggtaaagcttggtcctttatagatggcagtggcacggtttacggtatgtttgtcattgagagtattgaccagacgaaaactgaatttatgtcgaatggttctgcccgcaaaattgatttcacattgacattacggcgagtggatagttctctaggtgaaatgttcggtgatcttcaggaacaattctctatgcttacagacaatttgtcagatagagtcagagaggtattgtcatga

SEQ ID NO: 8875 - DNA, 1086 bp, Photorhabdus luminescens
atgacatctgaatttggcagaggttccgaaaaaggcagtgcaccggcatttcttttggaaattgacaataaagatatcagcgggcgcattcaatcgcgcctgatgtcactcacaatgaccgataatcgtggctttgaagctgaccagcttgatattgaactggatgatgcagatggaagtttggtgctaccttccagaggtaatgtaatttcattggcgttaggatggcgtgatcagccactgattagtaaagggcgttttactgtggatgaaattggtcacagtggagcgccggataaattaacaattcgtgcccgtagtgctgatttccgtgaatctctcaatatgagacgtgaagagtcttatcataagaaaacgataggtgatattgtccatactatcgcggcgagaaataaccttaccgccgatttgcatcaggatattgcgaagatatttattaaccatattgatcagacgaatgagtcagatggtagttttcttacgcgcttggcaaggcaggaaggagcaattgcttcagtaaaaaatggtaagttgatatttattcggcaaggacagaataaaacagccagtggtgcggttatccctggattagtgattacacgtcggtctggtgacaatcataattttacgctgtccgatcgtgaggcttataccggcgtggtagcaaactggttggatgtccgtaaaccggagaaaaaacataccttaaccgttgagcgaaaaagtcagaaaaatgctgataaattaacctcttatttagtaggtagcaaagataacgtattggaactttcccgtatttatgctgatgaagccagcgctaaacgtgctgccaaagttgcttgggagaaaatacaacgtggggcagcgacgttttcgattcaactggctcaggggcgtgcagatctctaccctgaaataccaatcaaagttaccggctttaaaccagaaatagatgctgccgaatggacattaacgacagtcactcacacggtgaatggatctgatggtggttttacaacagcactgactctggaattaaaaattgatgatctcgatatgaaataa

SEQ ID NO: 8876 - DNA, 222 bp, Photorhabdus luminescens
atgatcaagtgtcctctttgtggtaaagcggctcatgcacgcagcagctttgagcattcctgccatacaaaagaacgttataatcaatgtcaaaacatcaattgtggtgcaactttcgtcagccatgaaacgtttgtccgctttatttccaaacctggtgaagtaataagtgttaagccgcatcccaaagaaaaaactaaaactcaattgaatgtgacttga

SEQ ID NO: 8877 - DNA, 1110 bp, Photorhabdus luminescens
atgatgaaaaatgtgggctttatcggctggcgcggtatggtcggctcagtattaatgcagcgtatgattgaagagcaggattttgatgttatttgtccggtattcttcacgacatcacaacacggacagccagcacctgattttactggtcagcaaggtacgttacagaatgctttcgatatcgaagctcttggtgctttggatattattattagctgtcaagggggagattatactaatgagatttatccaaagttaagggcaacgggttggcagggatattggattgatgcagcgtcagcgctgcgtatgaatgatgattccatcattattttagatccagttaaccatacgcatattcagcaaggtcttaataaaggcataaaaacttttgttggtggtaattgtaccgttagcctaatgttgatgtctttagggggcttatttgctaatgatttggttgaatgggcttctgttgcaacttatcaggcagcttctggtgcaggtgctcgtcatatgcgggaactactggttcagatgggatctctacatactcaggtagcaaaagagttgcaagatccggcatcggctattctggatattgaaagaaaagtaacggatttcacccgtagcggagttatgtcaactgagaaatttagcgtgccgttggcaggtagtttgattccgtggattgataaacagcttgataatggccaaagccgtgaagagtggaaaggtcaggcagaaaccaacaagatcctgaataccggtaataacatcattactgtggatggtttgtgtgtacgtattggggcgctgcgttgccacagccaggcatttactttgaaattgaaaaaagatatttcgattcctgaaattgagcaattactggctgcgcataacgactgggttcgtgttattccaaatgatcgcgaattgagtatgcgtgaattaactccggcggcggtaacgggaactttggatactcctgtagggcgtttacgtaagctgaatatgggaccagagtatttatctgcttttactgtcggtgaccaattgctgtggggagcagcagagcctctgcgtcgtatgctacgtatcttgatttaa

SEQ ID NO: 8878 - DNA, 756 bp, Photorhabdus luminescens
atgaagcaagataacctactggatttaaaggtaagggaattaagagagttagcgaaaactttatcttttcgctatctaactcatagtaaaataagaatggattttaattcaaaaataaatctttttgtagaggatatattaggtcaggttcgtattcactgtttatcttcaaatggtgcaattgagattattcagtttgaaatagatcacttaaaagaacaagctttctgtttgacagcaaacagagtaaagcaatatgcaataattgaaagggaaaaagagaaatcaagttatactaatcttatattaaaacagatcgggtttgttggtggcggcactcaaattcttgcaggttatacagtctgtaaagcttctttagggttagcatgtgcctcattcggtgcgccattaatggcccatgggtataataatgttgttgaaaatggatattatctactgtacagagaaaatattaatggtggtgtcagagaaggatataggtatgttgctaataaaattggtttaagtgataaagatgcagatattacttatgcaactgttgatttagtgctttcaggttatggcatttttagaaaagttttgaagccaagagagaaatcttggagtttatttagaaatattaatagtgattttatcagaggatggagagaaatgggagttgtgagcttaactacagaaggtattgttgatgtttctacagttttgagtatttatcagctagaaaaggaaaaataa

SEQ ID NO: 8879 - DNA, 480 bp, Photorhabdus luminescens
atggctgacatgatttacatgacaataaagggaaaaaaacaaggattaatatcggctggatgttcttctgttgattccattggtaataaatatcaagcaaaccactttgatcagatattagtttatagcttaagccatgcgataacacggactcaaaatgtcgatcatcaacccattattatccaaaaacctatcgacaaatcatcaccattactcggtgttgctatttctgagaatgagtctcttgaatgctctattgatttttaccgaactaattcaaatggtgctcaagaacgttattacaatataaagatcactggtgccacaatcactgaaataagtgtcttacatccacattcattgaatcataatgagcttccaccacaggaaagtatttcgttaaaatataccaatattacctggaatcaccttatcgcaggtactggcggttatagtatttgggatgacagaatttattaa

SEQ ID NO: 8880 - DNA, 2415 bp, Photorhabdus luminescens
atgtcgaatacatatgactcctcaagtatcaaggtattaaaagggctggatgcggtgcgtaaacgtccgggcatgtatatcggtgatacagacgatggtaccggcttacaccacatggtcttcgaggttgtcgacaacgctatcgacgaagccctcgcaggccactgtagtgaagttatcgtcactatccatgctgataactcagtctccgtacaggatgatggccgtggtattcctaccggtatacacgaagaagaaggtgtttcagcagccgaagttattatgacggtgctgcatgcggggggtaaattcgatgataactcttataaagtctccggcggtctgcacggcgtaggggtttctgttgttaacgccttgtctgaaaagctggaattggttatccgccgtgacggcaaagttcatgaacagacttatcaccttggtgtgccacaaagcccactgaaagtcgttggagaaactgaacagacaggtacccgtgtccgtttctggccgagcatggatactttccgtgataacacagaattccagcacgacattctggctaaacgcctgcgtgaactatccttcctgaattccggtgtatccatccgcctcattgataagcgcactaatatagaagaccacttccattatgaaggtggaattaaagcgtttgttgagttcctaaataaaaacaaaactcccattcatccaaatgttttctatttttctacagaaaaagatggcatcggtgttgaaatctcaatgcaatggaacgatggtttccaggaaaatatttattgctttaccaataatatcccacaacgcgatgggggaactcacttagttggcttccgtactgcgatgacacgtactcttaatagttacatggataaagaagggtacaacaagaaatccaaagtcagcgccactggtgatgatgctcgtgaaggtttagttgctgttatttccgttaaagtacctgatccaaaattctcttctcagactaaagacaaactggtctcttccgaagtgaaaactgcggttgaaacgctgatgaatgagaagctagtggaatacttattagaaaatccaaacgacgctaaaactgtcgtcagtaaaattattgatgctgcccgtgctcgtgaagcagcccgtaaagcgcgtgaaatgacacgtcgtaaaggcgctcttgatctggctgggttgccaggcaaactggcggattgccaggaacgtgatccggcactctctgaactctacttagtggaaggggactctgcgggtggttcggcaaaacagggccgtaaccgcaaaaatcaggcaattttgccgctaaaaggcaaaatcctgaatgtcgaaaaagcgcgtttcgataaaatgctctcttctcaggaagtggcaaccctgatcaccgcattgggctgcggtattggccgtgacgaatataacccagataagctgcgttatcacagcattattatcatgacggatgcggatgtcgatggttctcatattcgtactctcttgctgactttcttctatcgtcaaatgccagaaatcattgaacgtggtcatgtgtttattgctcagccgccactgtataaagtcaaaaaaggcaaacaagaacaatatattaaagatgatgaagcaatggatgagtaccaactatccattgcactagatggtgcctcactttacaccaatgagcacgtaccagccctgagaggcgaaccgctagaaaaattagtgaccgaatttaatggtgttcaaaaaatcattaaacgcatggaacgtttgtatccgctaagtttattgaatagcctaatttatcatccgaatctgaccgaagaaacattgtctgataaggcgaaagttgaagaatggattgaaatgctggtcacccgtttgaatgacagtgaacaaaacggcagcagctacagttatcgcctccatgaaaatcgtgagcgccaaatgtacgaaccggttctgtgtgttcgtacacacggtgttgatactgattatctattggacttcgattttgtccacggcggtgaatatcaccgcatcactctactaggtgataagcttcgcaacttgatcgaagaagacgcgtacatcgaacgtggtgaacgacgccaaccggttagcagttttgaacaagcgctaaactggttgactaaagagtctcgccgtgggttgtctatacagcgttataaaggtttgggagaaatgaaccctgaacagttatgggaaacaaccatgaacccggaaactcgccgcatgatgcgtgtgacagtaaaagatgccattgcaactgaccaactgtttacaactctgatgggtgatgctgttgaacctcgtcgagcatttattgaagagaatgccctgaaagcagctaatattgatatctag

SEQ ID NO: 8881 - DNA, 1092 bp, Photorhabdus luminescens
atgactctcacgcgtttacttatccgcgattttcgtaatatcgccgccgctgatttgcctctagctaccggatttaactttctggttggctctaatggcagcggtaaaaccagcgtactggaagcgatttatacgctgggtcacgggcgctcttttcgtagcattcaggcaggacgggtaatccttcatggctgcgatgagttcgttctgcatgggcggctagggcaacaggagaatgagcgggaacggtctatcggcctgagtaaaaaccgtaatggcgacagtaaagtcagaattgatggtagtgatggcggtaaaattgcagaactggctaagatgttacctatgcagcttattactccagaagggtttaccctgttaaatggcgggccaaagtatcgacgggcttttattgactgggggtgctttcacaatgagccacgctttttttctgcatgggtaaacttaaaacggctactcaaacaacgcaatgcagcactacggcaagttacccgctacagccagatacggccttgggatcaggaattgataccactcgctaaccaaataaatcagtggcgtggtgaatatgttacaaacatcactcaggatatcacgaatacctgtaagcagttcttacccgaatttacattaagtttctcttttcaacagggatgggacaaagagagtgattatgctgaattactggagcgccaatttgagcgtgacagaacgttaacctatacagcttccggcccacataaggcagatctgcgcattcgtgcagaaggaacgccagtagaagatatgctatcccgcggtcaattaaagttactgatgtgcgcactgcggctagcacagggtgaatatttcacccgacagagcggacaacaatgtctgtatctgcttgatgattttgcctccgaactggataccagccgccgtcagttgctggccgctcgtctaaaatccacgcaagctcaggtatttgtcagcgcgataaatcctgaccaaataacagacatgcttgatggaaatagcaagatgtttcgcgtggaaaatggcaaaatagaggttcaaccacaggattaa

SEQ ID NO: 8882 - DNA, 1101 bp, Photorhabdus luminescens
atgaaatttatcattgaacgtgagcaattgttaaaaccactgcaacaggtcagtagcccgctgagtgggcgccctactctgcctattcttggtaatttattactacaggttacagaaggctccctgttgctgaccggcacagatttagaaatggaaatgatggcaagagtcacgctttcattgccacacgaagtaggtgcaaccacagtaccggcacgtaaattctttgatatctggcgaggtttgccagacggggccgagatcagtgtagaactggatggtgaccgcctattggtgcgttctggtcgcagccgcttctcactttccacattgcccgcatctgattttccaaatcttgatgactggcaaagtgaggtggagttttcactgcctcaggccacactgaagcgccttattgaatcaactcagttctcaatggctcaccaggatgtccgctattacctcaacggtatgttgtttgaaaccgaaggagaagagctacgtacagttgcaaccgatggtcaccgtctggcagtctgttctatgggaattggtcaaaaattgccttcccattcagtcatcgtgccacgtaaaggcgttattgaactcatgagattgctggatggtggtgatactccgctacagttacaaatcggtagtaacaatattcgtgcccacgttggcgactttattttcacctctaaattggtggatggacgtttccctgattatcgtcgtgtattaccaaagaacccagataaaactctggaagctaattgcgatatgctgaaacaggctttttcacgtgcagctattctctctaatgagaaatttcgcggagttcgcctttatttcagtgaaaaccagctaagaatcacagcaaataaccctgaacaggaagaagccgaagagattgtcgatgtcagctaccaaggggctgaaatggaaataggctttaatgtcagttacgtactagatgttctcaatacactaagatgtgaagaggtccgtttactactgactgatgctatttctagtgttcagatagaagactgtgcaaaccacaatgcggcttatgtcgtgatgccaatgcgcctgtaa

SEQ ID NO: 8883 - DNA, 1389 bp, Photorhabdus luminescens
gtgtcactttcgctttggcagcaatgtcttgcccgattgcaggatgaattacctgccacagaattcagtatgtggatacgcccccttcaggcagagctaagtggtaacacgctggcactttatgccccaaatcggttcgttctggactgggtaagagagaagtatatcaacaatatcaatggattgttgaatgacttctgtggagcagaagtaccattattacgttttgaagttggcaataaacccgtttcccaaaacgatagcccaccacaaagggttgttactcatacgccggttgcacctgcaccacaaaacacatcagtacgccccagttgggataacaccgcggtacaacccgagctctcttatcgctctaatgttaacccaaaacatacttttgataactttgttgaaggtaaatccaaccaactcgctcgtgctgctgcaagacaggtcgctgataatcccggcggtgcctataacccactatttctttatggtggtaccggtttgggtaaaacccatctattacatgccgtaggtaacagtattatggcacgtaaggcaaatgccaaggtggtctatatgcattctgaacgttttgttcaggatatggtcaaggcattacaaaataatgcaatagaagagttcaaacgctattaccgctctgtcgacgcattattgatcgatgatattcagttttttgccaataaagaacgctcgcaagaagagttcttccacacattcaatgcattactggaaggtaatcaacagattattctgacatcagatcgctacccaaaagagatcaatggggtagaagatcggttaaaatcccgttttggctggggactaaccgttgcaattgaaccaccggaactcgaaacccgtgtcgctattttgatgaagaaggcagacgaaaacgaaatccagttaccaggagaagtcgctttctttatagccaaacgtctgcgttctaatgtccgtgagcttgaaggggcattaaatagggtaatagcaaatgccaattttactggccgagcgattaccattgattttgtacgtgaagcattacgtgatctgttagcattgcaagaaaaactggttaccattgataatattcagaaaacagtcgctgagtattataaaattaaggtggccgatttactttccaaacggcgctcccgttccgttgcccgtccaaggcaaatggcaatggcgctggcaaaagagttaaccaaccacagcttgcctgaaatcggggatgcctttggtggacgtgaccatacaactgtgctgcatgcttgtcgtaaaatcgagcaactgcgtgaagaaagtcacgacatcaaagaggatttttctaacttaatcagaacattgtcttcctag

SEQ ID NO: 8884 - DNA, 141 bp, Photorhabdus luminescens
atgaaacgcactttccaaccatccgtactgaagcgtaaccgttctcatggtttccgcgctcgtatggctaccaaaaatggtcgtcaggttctggctcgccgtcgtgcaaaaggccgtactcgtctgaccgtttctaagtaa

SEQ ID NO: 8885 - DNA, 360 bp, Photorhabdus luminescens
gtggttaagctcgcttttccgagggagttacgcttgttaactcccaagcatttcacttatgttttccagcaaccccaacgggcaagttcgccagagattactatccttggtcgcccgaacgagctggggcatccccgtatcggtcttactatagccaagaaaaatgttaaacgtgctcatgagcgtaaccggattaagcggttagcccgtgaaagcttccgtttaaaccaacatgagttgcctcctatggattttgtggtattggttaggaaaggcgttgctgagcttgataaccgtgcgttaacggaggcgttgggtaaattatggcgtcgtcactgtcgtttggctcgcgcttcctga

SEQ ID NO: 8886 - DNA, 228 bp, Photorhabdus luminescens
ctgatcgcattaatccggggatatcagttggtaataagcccgctgttggggcctcgttgtcgctttaatcctacatgctctcaatatggcattgaggcattacgcaggtttggggtgataaaaggctgttggttaacggtgaaacgcgttttaaaatgccaccctttacatgaaggtggtgatgatcctgtcccacccgtaaaaaacaacgataacagagaacactaa

SEQ ID NO: 8887 - DNA, 1641 bp, Photorhabdus luminescens
atggattcgcaacgtaatcttcttctcatcgctttgctgttcgtttctttcttggtctggcaagcatgggaagcagataaaaatccgcagccaacgacagtacaggccacgcaacaaacggatatgccgagcagtgagaatcaagctgtaccaggcagtggaaaaggtaaacttatcacggttaaaactgatgtgctctctttgaccatcaatactcgtggcggtgatatcgaagaggctgacctgttagcctatcctgataccttgggttcaaaccagcccttcaagttgttggaaacaacacccgctttcacttatcaagcgcaaagcggattgacggggaaagatggtccagataacccgatgaatagtgagcgcccgctgtataccgcagcacaggatagctatgtattggctgatggacaggatgaattgcgtatcccaatgaatttcgtcactaaaaatggcattgtttacgttaaaacatttgtcctgaaacgtggtgaatacgcgattagtgtggattaccgtattcataacacgacagaaaaaccgttacagatgaccttctttggtcagttgaaacagagtgttgaactacccaagcatcgtgatacaggcagcagtaactttgccctgcatacttaccgtggtgcagcctattcttcagatgataccaaatacaaaaaatatagctttagcgatattgaaggtgaatctttatccgtgaccaccaaaggtggctggattgctatgttgcaacaatattttgctactgcttgggttcctgtagctaatgaaaccagcactttttacactgttgcattaggtaaagagatggctgcgattggctataagagtgccccaatctctgttgcggctaacagtgaaaaaacagtctcttctacactgtggattggtccagaaattcaagatgaaatggctgctgtagcacctcatctggatctgtccgtagactatggttggttgtggtttatctctcagccattatttaagctgttgaagttcctgcatggttttattggtaactggggcttctccatcattgttatcacctttattgtgcgtggtatcatgtacccgctgaccaaagcacaatacacgtcaatggcgaaaatgcgtctgttacagcctaaattggcggctatgcgcgagcgtattggtgatgataaacagcgtatgagccaggaaatgatggcattgtacaaagcagagaaagtgaacccactgggtggttgtttgcctctgttgatccagatgccaatcttccttgctttatattacatgttgatgggttctgttgaattgcgtcatgcgccatttgctggctggattcatgacttgtctgcacaagatccttattacatcctgccgttgctgatgggtgtgacaatgttcatcatccagaaaatgtctccgacaacaattactgatccgatgcaacagaagattatgacctatatgcccgtcatatttaccatattcttcctgtggttcccatcaggtctggttctgtactatatcgtcagtaacctggtgacaattatccagcagcaattaatttatcgtgggctggaaaaacgcggcttgcatagtcgtgagaaaaagccagcgaaataa

SEQ ID NO: 8888 - DNA, 1365 bp, Photorhabdus luminescens
atgaataccacggatacgattgttgctcaggctaccccaccaggacgaggaggggttggtattttgcgtgtttccggcccgaaagccgcacaggtcgctgaggtggtattaggtaaattacccaaaccccgttatgcagattatctgccatttcgtgatgtggatggtcagatacttgatcaggggattgctatttactttccggggccgaattcctttactggagaagatgtactggagcttcaagggcatggtggtccagttattctcgatttgctacttaaacgtattctaacgctgtctggtgtgcgaattgctaacccaggtgagttttctgaacgcgcttttcttaatgacaaactggatttagctcaggcggaagccattgctgacctgatcgatgccagttcggagcaggctgcccgttcagcgatgaactccttacagggcgctttttcgactcaagttcaccagatggtggaagcacttactcacttacgaatctatgtagaagcggctattgattttccagatgaagagattgacttcctttctgatgggaaaatcgaagctaagttggatgaagtgatagttgagcttgagcgagtgcgttctcaggcacgtcagggcagccttttacgtgaagggatgaaagttgttattgctggtcgccctaatgcaggaaagtccagtctacttaatgcattagcaggccgtgaagcggcgattgtgacggatattgctggtacaacccgtgatgtgctgcgtgaacatatccatattgacggtatgccgttgcatattattgataccgccggtttgcgtgaagccagtgacgaagttgagcgtattggtattgagcgtgcttggcaggaaattgagcaggctgatcgtgtactgtttatggtggatagcacgacgacgaacgcggttgaacctgtggaaatctggcctgaatttatggctcgcctgcctaaatcgcttcctatcacagtcgttcgtaataagacagatatgactgatgaagagacaagtattgcagaagtaagtggttactcgctaattcgactttctgcccgtagtggtgaaggaatcgatttattgcgtgatcatctgaaagagacgatgggttttagcagtaataccgaaggtggtttcttggctcgtcgtcgtcatttacaagcattaaataccgcagcggaacatttacaacagggccatgaacaattggtggttgcccgttcaggtgaattgctggcagaagagttgcgtctggcgcagcaggcattgagtgagatcacgggtgaatttacctccgatgatctgctaggaaggattttttcgagtttttgtattgggaagtga

SEQ ID NO: 8889 - DNA, 1221 bp, Photorhabdus luminescens
atgttaaaaacagaattgttggaaattattgccaatggcgaaaattcaggtgtggagtttaagcgagatgatatacgtcctgagcagttagccaaagaagttgttgctatggccaacttccaagggggacgggtactgctgggtgtggaagatgacggtactattagtggcgtacaaaggcatgatcttgaagagtgggttatgaatgtctttcagggcaaaattcatccgatgatgctgccgttttacgaagaagtgaaattggatgatggtaaactggttgctgtcattagttttcccatcggcatttcgaagccctacgtcgttctccatagcggaaaagaggaaatctatattcgtgttgggacaacatcgaggctagcaactagagagcagcagatgcgattgttcgaattgggtggaatgctgcataccgaagtaatgcctgtgcctcgtacagatatgagttgtttggatgacgctcgcctaaccaattatgtaaaggacatcttacgagatcccgatgtacctaaaacacctgatgaatggcaagcaaggctacttggactgggttttttaaccgaagccgcaggcagtgtttgctgcacaatagctggcttggtgttatttggtaaaagcccgagacgctatctcaaacaagcaggtttacgggtcatggtatttcatggtgaagataaggaataccaagctgcattggatgacatcattgatggcccaatggtcgggcgctgggatcttgaaaatggtgataaacggctagtcgatggcggcgttattgagagatttatcgaggctatgagtccctttatttctcaagagtctgatcaggtgaatgaagagttaaggcgagagacacggtggttttatccacttgaggccgttagagaagcattggtcaatgcactggcgcaccgcgattggacacgttttgttgaaattgaggtatctagttattccgaccggcttgaagtaattagcccaggttcgttaccaaactccatgacggtagaaaaaatgaaagcaggacagcgttcacccagaaatatcattgttatggaagtattgcgtgattatggctatgtcgattaccgaggaatgggtgtgaggaccaaaattatgccactaacgaaagcgttaacaggtaaagatcctgagtttgatttggcagacgatcatttaaaaacaatcttgttccggtaa

SEQ ID NO: 8890 - DNA, 2664 bp, Photorhabdus luminescens
atgactattcagaccaataagtacgctaaagctcgttttttcaagtgtgcattgcaggtaaatgcttcaggctacataaaatatcgggggcagcaacaggcgctttctgaagatgactataaccagcaattgttaaatgctgcgctagagatgagaattgaagtcatcggcctagctgatcatgggtcagtgaatggttttgaaaagatcagagatctctttacacaacatggaatcgtggtgttcccctgctttgaagttgcttccagtgagaaaattcacttcgtttgcttgtttgatgaatcagagtcagctgatcagataaaaatgcatttgggagcattagatgtggatataaaccagccggaagccccagtgcagaaatctgccacagatattattaattacgtaaacgataagggtggtttcattttcgcggcccactgtactaatgatgatggcgtgttaaaacggcggatgaatcatatttggcaacataaagggctgttggctgctcagatcccaggttcagttgaggacttaaagggtgtagagagcgacttttatcgtaaagttttcctaaataaagatgataactatcgccgcaaacgggaaatggctgccatcaatgccgctgatgtggcgaagcctgaagagattaaagctgatggcgcttcttgtttaattaaaatgaccaagccctgtttcacttctttcaagcaagcttttttagatgctggctccagagtgcggctaaattcagacaaatcggaaaactatgcgtcagctatcgaacgtgttcgttttgtcggtggctatcttgatggtatggatattgaattatcggatcacttaaacgcggtgattggtggtagaggtacgggcaaatcaaccctgctggagtgtattcgctatgcttttgatttagaaccttttggtaaagcatcgaaagctcagcatgacgctattgtaaaaaataacttaggtctcgaaaaaggtatggttgaagtaagagttcgctctgcaaccatgcatggccgcatatttacggtgagccgcaaatatggaaaccagccagtagtggtggagaatgaaaacggcagaatttcaccttatcaccccaaagatttactgcctggcgttgagctgtacggtcagaatgaaatttatgaaatgactcgggatgaacaaagccgaaacctacttattaaacgattcttggaaagtgagcacgagcagtttgataaggccataaccgaagtgctagaaagccttaaggataatcgtgaaaccattattcgtgcgcttagccaaaaagcagatgttgaggcagaagttgagcgcttacccaagttattggatcaggctaaacaattccaggcgctgggtattgatgaaaagttgaaagtgattccaacgctggaaaaagaaaaacaactgaatgagagagttaatgaagaaattactcgaataaaagaagctatcaacatcttaaaagacagtttgccagatacggtatttttaagcgatgccagcttagaaggattaccacactcaaatcttttaaaacaaaagcgtcaagttttggaaatgttaaagaactctttaactcaatgtttaatccgggttgaagagctctccagtaaagcctctggtgatttacttcctctacagcaacaactgtcggaaaggttgcgagcggaagaacaacaacttgaaaatgcgtttaaagacatacctgcaagtcagggtaaaacaggtcggcagattggtgctgaatatcaaaccttactaaagcaaattgaacagatccgcccaaaagaaactgccttgcaaaaccgacaaacccaactcaacgagctctatagtcagcggaagaaactattgcttgagttagatcagcagaccagtgcacgtgctagcgccatgcagaattcggttaaacggctcactcgcaagttggatcaaaaggtacgccttagtctgaattctgaaggtaaccgccaagaattagtgaatttcctgagtgattgcaatttagagggtattgggcaggaaagactagcgtgggttttagagagtgagttcacacccgctaatcttgctgccactattcgccaaggtgaggctgaattaacctctaatttcggtatatctaattccgttgtacgagcgttaagccgtttgcctaagcgtaaactgcttgagctagaagagttgctgcttcccgatacaatggcgattgagctgaatatcactcacggtgaacgcgaggccgttttccgcccaattggggaactatcgaccggccaacaatgtacggcgattttgcacctgttgctattggacaaccaagatcctcttatccttgatcagccggaggataaccttgataacgcctttattgctgagcgtatcgttgctgagctgcgcagagccaagctaagccgacagttcttgttcgcaacccacaacgccaatattccggtatttggcgacgcggaatggattggtgtgctgagtgtggaagataacaaagggttgatccggccagaacagcagggtgcgatcgatatgcccgaagtgcaaaaactagcggcagatatattggaaggtggtaagagtgcgtttaatcaacgtcgtgaaaagtacggctttaactga

SEQ ID NO: 8891 - DNA, 243 bp, Photorhabdus luminescens
atgataaacgaacaagatatttacgaaaggatcaagcaggttttagcgaatgcgccacgcaatcagtacacagctgagctacatctacaaatgattaagtatgccgatgagctgaagaacattacagctaaagacttttgtgaaggtgttgggcttacccagagttttggcactgaattcagtaaaatgcgcaatttgacgcagcgtttgaaaaccgcaggacttaatacagatctgctttaa

SEQ ID NO: 8892 - DNA, 306 bp, Photorhabdus luminescens
ctgttcaaattggttgacctcaatatgaaagtgactaactcgaaacaacttagcgtatatttaaaagatatcaggcttactcaaaaactttctcagggcaaagtggcaagcaaagtgggtattcggcaggacacggtatcaagctttgagctgcacccagattctaccaagctggagaccttctttaagattatgtcggcgttgaatttagaactcgatatccggccaagaaacgtgactaagataaattcgtcagtggaagatgattgcacaacgtcggacccggcgtggaaagaggagtggtaa

SEQ ID NO: 8893 - DNA, 1320 bp, Photorhabdus luminescens
atggcagcactggatgtctacatgaacggttatcgggttggagtattcaccaaagccaatactggcttccaccatttcaaatatgatgagtcctggcttaggttatcgggtagtcgtcccatttcactgtctatgcctctgcgccatcaagcttatcagggggacgaggtatataactttttcgataatctactgccggataatccggaaatcagaagaagaattgttgccaggcacaatgctgaatcaacgcaaccttttgatctgctggctaaagttggccaagatagtgtaggtgctttgcaattggtaccgcaaggtacatccgctaatgatatcaagaggattgaatacaagcccttatccaaggtggaactagagaaagtgctaactggctaccaagctggtgcgccattggggatgatcgaagaagaggaagattttcgtatatccattgctggcgcacaggaaaagacagcgcttttaaatattgatggaaattggtgtttgccattaaatgccacgccgacaacacacatcattaaacttcccattggtaaaattgagagtcattcacattccattgatatgtctgaaagtgtggaaaatgaatatctgtgcatgttgattgccaggatgtttgggctgtctgttcctcactgcttaataatgaaagtgggagagataaaagcattagcggtagaacgatttgatcgcaagtactcatctgacaacagttggataatgcggctgcctcaggaagatttctgccaaaccttgagcgtgccttcggcgaaaaagtatgagagtcatggtggccctgggattcccgagatcatgtcctgcctcttgggttcggttaaagccgagactgaccgttatgaatttatgaagatccaggtattattttggctgttggccgccacagacggccatgcaaaaaacttttcgctgtttattgaggctgatgggcattatcggctaacgcctttttatgacattctttccatgtaccctgtattcggaggcagagggcttcatccccgagatgccaaattggcaatggggctaactgggacgagaggtaggaagtacaacatagagcagatattcccaaggcacttttttcaaacagccaaggtcgctggatttgataaggattcgatggcaagaattcttactgaatatgctgagacggttgataccgttgtcatgaatgtcagagaccagttgccgatagatttccctgttcatatcagtaattcgatattgggagggttacaagccagagcaaagcgcctgaaaattgggtgggattaa

SEQ ID NO: 8894 - DNA, 1650 bp, Photorhabdus luminescens
atgaaaaagaaaataatatcaggtgtttatctgggattattgttcattgcaactttaatactagtttttgaaaaaagtgaagatatttacccggcactgattgctgtcggcatgtttggtgtgatatttggtctagtattttttgcgtcagctcggttactgttttctacggcctttaccggaacactgtttattatctttaagttcctcaatcagataaaagttcattactacaaagagcagttgatgttctccgatctaaacttgatgtttgatcctgccaatcaggaaacactacgccactattggctggccggtttaggcgttgtcgcgatgtttatctggttgatttttaacatgacgctgagctggaaaaaatcatcttccctccgtggtttcaaatggcgtaccgtcggcttggttctggcggcgttctgtacatgggaagtgagcgctaccgccgatgcgttcagggaacagtgggaatcttcactaccaaaaggacgtggtacagtcaccaatatggtgatgtcggccaaagatgccaaatatcatgcgcctcagtttgggcaatcatccgattattttctgcaacaggctaagaatgttgtgctgcctgtcccgcagtcagcgattaaacctgacgtggtgatgttattacaggaatccaccgtgactccgcatatctatcaactgcctgatgatacccgcttacctcatctttatatgttccagcgggattcgggtgtcagcgcccaaagtccaatgcgggtgcaaactttcggtggtggtacttggttatctgaattttctgctctgacgggcttaaatacagatgattttggctcacgtaagaatgcggttttttattttattgttgatcacctgaaatatagcttgttccgtgaaatgaaacagaatggttattatacggttgttttgacaccatttaataaatcttcttatcattccggtcatgcctatcagactctcggcgttgatcgcattattcagccacaagaattgggatatcccgccagtcttgataaaaatctgtggactatttctacccaagagatgttgggttatgtgaaagaaattttggcacaggaaacggataagccgctctttattttctcactaactatgtatgaacatggcccatatgatgaagatcacgctgatgattacaggcttaccggacatgtgaaaaattcacaggcagtaggtaagttcagtcactatatggagaaaatcaaagcttctgatccggcaattaaagatttcagtgagtttgttgctaaacgggaaaagccaaccatgttcctctacttcggtgatcatcaacccaatatcagcctaaatcagtacaatggcgtattttcaaatccgggtcatattacccagtttactatgcgggataacttgcaacagggagaatctattcagactgatgaactgacggatatttcattccttggcggcatgattatggagagggctaaactggatgcttcatctttttaccgagcaaatatgacaatgcgtcatctctgccgaggagcgttggatgattgtcaggataaggcgctggtggagagttataaacactatatttatcagcaactagacgttgcaggtaaaaagtaa

SEQ ID NO: 8895 - DNA, 1860 bp, Photorhabdus luminescens
atgatttttgccaccgcgggccatgttgatcatggtaaaaccacacttattcaagcgattaccggcgttaatacagcccatttgccggaagagaaaaagcgcgggatgaccatcgatttaggttatgcctattggccgcaaccggatggctcttcggttggttttatcgatgtgcccggacatgagaaattcctcgctaatatgttggcagggatcggaggtattgatcatgttttattagtggttgcctgtgacgatggggtaatggctcaaacgagagaacatttagctattctgcgtttgattggccgcccggccatgacagttgcgctcactaaagcagatcgggtagaaacacaacgaatagttgaagtccgccaacaaattgaacatgaactggcaacgcaaggttggagtgaatcccctctgtttgtaacggctgcggcggataaagaaagtattgtccctttgagacagcatctgttgcagttgcatcagcaaaataagcagcataaaaaattacatcaacgttttcgtctggcgatagatcgcgctttcagtgtaaaaggcgcaggcttggtcgtaacgggaacggcactggctggccgggtcagggtgggagataccctctggctaaccggccgggatcagcaaattagagtacgtggcttgcatgctcagaatcaacaggccgatacggctcaggccgggcaacgtattgcactgaatattgctggtgatgtgagtaaagaacaggtttcccgtggtgattggctactttcccgccagccctttgaacacgtagagaaagtattggtggaagtagaaactgatgaacccttgcgaaactggcaatcacttcatattcatcatgctgccagccatataacggggcggatttcattactaaatccgctttctgataagcctctgctggctgaattggtgcttgatagcccattgtggttggttgaggatgatcgactgatattgcgagatattagtgccagaaaaacattggctggtacgcgggtaataaacctaaattccccccgccgtggtaagcgccaaccagcatttttgcattggctcactcagcttgccagaacatcagatcatgcagctaatttagcgctccatttgccacgaggtgcactctctctcgaccatttttcttgggcgcgtcagttaacggaagcaactctccacccgctaatcgttgatcaagatatgattattgccgatggtatggtgttatcacagaacaatgccaagttagcaaagcagaagttactacacgttttggctgaatatcaccagcaacatgttgatcaactgggtttaggcagggcacgtctgaaacggatggcgctgccaacgctggatgaagcgctagtttacactttgatagatgccttgctcagtgatggacagctaaagcaattacgaggttggttatatcttcctgaacacggtttgtcttttagtgatgaacaggcaaaattgtggcaacgaatagcgccctattttacagatgatccttggtgggtacgcgacctgactgctgatttaaaagaagaagaagcaacagttcgcagtttgttgaaaaaagctgctcaattggggcatattatcgcgattgttcctgatcgttattattgcagccaacgaattcagcagttcgccgatctgattcgtcaatttaatcaagatcatggtgcaattaccgctgccgattttcgtgatcaactcggtatcggtcgtaaactggctattcagatattggaattttttgatcgcagtggttttactcgtcgtcaggctgagtcacatattcttagagataatgggctgttctga

SEQ ID NO: 8896 - DNA, 1392 bp, Photorhabdus luminescens
atgacacataaaccttgcctgttgtacagccaactccccgccattgatcgtctattgcgtgagccacaaataacaccattagtggagcaatatggacagacgttggtcactgcaacattaagaagaatgcaggagcaggccagaatcaatatcaagcagtatcaggcactgcctgattggtgtgataactgggcctcggcacttggtcagcaactggagcagaaacaagcgttagctttaaagccagtgtttaatcttagtggtacggtgattcacaccaatcttggccgagcattaatggcagaatcagcgattgaagcggtaacacaagtgatgcgttcacctgtaacgttggaatattccctcaataacgccgaacgtgggcaccgtgaccatgctttggcggatttactgtgtgaattaaccggggcggaagatgcttgtattgttaataacaatgcagcggcggtgttgttattgttggcaaccgtagcatccggtaagcaagtggtggtttctcgtggcgaactagtggaaattggtggcgcattccgtattcctgatgtgatggttcaggcaggatgccgattagttgaagtcggcacaacgaaccgcactcacctgaaagattatcggcaagcgattaatgaagagaccgctctcctcatgaaagtgcataccagtaactacaatattgacggttttaccgcggaagtgtctggccgtgaattggccactctgggaatagcctcgcaaattcccactgcaattgatctgggcagtggttccatgatcaatatggtgcaatatggattgccagccgaacctatgcctcaagattatctgaatcagggtatcgatctggtcactttctctggtgataaattactggggggaccacaagctggcattattcttggcaagaaacactggatagaagccattcagcgtcatccgctgaaacgtgctttgcgggcagataagatgacgctggccgctttagaagccacattgcggttatatcagcgccccgaacagctttgccagcagttgccaacgttgcgtctgttaacccgctcacaacaacaaatgcatgatatggcacaacggctattacctcagcttcaagcacattacggtgaccaatttattgttcgtgatgaaccctgttattcacagattggcagtggttcactgccggttgatcggctgccaagttgggctttgactttcgctgccgttgagggtcaggggagctcgttagagcggttggcccggtgctggcgtggattagcgaaacccgttcttggtcgtatctctggcggacgtttatggctggatttacgctgtcttgaagatgaaaaagcgctattgcaggcattgttgctgtaa

SEQ ID NO: 8897 - DNA, 930 bp, Photorhabdus luminescens
atgagtatccacatcgttcctaaagaacaattgagcaaagatcgcatcaatgaaaaaacagcagattatatcccgccattgctttttgctaatctgagaaatctttatcagcgtcgagcagaacgcttgcaacaattggcaaaagagagctcattcgttgattatcttaacttttcagcacaagttgccgaagctcagcaaaaggcgttgcatgataatccattgaaaatggagatagcagatatcttagaaaaatcggtcattgaaggtaaaccgcctctggattgtaaaaccttccaacgtactgaacactggcaaaaattacttcactctctgatagcagaattactgccggatgcgtcggaacatgttaatgccgctctggataatctagaaaaagcgtcagaacaggagctggaacagatggccgatgctctgctgaaaaatgaattcagtcaagtcagccctgaaaaagcactttttatctgggcggcactttccctctattgggcacaaatggcaaatcaaatcccaggaaaagcgagggcagaatatggtgaacatcgtcagttttgtccggtttgcaacagtatgccagtctcaagtgtcgttcagattggcacaaccaacgggttgcgttatctgcattgtagtttgtgtgaaagtgaatggcatgtagtacgggtaaaatgcagtaattgcgagcaaacccgcgatcttaattattggtcattagatagtgaacacgccgccgtgaaagcggaaagttgcggcgattgcggtagttatttgaaaattctctatcaggagaaagatccaaaagttgaagctgttgctgatgatttagcgtcactgatccttgatgccaaaatggaagaggaaggttttgcccgcagtagcatcaacccgtttttgttcccaaatgagtag

SEQ ID NO: 8898 - DNA, 954 bp, Photorhabdus luminescens
atgctaatcgatctcattacgtcatatagaaaaaccgctgcaatctatacttttgttgatgcgggtttatctattcactttaaaaatggagactatgtagatattaacaaacttgccagtcaatatggtattgattattcgagacttaatcgactatgtgatttcttaattgaaataggcgtattggttagcagtgaccacggagttgcactttctgaggaatgcagtgcacttgctgatcctaatagcgtagaattcttaacagtaaaatatgaaatcaattcagaacattgggattcttggttaatgtatccaaaatccttattggaaaacaatggcaaatcggcatttgaaatggtgcatggaaaatcattttttgagcatttggatagtaataagggattaaaatcagattttgatgctttaatgtcaaaatacacaaataaaataattaaagaattgcttgttatttatgattttgataaacataacagaatattagatctgggtggtggagacggagagcttttgatcagaatcagtgaacaggtcaaaggaaaagattacactgtattggacagatataatgaagtacctatttcagaaggtataaatttcataaaaggagatttttttaagccaattccgacaggttatgatttatatattttaaagaatgttctccataactggcctgataatgatgctatatccattttgaagaactgccgagaagcgatggataataacgcaaccctcctgataataaccttaatgaaaaaaccacaatccttggtagttaaatctgtggatatattaatggatatgctattttcagcgaaacaacgttatttgtctgaattcgaagatatagctaaccaagcggggcttgtcattcgacattataaagatttagatgaaatattttcacttatcgaattaaaggtaaaataa

SEQ ID NO: 8899 - DNA, 954 bp, Photorhabdus luminescens
atgctagccgaacttattacatcatatagaaaatcagccgcaatctacgcttttgttgataccggtttatctattcactttagaaatggagcttatgtagatatagacgaactttcccgtcaatgtggtattgattattcgcgactggatcgattatgtgatttcttaattgaaattgggatattggttaaccacggccataaagtcaccctttctgaggaatgcagtgcacttgccgatcctgaaagtatggagtcattaattgtaaaatgggaactgagtccagattgctggaacgcttggtcaatgtatccgagatctttacttgaaaatgatggaaaaccggcatttgaaataacgcatggaaaatcattctttgaacatttagcgagtaataaattactcaaatcaaattttgactcttcaatgtcaaagggctcagataaaataattgaaaaactacttgatatttatgattttggtcaatacaacagaatattagatattggaggaggtgagggaagtcttctggtaaaaatgagtgagaaggtaaaaggaaaacattacgctgtattagatagatatgatgaaattcctgttttggaaaatatcgattttataaatggagattttctaaaagtaattccatcaggttatgatttatatattttaaaggatgttattcacgattggtccgataataacgcaatactcattttagaaaattgtcgcaaggcaatggataatggttccgctgttttattgataagttatatgaaaaaaccacaatctaagatggtgatatatttggatatattaatggatgtactattttcaggaaaagaacgttatttgacggaattcgaacgtttggctaaccaggcaggattggttattcaagatgttaaagatatcgatgaatcatcttcaattatccagctaggaataaaataa

SEQ ID NO: 8900 - DNA, 969 bp, Photorhabdus luminescens; identical to SEQ ID NO: 6582

SEQ ID NO: 8901 - DNA, 954 bp, Photorhabdus luminescens
atgctagccgaacttattacatcatatagaaaatcaattgccatttatacttttgttgataccggattgtctgttcactttaaaaatggcacctatatggatatcaacgaacttgccagccaatatggtattgattattcgcgactgaatcgattatgtgatttcttaattgaaatcggggtattggttagcagtaatgatagagttgcactttctgaggaatgtcgtgtgcttgctgatcctgagagtatggagtcattaatagcaaagtgggaatttaactcaggtctctggaacgcttggttaatgtatccaaaatccttacttgaaaataatggtaaatcggcatttgaaatagcgaatggaaaacccttctttgaatatttggatagtaataaattgctcaaatcaaaatttgattccttaatgtcaaaagattcagataaaatgattgaaaagctatttaatgtttatgattttaatcaacacgataaaatattagatgttggtggaggagaagggaatcttctgataagaatgagtgaaaaggtgaaagaaaaacattatgctgtattggacagatataatgaacttcctgattacggaaatataaattttatagatggagatttttttaaatcaattccgtcgggttacgatttatatattctaaagaatgttattcacgattggcctgataatgacgcaatactcattttagaaaattgccggaaggcaatgggtaataatgcaactattttattgataaccttaatgaaaaaaccacagtctaatataattaaatattttgatatattaatggatgtatcatctttagggaaagagcgtgacttaacggagttcgaatatttggctaaccaggcagggctggttattcaagatgttaaagatatcgacgaatcatattcaattatccaactaggtgtaaaataa

SEQ ID NO: 8902 - DNA, 954 bp, Photorhabdus luminescens
atgctaatcgatcttattacatcatgtagaaaatcaaccgtaatttatgcttttgttgatatgggtttatctgttcactttaaagatggggcctgcgtaaatatcagtgaacttgccagccaatatggccttgatcattctcgctttagccgattatgtgaatatttaatcaaaataggggtattggttagctgcaatgagggagtggcactttctgaggaatgcagtgcacttgccgatccggaaagtatggaatcattgatgataaggtgcgaagttagcccagaatactggaaagcttggtcaatgtattcaaaatccttatatgaaaataatagcaaaacggcatttgaaatagcgcatggaaaacccttctttgaatatttggatcatcatgaattgttcagatcaaattttgattcttttatgtcaaaaaactcggacaaaataatagagaaattacttgatatttatgattttagtcaacataacagaatattagatgttggcggaggagaaggaaatcttttgataagaataaatgaaaaaatcaaaggaaaacattacgctgtattggacagatataatgaaacgcctgttttagaagatattgaatttataaacggagatttttttaaattagttccatctggttatgatttatatattttaaagaatgttatccataattggtctgatagtaacgcaatactcattttagagaattgccgaaaagctatggatgataatgcaactattttgttgataggtacggtgaaaaaattaaaattagaaataattgactctaccgatatattaatggatgtactattattaggaaaagagcgttatttgaatgaattagaagatttggctcaccaagcaggatttgtcgttaaagatatcaaagagataaatgagaaatattcaattatagagctaggtgtaaaataa

SEQ ID NO: 8903 - DNA, 996 bp, Photorhabdus luminescens
ttgaaagataacgggtatacagataaaaaggatggctcaatgctaactgaactaattgcatcaaatagaagatcagctgcaattcatgcttttgttgataccggattatctactcactttaaagatggaatttatgtcgatataagcgagctttcccgtaaatctggtgttaattatgctcggtttagtcgattatgtgatttcttagttgaaatgggagtgttggttagtaacgataataaattcaggctttctgatgagtgtcatgtttttgccaatcctgaaagttttgagtcattcatgataaagcttgaaatttgctcacattacagtaacgcttggttaatgtatggaaaatccctatttgaagatgatggcaaatcggcatttgaaatggcacatggcaggccattctttgaatatttggatggtaacaagtttctaaaatcaaattttgatgctttaatgacaagagtctcaaatttaatcgttgagaagttacttggtatttatgattttaatcagcacaatagaatattagatgttggagggggcgaaggggagcttttagtaagaattagtgaaaaagtaaaaggaaaacattatgctgtattggatagatatagtgagcttcccgtttctgataatatagattttatcaatggaaattttctaaattcaattccatcgggttatgatttatatattttaaaaaatgttctccataattggtccgatagtgactcaatactcattttggagaatttccgcaaagcaatggataaaaactcatctctattattgataaatatggtgaaagagccagaattttctagatctttcgatatattaatggatgtgttatttttagggaaagaacgtagttttactgaattcgaatatctggctaaccaagctggacttgtcgttcaagagactaaagttatagatcaatcatattcaccgtattcatttatcaaactacagataaaatag

SEQ ID NO: 8904 - DNA, 642 bp, Photorhabdus luminescens
atgaaaagcaggaaagatattattatccgtcactcacctgttgagcgaataaaccattgggcggtagtgctctgttttttctttaccgccattagtggattaggattctttttcccctcttttaactggctgatgaatatcttcggtacacctcaattgtcacggattttgcatccctttgttggttcagtgatgtttattttatttatctttatgttcttcagatattttaaacataactttatcgacaaagatgacattatatggctaaaaaatatccgtaagattgtaaaaaatgaggaagcgggtgatattggtcagtataacttaggtcaaaaaggggtttattggtctatcactattttcctgatattactcgctgtcagtggtgttattatttggcgcccctattttgctgatctcttctctattccaataattcgaattgcgcttctaatccattcaatgtcagctattggtttaatcttgacgattatggttcacgcttatgcggcattctgggtgaaaggaactcttcgagcaatggttgaaggttgggtaacccgtggatgggcgaagaaacatcacccacgttggtatcgtgaaataatgaaacaggagcagcaagaagagaaacgttaa

SEQ ID NO: 8905 - DNA, 930 bp, Photorhabdus luminescens
atgtcattgcaaactcaagacatcattcgtcgctctgccacaaattcttttactcctgcaccacgggtgcgggatgaccaagagggcgttgcaaaactgattgatgtgacaacatgtatcggttgtaaagcttgtcaggtggcctgttctgagtggaacgatatccgtgacgagatcggtcataacgttggtgtttatgataacccggcggacttaaccgctaaatcatggaccgtgatgcgcttctcagaagttgaagagaacggcaaactggaatggctgattcgtaaagatggttgtatgcactgcgctgatccgggctgcttgaaagcttgtccagccgaaggggcgattatccagtatgcaaatgggattgttgattttcagtctgaacactgtatcggctgtggctactgtatcgcgggttgtccgttcaatgtgccacggatcaacaaagaagataaccgggtatataagtgcactctgtgtgttgaccgcgttaacgtcggtcaggaacctgcctgtgtgaaaacctgtccgaccggtgcaatccattttggcagtaaaaaagcgatgaaagatttggcggctgaacgggtgagtgagttgaaaggccgaggttatgagaacgcgggcctgtacgatcctgatggggttggtgggactcatgtgatgtatgtgctacaccatgctaacaaaccacagctatatcatggcttaccggacaatcccgctatcagcccgaccgtcaccttctggaaaggtatctggaaaccgctggccgcagtgggatttgctgccacattcgctgccagcctcttccattatgtgggaattggaccaaaccgagtgactgaagaagacgaggaaaatgcgcgtcgtgatacggaatcatcacaaaaatcagctaatggggaggaacagcgatga

SEQ ID NO: 8906 - DNA, 2460 bp, Photorhabdus luminescens
cacggaccaacggtagcaagtcttgctccaacatttggtcgcggtgcgatgaccaaccattgggttgatatcaagaacgcgaatctgatcgtcgttatgggtggtaacgctgccgaagcacatccagtgggattccgctgggcaatggaagccaaaatccataataacgctaagttaattgtgattgatccgcgttttacccgtacagcatctgtggcggatttctatactccaatccgttctggtactgatattgctttcttgtcaggtgtcattttatacctactgaccaacgataagattaatcatgaatatgtcgaggcgtataccaacgccagtctgatcgtgcgtgaagattactcgttcgatgatggtttgttcagtggttacgatgcagaaaaacgtcaatacgataaaaccagttggaactatgcactggatgaaaacggctttgctcaacgtgatatcacacttaagcacccacgttgtgtatggaatctgctaaaagagcacgttagtcgttacacgccagatgtcgtcagtaatatttgcggtacgccaaaagaggacttcctgaaagtctgtgaatatattgcagaaacttgtgttaaggataagaccgcttcttttctgtacgcgctgggttggactcaacactcagtgggtgcacagaacatccggactatggcaataatccagctactgttgggcaatatggggatggcaggtggcggtgttaatgcattgcggggtcactcgaatattcagggattgactgatttggggctgttgtcgcaaagcttgccgggatatctgacactcccctcagagaaacaggctgatttgcaaacttacctccaggcaaatacgccaaaaccaatgcggccgggtcaggttaactattggggtaactacccaaaattctttatcagtctgatgaagagtttctacggagataatgcccgtaaagataacgactggggttttgactggctgccgaaatgggacaaaggttatgacgttctgcaattttttgacatgatgtcgaaaggtgaagtgaatggctatatttgtcagggctttaacccggtagcctcttttccgaataaaaacaaagtcgttggtgccctgtcgaaactgaaattcctgatcacgatcgatccgcttaatactgaaacttcaactttctggcagaaccacggtgaatttaatgaagtcgattcatccaaaattcagacagaagttttccgcctgccatgttgctgttttgcagaggaaaatggctcaattgttaactctggccgctggttgcaatggcactggaaaggggctgatgcaccgggagaagccatcggtgatggcgaaatcctttcaggaatcttcaaacgtctgcgggatatgtaccgcacggaagggggtgcatcaccagagccgatgctgagcatgacttgggattacttcaacccggacaaccccacatcagaagaggtggctcaagagagtaatggccgggcactggttgatctgattgatgctaatggcaacgtcatcgtgaaacaaggtcagcaattaacctcttttgcgcagctacgtgatgatggcacgaccgccagtggttgttggatctttgctggaagctggacgccggaaggtaaccaaatggcccgtcgtgataacgcagatccatcaggattgggtaatacgctaggttgggcatgggcatggccgttaaaccgtcgtattttgtacaatcgcgcatcggctgatccgcagggtaagccgtgggacccgaaacgtcagttactgacgtgggatggtactaagtggggtggtgtcgatactgctgattacagcgtggcggcaccggaaacggatgttggtccatttatcatgcaaccggaaggtatggcacgtctgtttgctattgataagatggctgaagggccgttccctgaacactatgaaccttttgaaacaccattggggaccaatccattgcatccgaatgtggtatccaacccggcagcccgagtgttcaaaagcgactttgaagcaatgggtaagccagataaattcccttatgtaggaacgacttaccgcttgacagagcatttccactattggacaaaacatgcattattgaactcgattatccaacctgaacagtttgtagaaatcggtgaaaaactggcggaaaagaaaggcatcaaacacggtgataccgtcaaggttagctctaatcgtggttacatcaaagcgaaagcggttgtcaccaaacgtattcgaaccctgaatgtacatggtcgtgaagtagatactatcggtattccgattcattggggctttgaaggggctgcgaagaaaggctttattgccaatacgttgacaccatttgttggggatgcgaacacacaaacgcctgagttcaaagcgttcctggttaatatagaaaaggtgtaa

SEQ ID NO: 8907 - DNA, 588 bp, Photorhabdus luminescens
atgcaagtcagcagaaggcagttctttaagatctgcgctggcggtatggcaggtacaacggtagcagcattgggctttgcaccaaccgcagcccttgcacaaacgcgtaattataaactgttacgtgcacgtgaaacccgaaatacctgtacatactgctctgtcggctgtgggctgttgatgtacagccttggcgatggcgcaaaaaatgcgaaagcaactatttttcatattgaaggtgatcctgatcacccagtaaaccgcggtgcactttgtcctaaaggcgcgggcttggttgattttattcatagcgaaagccgcctgaaatatccggaatatcgtgcagcaggttctgacaaatggcaacgtattacttgggatgaggcatttgatcgcattgctaaactaatgaaagcagaccgtgacgctaatttcattaaaaccaatcaagagggtgtcacagtcaatcgttggctgacgaccggtatgctgtgtgcatccgctgccagtaacgaaacaggttatctatcgcaaaaatttagtcgcgctctcggcatgctcgccgtagacaaccaagcacgtgtctga

SEQ ID NO: 8908 - DNA, 831 bp, Photorhabdus luminescens
atgtataacgtaaaatcagggaagttgttaccatttggtgtgattgagggggtaacacgaacgaatgtgcaacaaaaacaccatttcgatacattaaaagttgattggattgcagaagaagttcctgttgctttagtttataacggtatttcacatgttgtgatgatggcaagtcccaaagatctcgaatatttcgctattggattttcactttccgaaggcatcattgaatctcaacacgagattcgtagtattgatattgtcgctcattgtcgcggcggcattgagttgcaaatagaactttctagccgccgttttgcgggtttgaaagagcgcagacgtaatctggcgggacgaacaggttgcggcatctgtggagcagaacaactttctgatatttttcgccctatttccccgttgcctttcactcaaactttttcattaaaccagcttgactatgctctctctcagctgactagcgtccaagatgttggtgcattgacaggttgtactcatgcagcaggttggatcaatccggaaggtaaattattgggcggatgtgaggatgtaggtcggcatgttgcactggacaagatgctaggcatgaaggcaaaaacaggctggcagcaaggcgctgttctggtatccagccgtgccagttatgagatggtacaaaagtcagccatctgtggcgttgaaattttattggctgtttcagccgcaacttcattggcggtagaaatcgctgaccgatgtcatttgaccttggttggtttctgtaaacccggtaaagcgactatttatacccatgctgagagattaataagttaa

SEQ ID NO: 8909 - DNA, 768 bp, Photorhabdus luminescens
ttgaaaacacacattattattcaatctgcaaaacaacgacctgatttaaaaaatgccactgatgagcttatttataataattggcctttgtttatgcagaactccccagtaacatatgagcattggaataaattatttaaatcagatttcagccgttttcagcaatttgctattttgcagcaaggagaaaaacagcgattaattggtgttgctaattcagtacctttcccttgggaaggcgattcattagaacaactgccagataatggttgggatgaagttttccgcagaggtatgtttgcccgtggaaaaaaagtaacaaaaatgttgtcagcactgtcagtaacagtatctcctgaatttcgtggcaagaatttaccggcattactcattagtagcttaaaacaagcggctattgaggaggggttaaaagggttagttgttcctgttaggccgacgttaaagcaaaactatccattgcaggattttgtacaatactgtagatggaaaaatgacaacaatgaaccttttgatccttggattcggacaccctggtgcctgggagcgaagattattcaaccggctatgcactcaatgtctataaatgccacgcttgataaatggcaggaatggacaggaatgaaatttctgcaaagtgggcagtatattattcctggtggtttagggccgctagtggtggatgtacaacaacaaatggcttattacattgaacccaacctatggatgtttcacaacttgcatgcgtga

SEQ ID NO: 8910 - DNA, 921 bp, Photorhabdus luminescens
atggcgggtttactaccgattactgtaattgctgcggcggcaggagatattgttcttagtttgccgagacttcctcgtagtggagcagatcaggaagctaaagaaattgatcggcagattggtggttcaggtttcaatgttgctcgggctttagttcgcctgcaaatccctgtgattaatggtatcccggttggtaacggatgctggggggagcagataaccaaagagatgcaggaccttgggcttgaggtcacattgaccaatccatatcttgataatggttggtgtttggcaatggttgaaccggacggtgaaagaagttttgtctccgtgagtggttgtgaagttgactggagtacggcaatgctctcttctattgttttgccggaaagggggtatatctactccagtggttatgtcatggcgagtaaatcaacggcgattttatgtgactggttactggcgtctccatccgggcagacgttattgctggattttggtccgcgtttaccagaaatagatcccactttccttgatgcattacctgctgaccggaccattctgacactgaaccgtgatgaagttgctatattgtgtggagaaggtgatcctgccgtccaagctagccgttattccagcgaaagaaaaatcactattatctgccggttaggttcacagggtacatggatatgtctgcctgatcgtaagccagaatatgttgctgcttataaagtaaaagtggtggataccatcggtgctggtgatgcccatagtggtggcatgctggcgggattatcgcagggaatgtcgctgagagatgctgttgaacttggcaatcgtgttgctgctattgtcgtcaaccgttctggtgctgctggtgcaccgacaataaaagaactagaggagtttgtgtttgaataa

SEQ ID NO: 8911 - DNA, 1218 bp, Photorhabdus luminescens
atgagtgcattacttccaggttggaaacgcaaaacggctttatttttatcagctcaaacaatttctttgctaggttcttccattgtccagttctctatcgtctggtatatcaccctaagtacttcatcgggggaaatgctggctatttcggtgctctgcgcatttcttcctcaggtattgatctctttatttgccggtgtttgggcagatacttataaccgtaagtggctcagtattgcctctgatgcgttaattgcattagtcactcttggtttagcaatctcttttatgctcggatttaagagcattgagctgttatttgtcgcactgattgtccgctcgttcgggacgggcatccaaatgccggctgttaatgcgattattccgcaactcgtgccgaaagagaaattgctgcgggtcaatggtattaatacttctctgacttcactgatgatgttggcatctcctgctatcagtggctttttatattctcaaacttcaattgagaatatttttttagtggatgtaacgactgccattatcggcattagtattgttgcgtttattcctattcctaaaattgtttctggctccatgccggataataaatttcaggcaatcttagcgggtttccgttatttgcaagagaataaactaatcagaaatcttttgatttttctgatttgtgtctgctttctggttagtccggctgcatttttgacacctttattagttaacaggacatttggggaagagccgtggcgtttagccattaatgaaatgacatttagtgctggcgcggttttaggtggattgctgatttctttctggagtgaatataaaaataaaatgcgtataacggcagtagcttgtgcgttgtttggcatatttatgatcgctcttggtaatgcctattggttcccgttttatctggtactcaatatctttttgggcatggtaacaccttgttttaatgcaccgataactgcggtttttcaggaaagagtcgaacctgaaatgatgggcagggtattcagtttagttcagattgctatgtcttgctctctaccattaggtatggtgctgtttggccccattgctgactatattagtattcaatctcttttaatgatatcgggtggattgatattactgacgggcacactgttttttatgtttaacggagaagtcagccgagaaagtagcagcgcagtttaa

SEQ ID NO: 8912 - DNA, 162 bp, Photorhabdus luminescens
ttggcggggatggtggtgaacctttcaggatttaatgaaccgggtggtgtaacggggacagcttctgccgcatactggttattcttgttatttgctatcgcaccattgctggcgctgtttaccgcatggagagcagcgaagattaggttagtggctgagtag

SEQ ID NO: 8913 - DNA, 942 bp, Photorhabdus luminescens
  misc_feature (912)..(912): n is a, c, g, or t
atgacatggcagcccgatgcgccttttaatgctattcccttattgccaccaaccgtaaaggtgatggagtctattgcggtattaaaagcctgtatacctgccagagctgcactggctgagcttaagcaagctggtgaattgtcgcctaatcaggggttactcattaacttgttgccgctgctggaagcaaaagacagctcagaaatcgaaaatattgttactacttcagacaaactgttccaatatgcacaagaagacagtctggctgatcctgcaacgaaagaagcactacgctaccgcactgcactttatgaagggttcatacaattaactcggcggccactatgcacgaatacagcgattgaagtttgtagccgactaaaagctgttgatatgaatattcgcaaagttcctggtacaacgctgagtaatcaggcaacgggtgagattatttatacgccgccagagggagaatctcagatacgtgatttactcagcaattgggagcaatttcttcatgcagaagatggaatcgacccattaatcaaaatggctattgctcactaccagtttgaggctattcatccatttactgatggcaatggacgtactggtcgtatcattaatattctctatcttattgaacagcagcttttgacattaccaattctttatttaacttgctacattgtacaacataagagtgattattatcggttgctttcccaagttactgctgctggcaaatgggaagagtggattatctatatgttaaccgcagtagagcaaactgctaaatggactacggataaaattgctgcggtaagagaattgattgaacataccagtgagtatataaaacaaggtttgcctaaaatttacagccatgagctggtgcaggtgatatttgancaaccttatgcccgtattagtaattggtga

SEQ ID NO: 8914 - DNA, 120 bp, Photorhabdus luminescens
ttgtgtgatattggagtattacgagaaattcaggctgggaaagaaaagctatttgctcaccctaaactggtacagttaatgactaaggatagtaatacattgagttattacacagtttga

SEQ ID NO: 8915 - DNA, 951 bp, Photorhabdus luminescens
atgtctttggatgtagcttatagcattgaattaaatgagtatatcgaccctgatcgagcttatgatttgtattggtctggattaattactaataaaaaattatttatatgtcctggcgaagattgttctgcacaggttacttgtgcgaatcttgatgaagatatgcagaacatgcgtgtagttcctcattatcgcatttatggtaaacatcatcctaattgtgaaatagagagaaaaattccgcttaagatattaagtgtcattgaaaatgctaagcaaggagagaaaaagacacttgatcagtcgatagttgattcttttatacttcatcgcccggatagttattatgaatctaagaagaaggatgataataaaaatcatggaaataagcggaataaatatctatcaaagtcacatgctcttaatctgaaagaaatcggcaatatagggaaagtctactcggttagaactatcgtaagtcgttatataaggtatattaaggataacacgttaataaataggaaattgaatatatctggaatggatataccatattctggggtgtttaaatgtatttgggagcagaaaatagattcgttgccagagtatgggattatatattatggttgggcttatatagataagtatgaaggtaaaggatatcgtattaaatttaaaaaaaagataaaaaactcacatggtgaattgctacaaacaacttgttttatatccaaaaagctaatagataaatatcatgtaaaaaaacttgtcatcaagaggttgtcaaaaataatacagacacaaaaatctacagcatttgtcttcatttatgggcggcctgaaataattagatcgaaaatcaataataaagagtatgttaatttctatgttgataacttagactacattgatattaatgtagataatcctcttcctaaaagaaaagtttaa

SEQ ID NO: 8916 - DNA, 168 bp, Photorhabdus luminescens
atgcgcaggaaattatcgcattccacgattgtatactgcatcgtaatggcatacatatccttaaataacgacaatacactggaaaatctggctgtagataccgctactagtgagaaaagtgttagcccgctggcacagaatttacggaacgttggtaaaaaatactag

SEQ ID NO: 8917 - DNA, 468 bp, Photorhabdus luminescens
ttgctttttctcgatgatttctacggcaatcatggtttttttggatattatcctcaaacgaagtatggacctttttgtttctctgaagagtgtattttaacggcagaacaaattttcaaaacaccaatttctctcttgaaacaatcgctgatatttatacctgtatttgttttttttataggtctatacaactataaacttgcgattataaatacaaaaaatgataacatattaaacaaagaacgagatttctacgcctatttaaaagaaaacccaagcgataaagaagatctattgaaggcattaaacaaaaagaaactttttaatgctctattcgatgatgaattgaattttaataccggtgcaaaggaaaaaatagaattatacattaaaaatagaaaatctcatggagtaataaccttacttgatgaaaataaaaaagaagcctataaaaaaatatacttataa

SEQ ID NO: 8918 - DNA, 1182 bp, Photorhabdus luminescens
atgccaaagggtttctcgtttaaggatacttttactcccattcaaagaaaagaaagcttaatcggcttgctggggataaaagatattgaaaaatttgaaagtctgcttagagatggtgttgaaaacgcatattatattaagccaccgattaagaaaaaaaacggtggtgaacgaattgtttatgcaccaaatcgaatgcttaaatcaattcttcgaaaaataaacaatagaatatttaatcaaattaatttccctgattatttgtatggttcaataccagacaaagaaaaccctcgcgattacattttatgtgctcatcaacattgtaaagcaaaaattcttatcaaacttgatattgaaaattttttccctacaatgaaaacaaaatttgttttcaatatattcaaagacttatttaagttttctgatgaagtatcaaacattttaacaaagcttactacgtatgatggttttgttccacaaggtgccccaacaagtacttatttagcaaacttatatttttatgattgtgagccaaataaggtaaattacctacgtagtctcggtttcagatacactcgtttaattgacgatataacagtatctcgcttaaaaaaagaaggtgattggaaatttgttgaaactatcatttcagaatttataacgcagaaagaattatcagtgaataaagataagactcaattattatcagctaattcaccacaatcgtttaaagtacatggactatgtatagaagaaacaactccacgatttacaaagaatgaaagaataaatataaaaacacaagtaaagcgagttgtaaaaacaggatataatcgtgataatatcagaatgcagaagaattatcatgacgtctatttttctgtcaaagggaaaatcactaaattaaaacgagttaattgtcctgattatcctcttctaaaaaaattgctggcaaaacattgcgatcccctcccagaacataaagaaataaaaagaattaatagggtgatatctaacctatcaaaagatcatgctacttttggtagcactgaaagatatagaagccgttattttcaagtcatatttcgcttagaaattttgaagaaactgtatcctgtagaggcaaatgagttcaaagctcgtctaaaattaataagtccaattaaaaatgaaaattaa

SEQ ID NO: 8919 - DNA, 189 bp, Photorhabdus luminescens
ttgaatccgaaggaagcaacacaaaagtataaaatccaccctaccttcactaactttttccaactgtgtactgtactccgtggtctagcttttgcatggctcgccagagtgcacccagaaagacctttcggtcgtcctagacttaaggacagatctttttgctttaacgcttcctttttcatcaagtga

SEQ ID NO: 8920 - DNA, 195 bp, Photorhabdus luminescens
atgtcagcgataaaacgcgatacgaaaaaatcttcatcggcaggcaaatctccgactttccagatacggatatcacctgagctacgtgaacagcttgatgaagttgtggtaaaagaaggtgtcagcttgggcaactggttcaaagaactcgcccgtaaagagcttcgtaagcaagggattgagccgaaggggtga

SEQ ID NO: 8921 - DNA, 432 bp, Photorhabdus luminescens
atgatattgcgccagatcaaacaagatgtctacaacaggctttgtgaaaatagaccgcaagttttagaaaaaaatagggggtatggcgttatatcgattactttaaacggacttacattcgcagtccctttacgaagtaatctaaatcatcctaatgggttcaagactatcttcataaaggaaaaaaaatgctggagtggcttagattactcaaaagctttactcattgatgttgatgatctagaaccacaagcttttaagctaaaaatggaaaaagagtatgaaaagttaaaagcaaacgaaaaaaagatcgaggtggaatttggggcttatgttcaaggatacattgaatacataaatactggtgagggtgatgatcgttgttataaatttactacactccagtatttccatagagatttgggcttatag

SEQ ID NO: 8922 - DNA, 174 bp, Photorhabdus luminescens
ctgagcgccatctttcccgatacgctgttcaaaatgtcaaatggtatttcggtcaggaatattattgatgacatcggccagacgacagaaatgctgccagctaaggcgatcacgatcaagcaactgatattccatcatttcatcggacagattttagaggttctctgttcatga

SEQ ID NO: 8923 - DNA, 231 bp, Photorhabdus luminescens
ttgatctcaacgcgtaagcaacataatacccgcgacgaaaatcagcggatacgcaaaggtcaccccttaatgactggagcgcgcacaagcgctgtcaaaaagataccgaggcaacctggacgcaaaaacacggtaaaaattatttttgtatcagcttcttgtatagtaattgatagaattgagtggactttactcaatattctgaatctgctccctcatctgttcgattag

SEQ ID NO: 8924 - DNA, 864 bp, Photorhabdus luminescens
atgatccgtagtatgactgcttttgcacggcgagatatcaaaagtgaatggggaaatgcggcttgggaactacgctccgttaatcagcgttatttagaaacttatatccgcctaccagaacaattcagaagcttggaaccggtgatccgtgagcgcattcgttcccgtctgactcgcggaaaagttgagtgcaacttacgttttgaactggattcacgctctcaaggcgaacttatcctgaatgaaactttagcaaaacagctagtcaatgcggcgaactgggtcaaacaacagagcaacgaaggtgaaatcaaccctgttgatattctgcgttggcctggcgttatggccgcagaagagcaagacctggatgctatcaacactcaattgttgcaagaactggatacaacactggatgcctttattcaaagccgtgaagccgaaggcaacgcacttaaaattatgattgaacaacgtttggacgcagtaaccgaagaagtcggtaaagttcgccaacaaatgcctgaaatcatgcaatggcagcgggaacgcctgcaaaccaaattggaagaagcgcaggtacagcttgaaaataaccgtcttgagcaagagttagttttactggctcaacgcctcgatgtggcagaagagttagatcgccttgatgcccacaccaaagaaacccgtaatattctaaagaaaaaagaagccgtcggccgccgactggattttatgatgcaggaattcaatcgcgaatctaatacgcttgcctccaaatctatcaacgccgatatcactaactccgctattgaattgaaagtgctaatcgaacagatgagggagcagattcagaatattgagtaa

SEQ ID NO: 8925 - DNA, 729 bp, Photorhabdus luminescens
atgcgcccaacaggaagagcggcagaacaagtgcgtcctatcacgataacccgtcattatactaagcacgcggaaggttcggttctagtagagtttggcgatactaaagtgttatgtaatgcctccgttgaagaaggggttcctcgtttcttgaaaggtcaggggcagggctgggtgacggcggaatatggcatgttaccgcggtctactcatacccgaaatgctcgtgaagcagctagaggcaaacagggcgggcgtacgatggaaatccagcgtttaattgcccgttcgctgcgcgccgctgttgatttaaaaaaactgggtgaatacaccattacactggattgtgatgttattcaggctgatggcggtacccgtaccgcttctattactggtgcttgtgtcgcgctagttgatgcgttgaataaaatagttgaagcaggcaagctgaaagagagtcctctgaaatcaatggttgctgcggtctctgttggcattgtggatggtgaaggtcgttgtgatctggaatatgtggaagattccgccgctgaaactgatatgaacgtcgtgatgatggaagatggccggatgattgaagtgcaaggcactgcggaaggcgagccatttagtcatgatgagttgttatccttattggctcttgccaagggaggattagaggatatttttgatgcgcagagaaatgcgttaaaacaaaatgcattaaaataa

SEQ ID NO: 8926 - DNA, 642 bp, Photorhabdus luminescens
atgaaagcctatcagcgcgaatttatcgagcttgcgctaaaaaaacaggtactgaaatttggggaatttaccctgaaatcaggacgtaaaagcccgtatttttttaatgccgggctatttaatactgggcgtgatttggcgttaatcgggcgtttttatgcagcagcattgttggatagcggtattcagtgcgatttgttattcggacccgcttacaagggtattccaattgcaacaacaacggcagtggcactggcagaacatcatgatattgatatgccatattgttttaaccgtaaggaagctaaagatcatggcgaaggtggtactttggttggtagcccacttaaaggcaatgttgttctggttgatgatgttattaccgcaggtacagctatccgtgaatcgatggagattatcaagcagcataatgcgacgcttgccggcgtgatgatttgtcttgatcgtcaggaacgtgggaacggtgaaatctcggcaattcaggaagtggaaagggattatggttgcaaagtgttttctatcattactttgaatgatttgattaattatttgagtggtcagccagagatgaaagatcatctggatgcagtaaaagcctatcgtgcgcagtacggtatctga

SEQ ID NO: 8927 - DNA, 600 bp, Photorhabdus luminescens
atggcagaaaacgaaaatacaaagaaaagaaacagacgcgaggagatcttgcaggcgctggcgcatatgttgcaatccagtgacggtagccatcgcatcactactgctaaactggccgccaacgtgggtgtttccgaagctgccctatatcggcattttcctagtaaaacccggatgtttgacagcttgatcgagttcattgaagactcattaatttcacggattaacctgattctgcaagatgaaaaagataccataactcgtattcgcctgatattggtcctgatcttgggtttttcagaaaaaaatcccggtctgacccgcatcatgacaggtcatgctctaatgtttgaacaaaaccggctgcaagggcgcataaatcagttatttgaacgaattgaagtacagatccgccaagttttaaaagagaaaaaattacgtgatggacaaggtttcagttatgatgagtcgttattagcatctcagttactcgcattttgtgaagggatgctttcacgttttgtacgctctgagttccactatcgtccaacgcaggaatttgaagcacgctggccattattactggctcagttacaataa

SEQ ID NO: 8928 - DNA, 459 bp, Photorhabdus luminescens
atgatgaaaaaaatcgacgttaaaatccttgacccacgtatcggggaagaatttcctttaccaacgtacgccacaccgggttccgcaggtttagatttgcgggcttgcctggacaatgcggtagaactggctccaggccaaacagaactgcttccaaccgggcttgctattcatattggtgatgaacaactggccgccgttattctgccccgttcgggccttggacataaacatggcgtcgttctggggaatctggtgggtttgatcgattctgattaccaaggtcagctcatggtttcagtctggaatcgtggtgataaagctttcactatccaaccaggcgaacgtatcgctcagatagtttttgtacccgtcgtccaggctgaattcaatctggtagaagattttgaaaccagcgaaagaggcagcggtggtttcggtcattccggtcgccaataa

SEQ ID NO: 8929 - DNA, 1218 bp, Photorhabdus luminescens
atgatggcaggactttccggcaaacagattgtgctcggtatcagcggaggaatagccgcttacaaaactcccgagctagtacgtcgcctgcgtgatcgcggcgcacaagtacgtgtagtgatgacaccagcagcagaatcgtttattacaccaatgacgttgcaggcggtttctggttatcccgtttccgatgacttgttagatccagcagcagaagctgctatggggcatattgaacttggtaaatgggctgatctgattattctcgccccggctactgctgatttactggcacgcctggtcgtcggtatggcaaatgatctcgtaacaactctttgtttggcctccccagccccaattgccgccgtacccgcaatgaatcaacaaatgtttcgagctcaagcaacgcaacataatctcaagcatcttgaagaacgaggcgttctcctgtggggaccggacaacggcagccaagcttgtggtgacgttggtcccggcaggatgctaaatcccatggcgattgtcgaactcgctgaacaacattttcaagcaagccaagacttagctcacctaaaacttgctattaccgccggaccaacccgtgaagcattggacccagtccgctttatcagcaatcacagctccggcaaaatggggtttgctatcgcccaggctgcggcaacacgtggtgcagaagtcaccctgatcactggccccgttaatttaccgacaccaccgggagtcaaacgaatcaacgtcaccagcgctctggaaatgaatgaacaagcacaggcagtagcgggttcacagaatatcttcattggttgtgctgcggttgcagactatcgcgctaaacagattgccgaagaaaaaattaaaaaacagggtgatgagatcacttttaccctgatcaaaaacccggatattgttgccaatgtagcagcaatgcaagaaaaccgcccctttgtggttggatttgcggctgaaacccagaatgtggaagaatacgcacgaaaaaaactgaaccaaaaacatttggatctgatttgtgcaaatgatgtatcccttactggccacggctttaacagtgatactaatgcattacatttgttctggcatgagggagaaatccgcttacctcatagtaataagttattacttagccaccatttattagacgagatagtcagacgctatgatgaaaaaaatcgacgttaa

SEQ ID NO: 8930 - DNA, 693 bp, Photorhabdus luminescens
atgggaattgatgtcgctgaaaatacaggagaaatatattcaaatttagctcccagagaaaaattgttggcttatggttctgtttctctaacagatgctgagttactggctatttttttacgtaccgggaccagaggacttcctgttttacgaatggctgaatttctactgaaagaatttggatctttgtaccatttactctctgctgattatgacactttttgttctcataaagggatgggattggctaagtatgcacaattacaagccattgcagaactggcaaagcgttttttttccagccagtttatgcatgaggatattatgagtagtccaagtgtgactcaagagtacttgcaaaacctattatcagggcgcgatagggaaatatttgttgtgttgtttctcaataatcaaaatagagtcatctgtcatgaggagatgtttaaaggcaccattaataaagttgaagttcatcctcgtgaaattgtccgatcggcgataaaggtgaatgcttcatccgttattttggctcataatcatccatcaggtcatgcagaaccaagtttggcagataagattgttacagataaagtgattgatgcctgtaatttggttggtgtaaaagtgctggatcatctggttattggtcggcaatgttgtgtttcatttgctgagcgaggatggatttag

SEQ ID NO: 8931 - DNA, 237 bp, Photorhabdus luminescens
atgtcccgagtctgccaagttactggcaaacgcccgatgagtggtaataaccgctctcatgcattgaatgcgactaagcgtcgttttctgcctaacctgcattcccaccgtttctgggttgagtccgagaagcgttttgtgactctacgtgtatctgttaaaggtatgcgtgtgattgataagaagggtatcgatgcagttttggctgagcttcgtacccgcggtgagaagtactaa

SEQ ID NO: 8932 - DNA, 168 bp, Photorhabdus luminescens
atggctaaaggtattcgcgataaaattaagctagtttcttcggctggtactggtcacttctataccactacgaagaacaagcgtactatgccagagaaactggaaatgaaaaaatttgatccagttgttcgtcagcatgttatgtataaagaagccaagattaaataa

SEQ ID NO: 8933 - DNA, 1122 bp, Photorhabdus luminescens
atggctaaagaaaaactaaatattttacatacagaatcatcttgtggttggggtggtcaggaaatccgtatcctgacggaatcccaaggaatgataaaacgtggacacaaggtggttattgtctgttgtcccagttctaatatctaccgtgaagcaaaatcttatggtgtgccggccgtagctctgcctattgaaaaaaagcggctgtcctgcttgcttgctatgcgtcgttggttgaaaaaagaaggccgtcaatttgacgttattaatacacatagctcgacggatgcatggttggttgctgtagcttgtgcaacgttaaggcatatgccgccaatggttagaaccaggcatgtttctactcatgtttctaattcaatatcaactcgttggttgtatctgaaagcgtgctggcatattgcgactaccggtgaaaaactacgccaacatctgcatgctaataatcgttatccattacagcatatgacatcagtgcctaccggcatcgatttagatcgtttccgaccggaagataagaaagtttgccgtcaacggattgggattcaaaataaaccgacattaggtgtcgttgcgaccatgagaacctggaaagggcatcgctatctgttggaaagctggaaagttctgcatcagaaatatcctgattggcaacttttgtttgttggtgatggtccacaacgtaagtcattggaacctttagtaaagcgagaaggtttgtcaaacagtgtcatttttttaggtaaccgtcaggatgttcctgattgtttgaatgcgatggatttatttgcattaccttcttttggtaatgaaggcgtgccacaaggcattatgcaagcaatggcgtgtgggatacctgttgtatcaacctccgttggtgcaattaccgaagcggtagttgatggtgaaacgggttatatcgtggaacccagaaatacagagttattgacgaaaagtttagagttgttgattcataataatgaactgcgtttgcaattcagtcattcttcattagagcgggcaatggctttatttggcatggataatatgttggataaaatggaaaatatcttttttcacagcattaaaggtaaaaaacgttaa

SEQ ID NO: 8934 - DNA, 1023 bp, Photorhabdus luminescens
atgcagatcaagaatattctggtcattgttatagcacgtttcggtgataccttattggtaacgccagtgatccgtgctttaaaacagaagtggcctggtgcaaatattgatgttatggctcataaaaggactaaacagatccttgaaaatataagcgatatcaataaattgactgctttttcgaaaggtaaggcaaaatggtgtggttggtttacccgtaagcattatgatctggctttagtatacagtgacgataaacctttattacagtatgcgaaacgtaaatcacacttaacggtttcattttcagataagtccgcgttgcaatctggttggctgacagtggaaaagccaaaggggttgatgccagctcagcaggaacgggccatgcttgctagtgcggtagatgttgaggtcaatgattggcggttgaattattgtgtgagtgaaaaggagttacactttgccgagggttttatacggcagtatcatttagagaacaagctcctgattggttttcagttacaaagtttcccggcaaaagcttatcgtgattggccggttgaacatttttaccaattagcgcaacacatttgtggccgttatccccagtcgcatattatgttactaggcagtgctgacggtaaaattgctgcacagtcactggcaaaaagattaggggctgaaaagtgcacttcattggttggtagactaacaatgcggcagaatgcagcaataatgagtcaacttgatttgtatgttggtgttgataccgggccgacacatttagctggcgcattaggtatcccgatggttgctatgtatcatagtttccacccaggccgttttttggcacctcaacagcattcgcatttggtagttattgaacacccggttcactatatgcaagccacccgcaaagactcgatgtctgcaatatctgttgaacaagtctggcaggcaacgcaaaagttactagaaactcagttgtcaggaagaaaagatgaaaataggtttggttga

SEQ ID NO: 8935 - DNA, 1119 bp, Photorhabdus luminescens
atgaaaataggtttggttgatgtcacggtaactatgtcttacggtggtattcagacggcagtctgggaactggcgaaagcgttgactgatgccggtcatgagatccatatttttggtggaaagggtgatattcaaccagaactcaatgggagagcaatccaggttcacacttttccattcattcccagagagaaagtcattaatattggtcgacgttttcaacgtattattgaacgttactcatttgctcgccatgctcgcgatacagttgttactgaggattttgactgggttattctgacgaagccatttgattttttctggcctcgaatgatgccaaaagagagccgcactaaattttgctatatgagcggtggcaccagttttttcaagggtgacagaaagctgagtaagcgaatttcagcttgggtggcatgcagccattttaatgcctggcagattcagcaccattttaaacaattcccgaaggtgatttacaatggtgttgatattaataaattcaggccgatagactcttctgtcagaactcgtcttgggatcagtgataaaacatttttgctgacctttgccggccggttggttggctggaaaggcatgcatgtggctattgatgcaatggctcagctacaggataaagatgttaaattgctgattatcgggtcaggtgaagatctgaaacacttagaaaagcgggttgcggtattacggctgaaaaaacagataatttttcatccaccggtaggacatgatcagttgcctgaatattatgctgctggtgatgccgggattttcccaagtattggtgatgaagcatttgggatcacaattgcggaagcgatggcgtgtggccgaccggtaattgcgagttatattggaggcatacctgaagttgtcggcaacgaaaataattcgggtattttagtcacgccaggcgatgcttcagcaattgccgatgcggttaattttttattgtctcaaccggacagggggcaaaaaatgggaaaagcagctcgtcaacggattgaaacaatgtatacctgggagcattcggcaaatcgtttactgaaagcgataaataatgaagattgcctatattga

SEQ ID NO: 8936 - DNA, 1176 bp, Photorhabdus luminescens
atgaagattgcctatattgatccctatccggttcctgattatcgggtagcatcattgcaaattttgcagaatgttgatgcgtttgctcgccagggagcctgcgtatatctggttacaccggaaggtaaaaataccgcagaagaggtactggggcgttcattgtcaccatcagcgagactgatatctttacgcaatattcggcgtaaatggtattttccgtttaatacccaaaaaatgttctatttccaggtttcccattggttgaagagaaatgaggtcgatgccgtttttacccgcaatctgaaaatggcaaagtatttattatgtgaacatccagaaattccgctattttttgaaagtcatgagatttttgcccagtcatttaaagaatcgcatgatttaagtaaaaataaaaatcagcgtaaatatcagaagctgagagaaattgaacactttgtttatcgtcggtccaggattactttcgttctgacgtcgttactccgtgatgatattattagtgaatataatgtcagcacgccaatagttgttgcgccagatggcgtggatatgttggcagtcgagtcgatgtcgttagataaacgtgtatcagacgatggtgaattaccaacccagatcctttatttgggcagtttgcatcgttggaaaggtgttccgacggcgatcaaagcgatggcttaccttgaaaatgcagtattgaatattgctggtggtgaaccagggcaaattcagcaattgcggcagattgctcagcaaatgggggttggcgataaaatcaattttcttggttttattcaacctaaattacgttttcagataattgcagataatgatatttgtttgttgccattaacgaaaaccagcatcggcagtcgctatacttcgccactgaaattatttgaatatatggcgatggataagccggtggttatctctgattttctttctattcgtgacgtggctgatgaaaatgcggtcagttttgctgacagtgagaatgcagaaagttttgctcaacagattcagttactgagggataatccagaaaaagttaaatcacaagtcagttatgcaaaaatgttggtgacagaacgttttaattgggaacagcgagcgaagctgattatgcagacaatatcaaaggatatttctgcataa

SEQ ID NO: 8937 - DNA, 1227 bp, Photorhabdus luminescens
ttgatgaatatgtttaacattaaaagtcgtgataaaagatcattatggaatttatccatcattgggatttatatagcccttgtttatctgcctgatataacgagatataaaaatctggttatcgtgcttattggcattacagcactaacctatctagtgacagattttcgccaagtgatgcactccatgcgtaattcactttttctgtccattatgttattcatcgtagcaatgttctattcagtagcgatttccgtcgatcccgcattgagttttcaagagatgaataagcccatcttaaatgggctattattgttcagttttacttttcctgtggtactgtacaaagaaaataaagaaagtattgccaagatgattctgtactcatttgccattggtatgctggcaatatgcctaactgatgttggtaaatacattattaactacaataaaggtgaaatgccttttaccaacttcaaccatcgagaattttcttacggttttattttctattttccgatcttactttgtacttgggcattgtggaagaaacataccttagtgagttggctgatactggctgctgcttccgctatcagtctgtttttgttattaggtaccttagctcgtggcgcttgggtcgccattgccgtcatcacggcttttatcatcatcattaatcgggaatggaagctgaccataatagtgggtttaatccttagtttttcagttgtgctttctcacactacaataatcgctaatgaaaatactaagttattattttggaaactgactcaaactgatagcagccatcgttataaaaatggcacacaaggaactgcttttgagttgattctagagaaccccattaaaggctacggttatggcaataaagtctatcataaagtctacaacgaacgagttgctgactatccagactggatatatcgcacatccatcggcccccacaatatcttgctggcactctggtttgccggtggaatcattggtttgattaccactttgctgatgaccttctcagcgctgtatacaagtagctacattattagccgtaacaatggcgtaataaagcaggccagtattattctattgacgggattcatcggattatttatcgttcgaggagcctttgaaaatacctatatcaatgaaataggtattctattcggcctgatgattgcgctatatcagcagaaaaacgattaa

SEQ ID NO: 8938 - DNA, 810 bp, Photorhabdus luminescens
atgccagaactaccagaagtagaaaccagccggaggggaatagagccacatctggtagggaatgtgatccagtatgcggtagtcaggaatggtcggttacgttggccggtggcggaagaaattatgaagttgagtgaccagcttgtgcttagcattcaacgccgggccaaatatttgctgattgaattggcaaatggttggattattgtccatttggggatgtcgggcagcttgcgtattttgccagaagagcgccccgcggagaaacacgatcatgtggatttagtgatggcagatggtaaggttttgcgttataccgatcccagacgatttggtgcatggttgtggagtgatgatctcgaacggtgctcggtattggctcatttagggcctgagccactttctgatgattttaatggtttttatctctacacccgatcaagtaataaaaaaaccttgattaaaccttggctcatggataacaaactggttgttggcgttggtaatatctatgcgaatgaagcgttgtttactgcccatattcagccggatcgtcccgcgcagactttaactgagcgtgaagctcatttactggcggaaacgattaagaaggttctacaacgctctattgagcggggtggtacgacactcagagattttctgcaatctgatggtaaaccgggctattttgctcaggaattgtttgtctatggcagagcaggagagccatgtcgaatttgtggtgaacaaatagagagtattaagcttggacagcgcagtactttcttttgccgtcactgtcaatattag

SEQ ID NO: 8939 - DNA, 486 bp, Photorhabdus luminescens
ttgatgaaaaccaaagccatttatcccggaacatttgatcctgttacctacggtcatatcgatatcgtcacccgcgccgcagatatgtttgaccatgttctatttgcgatcgccaacagtgccagaaagaatcctatgtttactctggatgaacgcattaccctggcaaaagaggtaacttcacatctggataatgtggaggtgataggtttctgtgaattaatggctaattttgcaaaaaaacaacaagcaaatattcttatccgtggtcttcgttcagtatctgattttgagtatgaatggcagcttgccaatatgaaccgccactttatgcccgaattagagagcgtttttctgctgccatcacaaaatctctcgtttttatcttcatccttgattaaagatgtcgctctccacgatggcgatatctcatcattcttgccagaacctatcgcccaagccatgctaaaaaaactgggcaagtaa

SEQ ID NO: 8940 - DNA, 774 bp, Photorhabdus luminescens
atgagtgacaaaaaacgtctttctgttgtcatgatcgctaagaattcagcggatctgatagcagattgtctgacctcagtccgttgggctgatgaaatcatcgtgctcgattcgggtagctcagacgatacctgccagatagcacgggcaatgggcgcaaaagtattctccaatactcactggccgggatttggtcgtcagcgtcagctagctcagcaatacgcttctggcgattatatttttatgatcgatactgatgaacgcgtaacatcagaactcagagcatccatagaacagactctggcacatattgataacaataaagtctacagttgtgcccgccggaacttgttccttggccgctttatgaaacacagcggctggtacccagatagggtcattcgtctctacgcccgtgatcgttatcaatacaatgataatcaagtgcatgaatcccttgaaactcatggcgctccagtcgttattttgcaaggggatttacttcatcttacttgccgtgatttgatggaatttcagagaaaacagctaaattatgctaaagcctgggcagaacagcgcgatgaacaaggtaaacagtgcagttatttctcaattttcagtcacacttttggggctttctttaaaacctggctgttgcgagctggctttcttgatggtaaacaagggttagtgttggctattgtcaatgctcaatatacgtttaataagtacgttgcattgtgggaaaagagacaacaaaagggcaaaaattga

SEQ ID NO: 8941 - DNA, 1278 bp, Photorhabdus luminescens
atgttactgcgtttatatcaggtacttctctaccttatccagcctctgatttggttgcgtttattgctccgcagccgccaagcccctgcttaccgtcagcgctggggtgaacgctacggtttctgtgccggtaaagttgcctctggaggcatcctgctccattccgtttccgttggtgaaacgttggccgccatccctttagtcagagccttgcgccatcactatccttttttaccgattaccgtgaccacgatgacgccaaccggctcagaaagagtgctttccgctctgggaaatgatgttaatcacgtctatttgccatacgatctccccggttctatggagcgctttctcaatcaagttaatccaaagttagtcattattatggaaacagaactttggcctaatctgattttccaacttcaccaacgtaacattcctctggtcattgctaatgcccgtttgtctgcccgttccgctgagggatatcaaaaagtagggagtttcgtaaaaacaattttgcgcagcattaccttaattgccgcccagaatccggaagatggtgaacgttttattgagctgggtctaaaacgctctcaactgactatcacgggtagtttgaaattcgatatctcagtaacaccggaattggcagccaaggcagtgacattacggcgccaatgggcggctcaccgtcctgtctggatagccaccagcacccatgatggagaagagagtattattcttgatgctcattgcaagttactgaaacaatgcccaagcctgctgctgatcctggtaccacgccaccctgaacgttttattaaagctgaagaattaacaaagaaagccggactcagctatattcttcgcagttctgataaaatccctgacgccaatattcaggtcgttatcggcgatacgatgggggaactgatgctgctctatggtattgccgatctggcttttgttggtggcagtctggttgaacgtggcggccacaacccgctagaagcggcagcccatgctattccggtgctgatgggccctcatacctttaactttaaggatatctgcaccaagctgaatcaggctaatggtctgattaccgtgatggacagccactctttattcaccgagatcaacagtttactgactgacgaagattatcgtctgtattatggtcgccacgcagcagaagtactgcatgaaaatcagggggctcttcaacgtctacttaaactgctggaaccctatctcccacctcggagccactga

SEQ ID NO: 8942 - DNA, 1065 bp, Photorhabdus luminescens
atgagtaaattacaagctcaatttgaccgtattctgataataaagttacgacatcatggtgatgtattattaattacaccggttattaatacccttaaggataattatccggcggtggaaattgatgttttactctacaaagaaaccgaaccaatattggctgattttcctgctgtggctaatctattttctatagatagacaatggaagaaacagggagttaaaacacatcttggtcatgaatggagattgcttaaacgattaaggcatcgtcaatacgacctagttattaatcttactgatcaatggtatagtgcatttgtgacacgatttactggcgcaaaagtgcgtattgggtttgatttagcaaaacgacgcagcctattttggaaaaaatgtttcacaaattttgtgccgacagagcatagtcagtttttgcatattgttgagcagaatttgtcagctctttcgctgttaaatcttccgttaatcaacactacagtgacgatgagttaccgccagcaggataaagaggctgttttgatgcttcttgataagcatggtgtagatcaaaaatatattgttgtgcaaccgacatcccgctggttttttaaatgttgggatgaaaaaaagatgagcaaaacgattaatgcattacagtctgatggttggacaattgttgttacctccgggccagatcgtaaggaggaagagatggtggcgaagattttatcaaattgcctaaaagagagagtgatttcttttgccggccaattaactttgcctcaacttgcagcgctgattgatggggccaatttattcatcgggatggattctgttgctatgcatatggccgctgcgttaaaaacaccgggtatcgctttatttgggccatcaaaattagtattctggcgtccgtgggaagcgaaaggtgaagttatttgggctggtgattatggtgatttacctgatcctgatgatgttgatactaaaacggatatacgttatctgaatgtcattcccagtgagatggttattgccgccgcccggagaaatttattatga

SEQ ID NO: 8943 - DNA, 1131 bp, Photorhabdus luminescens
atgaaattagtacgtcttgcgattgtccggcagaaatatcgcccggatggtggtgcagaacgttttgtctcccgcgccttagaggctttagggaatgaaaatttggagcttaacgttatcacgcgttcctggcagggagacgttaatcctgattggcatgttcatttaacaaatcctcataaatgggggcgcatcagccgtgaaagaggatttgccaaagctgccaaaacaatatggcaacaagagcaatttgatcttgttcaaagtcatgaacgtattgccggttgtgatatttatcgtgcgggtgacggcgttcatcagcgctggttacagcagcgtgcgcgtgttttatctccttggcggagtaaattactttttacgagtcgttaccatcgttatgtgatggatgctgagcaaaagatgtattcggcaccggaattaaaaatggttatttgtaactcggaaatggtaaaaagggaggtcatgacggattttgggctttctgaggaaaaaatatcggttatttataattcgatagacaataaacaatttttcccggcaacggaatctcagagaacacaattaaggaaagcgcataaccttcccttgcaagctaaatgtttagtttatgttggttcggggtttgagcgaaagggattaaaagccgcaattcaggcggtgagtgcgactgatgcttatttaatagttgtggggcaggataaagaagagaagaaatataagcagttagctaattcactgggatgtaatgagcgcatcaggtttatgggagtccagaaaaggacattgcctttttatcagcttgcagatggcttgttgctaccgaccttatatgatccgtttccaaatgtgatactggaggcaatggcctgcgggcttccggtaataaccagcatgacatgtggaggcgctgaatttattacctctgggaataacgggtttgtatgtgatgctttggctgtttcagatattacggaagctattcagaatacgccttcggatcatttgaataataaaatgtcagaattagcgagaacaggaatactcggttatacaccggaacatttatcacaacagctcattggattatacgaaagggtgctctcatcatga

SEQ ID NO: 8944 - DNA, 1104 bp, Photorhabdus luminescens
atgaagggacatgtattatttatcattgatggattacctggagggggggcggaaaatgtcactatccggctttgtgatggtctgcaacagagaggatatgatgttacgctgctctctttggcagagaaatgtgaatattcaataccgagtggtattgaactgatcattgatgttgatggatacagaggaccttttagaagacagactgagatttgccgtagggctaaatctatggataaggttttagaaaaagtttttcttcgcaagggaattcctaccttgattgtctcaaacttgcataaaactgatcgcatcgtcgtgcaatcaaaagtgttagcggggttaaatgtatggttttgtattcatggcgtattttcaaactcatatcttggtaataagacgggattatcccgctggatcaagaaacaaaaaatcaaatggacatataataatcggaatttaatttgtgtatctgatgctgtagggaaagatttaaagaataatttgttacttacgcctaatgaaatggtgacgatttataatcctttcaacatcccagatattaaagaaaaatcgctgcaaaataacccttattcggatgagacttatttattgcatataggtagattccaccgggttaagcggcatgatcgtttattagaagcatttgcgaaagcagatattccgtgtaagttattgattgttggccatggagatgaagctatcactcaacaaataaaacagaagattgtggatttaaacttacagtctaaagttgttttaacgggattccttgaaaatccattaccggttatccgtggagctaaagcggttgttttgagttctgacagtgaaggattagggaatgtgttaattgaatcgttgatttgtgatactcccattgttagcacgatgtgtcccggcggtgttaatgaaattatggttggtgagctagaaaaatataaatcagagctaacaactgattcactggcagaaaaaatgaagtttatctaccatgaaccgccggtgattacagaggatatgtataagaagtttgatttagatattattttggcaaaatatctatccttaatgaagcggtaa

SEQ ID NO: 8945 - DNA, 960 bp, Photorhabdus luminescens
atgactcgacctgcatttattatcactattgatactgagggtgatgacctgtggcaaaatcacggtcagatctcgacaaaaaatactcattatttaccgagatttcagcatttatgtgaacgttttggttttaagccagtttggttgacgaactatgaaatggcaatggatgatttatacattgaatttgctaaagatgttattgccagaggacagggggaaattggtatgcatttacatgcctggaataacccaccacttgttcctcttaccgacgatgacatgcgttataaaccttatctgattgaatttccaaaagaacaaattagagccaaaattgatctgatgactaagttattggaagacaaactacagattaaaatgttaagccatcgggcaggtcgttgggcatttaatgaatattatgctgaattgctggtggaatatggttatcaagtcgattgttcagtaacaccacgggttaattggcgttttaccaaaggcgatcctaatggcaacggtggaactgattatcgtcactttccatcttatgcctattttatggatttgcagaatattgctaaagaaggtgactctcctttgctggaagttccgatgagtattcaatataaacaccctccattgatgaatttccttaaacaaaaatatgatagtttacgtgggaaaccgcgttctccatctgttaactggttaagaccaaaagggggcaatttggaacaaatgaaaaaagttgtccaacagacattagcagaaggcagtgattatattgaatttatgctgcattcatctgaatttatgcctggtggtagtccgacatttaaaaatgaacaacagattgaattactttatcaggatcttgaagcattatttaactatttacagccacaggttcgaggaatgacattggctgaatattatcaatggaagcgattatcatag

SEQ ID NO: 8946 - DNA, 966 bp, Photorhabdus luminescens
atgcgggttttattggtcaaaacttcttctatgggcgatgtcctccactcgctccctgcactgactgatgcagaaagaaacttacctgatgtccgttttgattgggtagtagaggaaggttttgctcaaatccccggttggcacaatgcggttgatcaaattattcctgttgctattcgccgctggcgtaaaaactggtttagcccagaaattcgtgcagaacgtcgtttattcaaagaaaaattaaaattacatcaatatgatgccatcatcgatgctcaagggttattaaaaagcgcatttctggtaacccgactcgcttatggtcctaaacatggttacgaccgcaaaagtatccgtgagccattagcgagttttttttatgattgccgtcatacggtcagcaagcaacagcacgctgtagagcgcatccgagaactgtttgctgtcagcttgggttataccaaactggcagcacagggtgattatgggattgcccgtcactttttaaagcagaaactagaaaatcagggtgattatctggtttttctccatgccaccacgcgcgatgaaaaacattggccggaaagccattggcgacaacttattgctgaaattcagccaacaggtatgaaaattaagctcccttggggcgcagaacatgaataccaacgtgcgctgagattagcggaaaatttccctcatgtggaagtattaccaaagctgactttggcacaagtcgcccaagagctggccggagcaaaagccgttgtttctgttgatactggcttgagccatctcactgccgcactggatcgccctaatatcacgttgtttggtccgacagatccaggactcattggtggctatggcaaagaacaaatatcgttaaaagcggcggatgggaatatcaaaagtattacaccatcgaaagtattagctcatcttcaagaaaatattggctga

SEQ ID NO: 8947 - DNA, 1050 bp, Photorhabdus luminescens
atgaaaatattggtgatcggcccttcgtgggtgggtgacatgatgatgtcgcagagcctttaccggacattaaaggctttgcatcctaatgcagaaattgatgtgatggcccccgcctggtgccgcccactgctggataaaatgccggaggtcaatcaagcattagctatgccattaggacatggcgcactggcattgggcgaacgccgccgtttgggggtcgccctgcgtgaacgtaaatatcatcgcgcttatgtgctaccaaattcttttaaatctgccttggtgcctttcttcgccaatattcctctgcgcactggctggcgcggtgaaatgagatatggattgcttaatgatattcgtacattgaataaagaagccttcccattaatggttcaacgctatgccgcattggcttacgatgcaaaacccagtagtgcggcagatctgcctcaaccattactttggcctcaactggatgtcagtgatgaagatattgctgaatccaccgcagcattcaatatttctgatcatcggcctatcatcggtttctgccccggcgcagaatttggcccggcaaaacgctggccgcattatcactatgccgcattagctcagcagcttattactcaaaagggatatcaaattctgctatttggctctgccaaagatcacgaaggtggagaggatatccgcaactcactgacgggagaagctcgtgaacactgtatcaatcttgccggacaaacttctcttgaacaggcagtcaatattatcgcggcctgtgatgctattgtgaccaacgattccggtttgatgcatgttgccgcagcacttaatcgccctctggttgcactttacggcccaagtagcccagattttactccaccattatccgataaagcggaagttatccgtcttattactggttatcacaaagtcagaaaaggtgacagttcacatggctatcatcagagcctgatcgatattcaaccagaacaagttatcacttctctagaaaaattattacaagcggagaaccagagttaa

SEQ ID NO: 8948 - DNA, 939 bp, Photorhabdus luminescens
atgattattgtcactggcggtgctggatttattggtagcaatattgtcaaagcactaaatgacgaaggatataaagatattctggtcgtagataatctaaaagatggtactaagttcatcaatctggctgacttggatattgctgattacatggacaaggaagagtttattgccagtattctggccggtgatgacttcggtgatattgacgctattttccatgaaggcgcttgttcatccacaaccgagtgggatggcaaatatatgatggataataactatcaatattccaaagaattgctgcactattgccttgaacgccgcactcctttcctgtacgcctcctcagcagcaacctatggcggccgcacggataattttatcgaagagcgtcaatatgagaagccactcaatgtttatggttactctaagtttctgttcgaccaatatgtccgggaaatcttgcctcaagctgattcacaaatttgtggtttccgttatttcaatgtgtatggaccacgtgaagggcacaaagggagtatggctagcgttgcctttcatttgaataatcaaatcaatcagagacaaaaccccaaattattcgccggcagtgaaggctttcaacgtgattttatctatgttggtgatgccgctgcggttaatctttggttctggaaaaatggcgtttccggtatttataactgtggaacgggtcgtgctgaatctttccaagcggttgcagatgcagttgttgaatgccataaagataaatcactcactgttgaacatattgatttccctgaacatctgaaaggtcgttatcagcgcttcacgcaagcagatctgaccaaacttcgcgcggcgggttatgataagccattcaaaaccgttgccgaaggggtaacggaatatatgcattggctcaatcaggataagtaa

SEQ ID NO: 8949 - DNA, 1197 bp, Photorhabdus luminescens
atgtcagcgtcattttatcagcaaattaatgaacaattagaacaagcccattctgaaggattgttcaaaaatgaacgtatcatcacctctgcacaaaatgctgacattgctgtagccgatggcagccacgttattaacttctgcgcaaataactacttaggtttggctaatcaccctgagcttattgccgcggctaaagcaggaatggatagccacggttttggtatggcatctgttcgttttatttgtggaactcaggatactcataaagcgctggagagaaaactggcagaatttttgggtatggaagatgctattctttattcttcttgttttgatgctaatggtggtttatttgaaacgctatttgggccggaagatgccattatctctgatgcgttgaatcatgcttctattattgatggtgtccgtttatgcaaagcgaagcgttatcgctatgctaataatgatatgcaggaactgagagcacaattagagaaagcgaaagcagataatgcacgccatattgtgattgcaaccgatggtgtgttctcgatggatggtgtgattgctgatttgaagtctatctgtgatctggctgatgaatttgatgcaatggtcatggtggatgactcccatgctgttggttttgttggtgctcatggccgtggtactcacgaatattgtgacgtcatggatcgcattgacatcattaccggcacattaggtaaagcgttgggtggtgcttccggtggctataccgcggcacgtaaagaagttgttgagtggctgcgccagcgctcacgcccatatctgttctctaactcactggctccggcgattgtcgcggcatccattaaggtgttggatatgctgaaagagggagatgcattgcgtgatcgtctgtggaagaacgctaacctgttccgtgaaaaaatgacagccgcaggtttcactttggcgggggctgaccatgcgattattccggtcatgttaggtgatgcgaaattggcacaggagtttgccgcagaattactgaaagaaggcatttatgttactggtttcttctatccggtagtccctaaaaatcaggcccgtatccgcacgcaaatgtcagcagcgcatacggaagagcaaattgaacgtgcagttgcagcgttcacgcgaattggtaagcaattaaatgtaattgcataa

SEQ ID NO: 8950 - DNA, 1026 bp, Photorhabdus luminescens
atgaaagcattgtcaaagttaaaagcagaagaaggcatctggatgatcgatgtgcccgagccagagctggggcacaatgatgtgatgatcaaaatccgtaaaacagcgatttgtggtacggatgtgcacatctataactgggatgattggtcacaaaaaaccattcctgtaccgatggttgtcggtcatgaatatgttggtgaagttgttgccattggtcaggaagtaaaaggttttaaaattggtgatcgggtgtctggcgaagggcatattacttgtggttactgccgtaactgtcgtggtggccgtactcacttatgccgtaataccattggcgtaggggtaaaccgcgctggttgttttgcacaatatctggttattcctgcatttaatgcgttcaaaattccagataacatctctgatgaactggctgctatttttgacccatttggcaatgctgttcataccgcgctttcgtttgatctggttggtgaagatgtgctggtttctggtgctggcccaattggtattatggcggcggcagtatgtaaacatgttggcgcgcgtcatgttgtcatcaccgacgttaacgaatatcgccttgagttggcacgtaaaatgggtgtcacccgtgcggtgaacgttagtcaggaaaatctgaccgatgtcatggcggaattgggcatgacggaaggttttgatgttggtttggaaatgtctggtgccccggcggcgtttcgtaccttattaaataccatgaatcacggcggccgtgttgcattgttgggcattcctccatcagatatggcaattgattggaatcaggtgatttttaagggattgtttatcaaaggtatttatggccgtgagatgtttgaaacctggtacaaaatggctacattaatccagtctggtttggatctgacacccattatcacccaccggttctctatcgatgatttccagaaaggctttgacatcatgcgttcagggcagtctggtaaagttattctgaactgggattaa

SEQ ID NO: 8951 - DNA, 1062 bp, Photorhabdus luminescens
ttgagagagcattttatgaaaataacaggcatagccggattacttccttcccgattcgtctctaatcaagaggttattgatttagttgaatattattcaaaagaaattttccatggtgatttgcccaagacattgaagctaatcggaaaaatgcttaataaagcaggtataaattcccggtattggttggcagataacgagaaacctatggaactcattgaggccgcatttaatcatgccttagcacaagccaatatcattaaggaagatatcgatttactgatctattccagtgttgcccgcggcttcatagaaccagctaacagtacttttgtctcaaaggcactagggctaacttgtaggaactacgatgttgtagacgcctgtaacggttgggtggcagctatggatattatcaatagcaaaatgaaagctggtgaaatacgccatgccgctattgttaatatggagtttattatgtcccaaaatggaccaatttttccaaagactttttccctaaactccttgtcagaagtagcttataaattcataggttgcacagtcggagaggcagcaaccgtcactattattagtaatgaatcgcctgaaaacttcaaatttaattatatcaatcgcccagacttaagcgacttatcaacaatttcactgccagactggaggctattctgcaatgatacagacgttgaacgtattgggcctacaggcgggaaatatcaagtgaactcccactcggcactactgcacgatcatggagagaaagagactattaatctatttaatcatcacaaaatatctgacgatatcgaacatatttttattcatacaggttcaccaaaaacgtgggcacgccttggtcagaagatgggtattgacgacaagatacatcatgttggccaacgggtaggtaatattgctacagcatctatcccgttcggaatattcgatgccattaatcaaggtatattggaaaaaaatcaactttgtatgggatgggctggtagtggtggaatggtctttgccgcaatgacgtttaaattttaa

SEQ ID NO: 8952 - DNA, 105 bp, Photorhabdus luminescens
ttgacagttatcggcgatactctggttgataatcccattgtgaacacggtgagccaatatatccagaaactgaccggcgataaacctcaggataaaacagaatag

SEQ ID NO: 8953 - DNA, 429 bp, Photorhabdus luminescens; identical to SEQ ID NO: 7532

SEQ ID NO: 8954 - DNA, 816 bp, Photorhabdus luminescens
ttgggagataatcaggtgagacaacgcaaactcgcaaaactcattggtactaccgccctgttacttttgagcctacaaaccggtgctgcccgtttggctattgttatcgatgattttggctaccgtcctcataatgaaaacaaaatattgcagatgcctgttgcaatctctatcgccattctgccggattcaccgcatggcagggagatggctgaaaaagcctataaacaagggcgggagatcttaatccacctgccaatggcacctttaagtaagcaactgctagaaccggatactctccagccaaccatgagcagtgaagatattgaccgcatcatccagcgtgcaatacaaaaagttccttatgctgtaggaatcaataaccatatgggcagcgctatgacttcgagcttgccgggaatgcagaaagtgatgcgttcactgtctggttataacctctattttctcgacagcgtgacgattggcaatactcaagcaacaaaggcagcacaaggcacacctgttcgcgttatccgccgtaatgttttcctagatgatgtgcaatcagaagcggaaactcgtcatcagttaaaccgtgcgatttccattgcccgtaagaatggttccgctattgctatcggtcatcctcattcaacaaccattcgtgcattacaacagatgctgccaacgcttcccgctgatattgagttagtcagcccaagtaggttgttaagtggcaaacctgttggtgataacccacataaatggggcaagctgtgtgaactcaacaaccaccgactaaagtcggtgggttag

SEQ ID NO: 8955 - DNA, 1308 bp, Photorhabdus luminescens
atggctgacgacaaggaaatgcatagccgtaattatcggcgcaatcagaactcacggcggaatgatatctttgccttattgttctatgttttcctattggttatttttagctttaatacctttgcgaatcaaattatcgacaataaaaatcagttgaaagatctccaacaaaacatcgcggagaaagagaagagcgtgcaacaacaacagcaaaaacgtagttctttgctaaatcaactgaaagatcaggaaaataccatttccaaaattgggcaatctctacacaacgcccaaactcaactcagtaagctgaataaagagattacctttctagtctccaacattaaaaaactggaaaaacaacaaaaagcgcaacgagatatgctggcacgccaattagatgcagcatttcgtcaagggcaatatcaagggctcgaactcatgttcagaggagaggagggtaagagaggagaacgtatactcgcttactatagctaccttaatcaagcccgccaggacaccattgttaaacttgaacaaacagcggttgatttaactgaacagaaaaagcttgagcagcagaaacaggaagagcagaaacaagtgctgactgaacagcagcagcagaaacagcagatggaagtggcccgcaacgctcggcaaaaaacgttgtctgaactggaatcttccttaaagaaagatcagaaaaatctcgctgaactaaaacaaaatgaaacccgtctgcgagataaaattgccaaggcagaacgggaagcgaaagcacgtgctgaacgagaagccagagaagcagcccgcgtccgtgcccagattgccgcaaaacagaagcaagcacagcaaaaaggttcaagctacaagccaactgaggatgagcgcgcattgatggcgcgtaccggtggccttggccgtccggctggtcaggcaatctggccggtccacggtaaggtgatacatcagtttggtgaagcgctgcaaggcgaattacgctggaaaggcatggtgatttcagccacagaaggtacggaagtcaaagcgatatctgatggtcgggttttactggctgactggttgcaaggctatgggctggttgtcgttatcgagcacggtaaaggtgatatgagtctctatggctataatcagagtgctctggtcagtgtcggccagcaagttcgtgccggacaacctattgcattggtcggtaacagtggcggtcagcaacaacccgcactctattttgaaatccgccgtcagggaagagcagtaaacccacaaccgtggcttgggagataa

SEQ ID NO: 8956 - DNA, 438 bp, Photorhabdus luminescens
atgctgcaagaaatcatgcaatttattaaccagcatatgaccttaagcctcatttggattgcgctgctggttgctgttattgtgacgacaacgagaggtttcttctctaaaaccaaagagataactcgtgctcaagctattaatctgatcaataaagaagaagccatcgtcgtggatttacgttcccgtgaagatttccgcaaagggcatattattggtgcagtaaacctgactccctctgaaattaaagacaacaattttgctgagttggaaaaacataaaaagcagcctgtaattgttgtttctgcgaatggcactgaatctcgtactccggcagagaatcttcttcgtgctggttttgaacgcgtatgttccttgaaagaaggtttggttggttggacaggcgaaaatttgccattggcacgtggtaaaaagtaa

SEQ ID NO: 8957 - DNA, 477 bp, Photorhabdus luminescens
atgtcagaacaaagcaatacagaaatggctttccagatccaacgtatctacaccaaagatatctcttttgaagcaccgaacgcaccgcaagtgtttcagcaggaatggcagccggaagtaaaactggatctggataccgcttccagtgagttggctcaaggggtttatgaagttgttctgcgtgtgactgtgaccgcagctttgggagaagagacggcattcctgtgtgaagtacagcaagggggtattttctctattgacggtattgaaggaactcagttagctcactgcttgggggcatattgtccgaatatcctgttcccgtatgctcgtgagtgcatcactagcttggtcagccgtggtaccttcccacagctgaatctggctccagtaaactttgacgccctattcatgaactacctgcaacagcaggcagaacagtctcagggtggtgaacaaactgaacaggaagcttaa

SEQ ID NO: 8958 - DNA, 1023 bp, Photorhabdus luminescens
atgaatagtactgtttctatgacagtgattggtgccggctcatacggcacctcattagccattacgctggctcgtaatggtcataatgttgtactttgggggcataatccagagcatgttggggcattgcaacgggtgcgttgtaatcaaaaatttctgccggatgtttcctttcctgatagtttattgcttgaaacggacctaataaaagcactaacagcgagccgcgatattcttgttgtggtacctagccatgtgtttggtgaagtgttaaagcagataaaaccacatttacggcctgattcacgtatcgtatgggcaactaaaggcttggaagcggataccggtcggttattgcaggatgtggcccgtgagatattaggcaatgaaataccgctagcggtgctctctgggccaacatttgctaaagagttagcggctggtttgcctaccgcgattgctatttccgcgacggaatctgcttttggcgatggacttcaacaattattccactgtggcaaaagtttccgggtttataaaaatcctgattttattggtgttcaactcggtggtgccgtaaaaaacgtgatcgccattggcgcgggaatatctgatggcatgggatttggtgctaatgctcgtaccgcattgattactcgtggattggcggaaatgagtcgccttggtgcagcgcttggtgctgatccttctacctttatgggcatggcgggattgggcgatttggtcttaacttgtactgataaccaatcacgtaaccgtcgttttggcatgatgctggggcagggaatcagtgttgaagaagcgcagtatcagattgggcaggttgttgaaggttatcgcaataccaaagaagtacgtgcattggctaatcgcgccaatgtagaaatgccgattgcagaacaaatctaccagatactctattgcaataaaaatgtgatagaagctgctcaggcattattaggaagagccagaaaggatgagagcgataatgtgcgctcttaa

SEQ ID NO: 8959 - DNA, 822 bp, Photorhabdus luminescens
atgtcgctagaagaattggacgaagtttggaagaacataaaaacagaagcgagagcactggctgaatgtgaaccgatgttggccagtttttttcatgcaacattactcaagcatgaaaatcttggtagtgctttaagttatatgctggcgaataagctggctacgccgattatgccggctattgctgttagagagatcgtagaagaggcttatggctcggatcaaaaaatgattgtctctgctgcccgcgacatcatagcggtacgtctacgcgatcccgccgtagataaatactcaacacctctgctgtacctcaaagggtttcatgctctccaagcctatcgtattgcccattggatctggggagaagaccgtaaagcattggctatttatctgcaaaaccaaatctcgatgtcttttggcgttgatattcacccggcagcaaagattggttgtggcattatgcttgaccacgccactggcattgtgattggcgaaacggcggtagtggaaaatgacgtttctatcctgcaatccgtcacccttggtggtacgggtaaaaccgggggtgatcgtcatccgaaagtcagggaaggggtgatgattggtgcaggttcgaaaatattgggtaatattgaaattggtcgtggggctaaaattggcgcaggttcagttgtccttcgctctgttccaccgcacacaacagccgctggagtgcctgcccgtattgtcggtaaacctgaaagcgaaaagccatcattggatatgaaccagcattttaatggtatcaaccatggctttgagtatggggatgggatttaa

SEQ ID NO: 8960 - DNA, 720 bp, Photorhabdus luminescens
ttgatatatattggttacactatgaaagcaaaaaattcaaaagaatttctccatgatgtcatagaatgggatatatataattggagtcattcgttaaaatattggcaagatcattctggattagaattaaagtcagctaatattctagagctaggtagtcgaaatggtgggttatcattatgggcagcattgaatggagcaaatgtcttatgtactgatttagatggccctacgccaaaagcactggagaaacataagcgttataatatagaaaagagcattcagtatgataaattaaacgcatcggatattaaatataagaaccattttgatattgttatgtttaaatcagtattaggtgctgtcggttataatttcaataaaacagcacaaaaagaggctattaatcaaatcttttattcattaaaggaaggaggtgaactttggtttgcagaaaatctggttgcatcaccattgcataaattcctcaggaaaaattatgttaattggggaaatacttggggctatgttaccaccaaggaaatgacagagtatttatcagcattttcagatgttaattatacaacattaggcttccttgctacgcttggtaggaatgaatttcaaagaaaatttttaggggtgttagataataaagttctaaataaagtcattcctaagcattggcactatattataataggtgtagcaaaaaaataa

SEQ ID NO: 8961 - DNA, 231 bp, Photorhabdus luminescens
atggttcaatgtgttattgaccatatcacggtaattttttcttctttgcgtgggtcacagcaatgcagtttaggaaccgctctgcaccagacccacgatgagaatcagataaccattttgtcatgttctcggatgaagcatggtacggccacgatggttatcagctctgtactcccatatcgcattcgaccaaagatgggcaaaagcaacaggttttggcaatgtaagtga

SEQ ID NO: 8962 - DNA, 507 bp, Photorhabdus luminescens
ttgtttctggggggctttatgctaaacatcgtcttatttgaacctgaaatcccaccgaataccggtaatattattcgcctttgtgctaataccggatttcaattgcatctgattcagcccctaggttttacctgggatgacaaaaggctacgtcgagccgggctggattaccatgagtttgccaatattaagcaacatcatgattattttgcttttttagagaatgaaggattaacaggagcatcttctgctcgtttgtttgctctcacaacaaaaggaactccggcacatagtgctgtaagttatcaagcaggcgattatttgatgtttgggccggaaaccagagggttaccaccttatgtattggataatatgccaccacaacaaaaaattcgtatcccaatgctagcaaacagtcgcagtatgaatctttccaattcagtggctgttgttgtttttgaagcctggcggcaactagattatcagggcgctatcatcagagaatag

SEQ ID NO: 8963 - DNA, 699 bp, Photorhabdus luminescens
atgaaaacagagaactcaagagagctactcaatgatgtaatagagtgggatataggtaattggagtcatgcgttaaaatattggcaggaccattctaatctagaattaaagtcagctaatattctagaactaggaagccgaaatggtggattatcactgtgggcagcattaaatggaggtaatgttttatgtacggatctaaatggccctacttcaaaggctcaggagaaacataagcgctataatatagaaagcagtattcgatatggtaaattaagtgcattagacattaaatataagaaccattttgatatcgttatgtttaaatcagtattaggcggtatcggttataattcaaataaatctgcacaaaaaaaggcaattaatcagatttttcattcattaaaaaaagggggggagttttggtttgcagaaaatttggttgcatcgccattgcatcagtttctcagaaaaaattatgttaattggggaaatgcctggggctatgttaccgtcaatgaaatggtcgagtatctgtctgcattttcaaatattaattatacaactttaggtttccttgctacgtttggcaggaatgaatctcaaagaaaatttttaggaatgttagataataaagttctaaataaggtcgttcctaaacattggcactatattatcatcggtgtggcaaaaaagtaa

SEQ ID NO: 8964 - DNA, 252 bp, Photorhabdus luminescens
ttgaaggttttggtgttgagcagtcgaggattgttaaagcaatacggtaaatttgaacagggtattacaacccatgacaccatagtccatatggttagctgtatcagcaccaagctgtttcaaaagtatttcattaaatggatgaatatttgccgtgaactgatgaaaagctcagggagtgccacagatggaaaaaccgtcaggcgctcccaattcggcgcaacaattcagcggaattactatctcggataa

SEQ ID NO: 8965 - DNA, 1023 bp, Photorhabdus luminescens
atgccaatcctaatcaccggcggagccggctacatcggttcacacacagtattaacgcttctggaacgaggagctgatgttgttgttattgataacctttgcaattcatcaccagaatctcttcgtagagttgagaaacttactggtaaatcagtgaagttttatcaaggtgatatcctcaatttggatttattgcataaaattttccaggaaaataaaattgaaaccgttattcattttgccggattaaaagcagtcggcgaatccactagaaaaccacttgaatattatcagaacaatgttactggcaccctagttctgttgcaggctatgcgtgccaacagtgtacatcaactgattttcagttcatccgcaacggtttatggtgatcctgaatttgtaccacttactgaaaatgctaaagttggtggtacaactaacccttatggcacttctaaactgatggttgagcaaattctaaaagattttgccgctgccgagccaagtttcaaaatcaccagcctgagatatttcaatcctgttggtgcacactcatcaggtatgattggcgaagatcctaatggtattcccaataacctgttaccttatatcactcaggttgctattggtcgtctggaatgtttatcagtgtatggcaatgattatccaaccaaagacggcaccggtattcgtgactatattcatgtgatggatttggctgaaggccatattgctgcaattgactatctggataaacaacaatcctatgaagtttttaatttaggaacaggtgctggttattctgtactcgaactacttcatgcttttgaaaaggcgtcaggtaaagatattccatataaaattacagatagacgtcctggggatattgctgagtgttggtctgatccatccagagctcggaatatccttggttggcaagcaacacgcaatattgacgatatgatgcgtgatagttggaattggcaaaagaataaccctcatggttttcgctcagggaaataa

SEQ ID NO: 8966 - DNA, 1173 bp, Photorhabdus luminescens
gtgattgttattgctgggaaaaataacattgcagttcatgttctaaatttattaaaaattaaatataatataaaaaacttagcagttgtaattaataagacagactcaggcaataatacctggcaatattctcttaaaaaaagagcaaatgaaatcaatgtacctattatttcactagaagaagcagaaagaaatgcttctatcttcttatctctagaatttgatcaacttattaaaattggaagattcagaactaagaagatatttaatattcatttttctctactgccaaaatacaaagggatgtatacatccatatggccaatattgaataatgagatttctactggcgttagtttacattatatagacaatggaatagatacaggtgaaataattgaccaaacaactattaatatagatgaaaggtatacatcaaaggatatttatttaaactatatttctcattcctgcactttaattgaagattatatagaaaaaataataaaaaataataatatttttagcaaccctcaaaaatcaaagcattcatcttactattctaaaaatacaatttctttttcatcagaaagcattaatttacataaaacagcatgggaaataggtagatatataagagcattctcttttagagaatatcaattacctcactatcaaaatactaattactgcaattatgaaataacatcaatacgttcttctggtagaccaggagctctcattaaagataatgaaaatttttctgaattctcaactattgattataatataatactatataaggataagattgatttattatttgatttttgtaaaaaaaacaatctttctgaaataaagaaatatattaaaaacatatctggaattgatgaacgtaaccagcatacttggtcattgttgatggtagcctcttatcatggttatttaggcatagtaaaatatctgatagattctggcgctaatgttaatgctactaactataaaggaacttcagttctaatgtatgcaaaagaatatgctttaaaaaatggggatactagaataataaagctattgatagaaaaaggtgcaaatatattaacaaaagacatgcattataaatgtcttgttgaatacttgactgaagacgaaagattaaaagttggtatataa

SEQ ID NO: 8967 - DNA, 342 bp, Photorhabdus luminescens
ttgaaaagaaatcaagaaataaaagaatattgcccggagcaagcccatcttcaggggctttctcgccgtcattctaccaagaaatccacaaaaatgatcaaagaaataaaaaaatggataaagcggctaatcttgcaagatttcaattctgaacaggcggttgactatttcagaaagtataaagggacatccttatatcatgagaccatttatagattgacttataaagacaaaatggatggaggtgacttatggcagcatctcagaattaccattaaatcgtatcgtaaacgatacggccgttatgaaagaagaggaaaaattaaaaaaagtcagtattaa

SEQ ID NO: 8968 - DNA, 132 bp, Photorhabdus luminescens
ctgcgaacgctgtttatccacggggcaagagcagcctcactggtggcaaacaaattagcccgaacagtctgggcaatgacagctcatcacagcagatatgacaaaaattacgtcagtgtcaggccgtattag

SEQ ID NO: 8969 - DNA, 471 bp, Photorhabdus luminescens
atgtcagttcagcaacccgtaaaatccgttgccgtcaaaacagaagaacagcaatccatactgacgcttcatcggatgcgccagcaactggtgaagttcagaaccgcacagataaatgcactacacagcatgttgcctgaatttggcgaaactctccataagggcagagccgctctagctaaggaactcccagacactctggaacgtttgggaacatggttacctacgtacctgataagcctgcttgatgagcagtaccagcgtcttgctgatctggatgctcatattgacgatgatattgaaaaacaactgtcggctgtggcgaagcagaataaaacctgtcagcgattactggcaatccccgggattaaccccctcattgccaccgctgccgtcgctacgatggacgaagcgtcagcgtttaaatccggccgtgagttcgctgcttttatcggcctagtctcgaaataa

SEQ ID NO: 8970 - DNA, 180 bp, Photorhabdus luminescens
atggaatatactcctgtaggcatcgatattgcaaaacatcttatacaggcgcacttcattgatgagaacaccggtgaaattgttgacaagcaaattagacgggaggcattcctgatctatttcaggtcatcggaaaccctgtcttatcggctggaagcgtgcggaggtgctcagcactga

SEQ ID NO: 8971 - DNA, 552 bp, Photorhabdus luminescens
atgcaacacaataaaataaaagttgcttttttagatagagatggagttattaataaggaggtcaactatctgcataagattgaagattttgaatatacttctaaatgtatagttgggctaaaaaaaattcgtgatttaggatatgaaattatcatcattactaatcaggctggaattgctcgcggctattattctgagaaacaatatcaattattaactgattggtatagaaatgatttaaaagaaaaaggagttgatattttagatatattccattgtcctcattaccctgatggtattgtcccagagttatcaaaggattgttattgtagaaaaccttcacctggtatgatagagcaagctagaaaaaaatattccatcgatatcaaaagctctatattagtaggtgataaaaactctgatatacatgctggagaacgtgccggaattcctcgatgttttttagtaaaaactggacatccaacatctgagccgactgagaatgcaatcctttcaaacaatttgtttacgatatctaaattaattgagtaa

SEQ ID NO: 8972 - DNA, 678 bp, Photorhabdus luminescens
atgtttgaggcgataattttagccggtgggcaaggggctcgattaaaagccgtaactggtgatttacctaagcctatggtagatataaatggtaaacctttcctttatcgcttaatgaaaaggcttgaagagcaaggttgttcaaaaatagttctttctctctgctatcaagctgattacattattggatgcatacaaaaagaccaaccagtatcatgtgaagttgatttcgtcatagaagaaactcctttaggtactggaggagcaattaagcttgctagctcaaaaataaattcatccaaatttttagttttgaatggcgataccatgtcagaaattaattataattcaataattaatttttcgaatgatgcagatttagttataagtggtgtatatatagacgatgtttcacgttatggaactttgaaattagatgaatacaataatgttttagctatgctagaaaaaggactaactggtaaaggtattataaatagtggtatctatttaattaaaaaagatttaataagaaattttcctttagaaaaattttctttcgaaaatgatttcatcaaaaactttaacggtatttttaaggcatttgtgtctaatggttactttattgatataggaattccagaggattattataaagcatgcaacacaataaaataa

SEQ ID NO: 8973 - DNA, 591 bp, Photorhabdus luminescens
atggacaatttagattacattaatacttacctattaaattcgattaaagtaaaacaaaagttagctgatgatatagtaaccttaaaagccatttctgatgttgctaatctaatagttgatgcttacacaaaaaataataaagttttactcgcaggaaatggtggtagtgctgccgactctcagcatattgccgcagaatttgtgagtcgcttcttttatgatcgaccaggattacctgcaattgcaatgactaccgactcatccatgttaactgctatcggcaacgattatggatttgataaactgtttgcccgccaactacaggctcaaagcagactaggtgatatttttattggcattagtacttcgggcaactctctgaatataataaaagctattgaagttgcaaaagaagaaggtgttacttctgtagtcttatgtggctcaggcggaaaactaaaagatttggcagatatagcaatttgcgtacctgattctgtaacaccatatattcaagaatgccatatttgtattggtcatatgatttgcgccattgtagaagcaaaaatttttcctaaagagaaattataa

SEQ ID NO: 8974 - DNA, 1029 bp, Photorhabdus luminescens
gtgaaaattagaagtagagcgccgctaaggttaggtattgccgggggaggtacggatgtttcaccatatagtgatgagtttggcggctgtgtactgaatgccacaatcaacatgtatgcacatgcgtttatagatgatgatatcaaaggcaaccaagttatttttgaagcgaaagatcttggaataatagatatcattgagttagataatgacgtctctttagatggaaatttggtacttcatcgagctgtatataagcgcattatggaacaatataacaagggcaagtatatacctctaagactgactacacagtcggatgcacctccaggcagtggcttgggttcttcatccaccatggtagttgctatgcttgaaggattccgtcaactgctttccctaccactgggggaatatgatatcgctcaacttgcatacgaaatagaaagacgagactgtaaactatctggtggtaagcaagaccagtatgcagctacttttggtggctttaactttatagaattttatgcaaatgatcgcgttatcgtaaaccctctgagaatgcgtcgctatattattagtgagctagaatcttcattaattttgttttttactggcacttcaagagattctgcaaagataatcgacgaccagatcaaatctattaagaaagataacggagctcgattagatgcaatgcacaaagtgaaagaatctgcatacaaaattaaagaactactttttaaagcagatatccttggtgtagcgcaggagtttcgcaatgcgtgggagtcaaagaaagcgacatccccatcaatttctaatgctttaatcgatgctgttgaatcctcaattcttaatgcaggagccatctcaatgaagatctctggcgcgggcggtggtggatttatgatgatatttgttgagcccgaaaataaactcgatgtcattaaagcattggagcaatttgacggacatgtgcataaattccaatttactaatgaaggagcctactcatggacaatttag

SEQ ID NO: 8975 - DNA, 246 bp, Photorhabdus luminescens
atgaaagcgttaattacaggtattactggtcaggatggttcatacctgactaattttttattagaaaaagaacagagagaagggatgatttatggcaacatctcagaattaccagaaaaccctatcgcaaacgctatagtcgctatgaaagaagaggcaaaattaaagaccgggtcaatattgatgaacgccctgaattcgttgataaaaaataacatattagtgaccggaaagagaatacgataa

SEQ ID NO: 8976 - DNA, 1110 bp, Photorhabdus luminescens
atgaatgttatacatactgttgtaaatacatttactgcaaaaagatttattgagccattaattttatctgaaattgaatatggattaaaaagctcacttttagttgatccgttaaatggctcttccaaattcttggatgctttgcgctgtaaatatattaaatctaaattttgtttttccttaaatccattcctattgattgttaatttaattagattgatttgtttttttaagaaaaaccatacggatattatcatatgccatatgactaaaggtgcatttctaccattattagcatcttttatatttggaattaaaagacgtgtttattataatcatggtgtcccttacataggatattctggtttattaaaatatgcattaaaatccattgaaaaaataaactgtttttttgccacggatatcttgacagtaaataaagaactggttccctatttaagctgcctaacatataaaaatgtatcggtgattggttcaggttctatttctggactacctaatgaattttatgacaataaattatccttgtcatatatagatgaccttaaagagaaacatggcatagacaaaaatatgaaggtttttatttatgttggtcgccctcataaacgaaaaggatttaatcttctattaaaaagctttgaaaaaactttttcacacacaaatacaaagccccttctcttaatcgttggctgtacatctaaagatgtaaaaacagttttaggctatattcctgatagttttaaaatttatgattcggtgctagatatacacgaattatataaatgctctgactttgctgttttacctagctatcatgaaggtttaggatatgctttattagaaggtgccgcagcttcctgcatattgctaggtagcgatattattggattaaatgtattatgtagaaaggaaaattcaataaaattcacattacagattgatggtttatctacagcattactcaaggcttttctaatggatgaaaaagaaaaaatgaagatggcatctagttcttttaccatagcaaatgaattccgtcaaaaaagcgtaactcaaaactatatatcctatctatattcaaaataa

SEQ ID NO: 8977 - DNA, 849 bp, Photorhabdus luminescens
ttgagtgataatttttgtaataaaaaaattgtattgcccaggcataatgcccagtttatgtcaaaaaaagtaacgataaaattaggtggttttaccagtatgtctagattttttactatattaatgtgtgtgaatcgtgatgatggtttcctagatgaagcaattaatagtattctgaatcagacatatcacaactttgaatttattatcgtagctaataattgtactgataaactttggaatagtttgcaagactataatgatgatagaattaaatgttatagaacaaatataggacagctttcttttaatttaaattatggtttaaatatatctactggtgaatatatagttagaatggacgctgacgatatatcattatctgataggttagaaaatttaaatttacaaatagataaaaataataaaccggatgttataggaacttcagttttatttattgatgaaaactctaccgttttaaataaatacacaccaccaatgaaaaaatttatccaaacaattccatttaaaaatatttttgttcaccctacagtagcaattaaaagagctactttaattaaagaaaaaggatacttaggaggatttcaatctgaagattatgatctctggataagactattacggaataagaaatatcacctatgcaatgtggatattgtcacattgaaatatagaatatctgttaatcaatcaagaggctctagattaccatatgcagaaagtgcttcatattgtttacgggagtttcttttaagaccaaggcttatctggttactggggttcatgattagctcattgaaagtttttattctaccaaaaaagtga

SEQ ID NO: 8978 - DNA, 1002 bp, Photorhabdus luminescens
atgaaatttgtttttgaaaaacccaataatcaaagtaataccggaatattttttttaaaacgctcactttatcattactccgataatgtacagtataaaaagttttctttcattcattttttccgtcgaaaaatttcaaaaaaaaatgatacaaaatatatcttttttcctttagattataaatcttttttttctaaacgtattgatcttattattttccctgacgacccacttagggcgataaaaagcatatcaaaggttagatggagaaacaaaaattatctaaaatatttatatcaaatttttagatattattatatattttgtttgatttattctttaaaaaacaatttaattttaatagtttcagatgatgatgtaaaaagtcttaaaaagcgctttccaaaacataacatacaatactttcatcaccctatacaaaatcaattaatgaaagtcgagccatgtattttttcacacgccataaagaaagccgcttttctaaatttacaagatcactattgcaatgatccgaaacatttctttaaaggctttaataatgtgattctaacaaaagaactcaatgatattcagttttattttcatggttctggtcggaagccttggattaatactgcattaaattttttaaattcatccaactgttttaatgttgattatattgaagattttataacctttaataaaaatattgatattgtaattatgccattatctgccggtgctggagtgaaaaatattttattgaattctatttacttaaataaggttgtttttggtagtgaagaggctttttctggtataccatctaaattagctaataattttataatttcaagtgctaatgaattaatgaataagctacaatatcttaatgatattaagaaagactatttagaattgagaaattatgtacttgagcatcatgatatctcaatgtttaaatctgatttaaaccgtttttttaatgagtgtaattga

SEQ ID NO: 8979 - DNA, 1029 bp, Photorhabdus luminescens
atgaattctatctacgtaagtgattatattttaattaagcaagagactataccaaaagacttttttatcttatttatttttgtttatacattcctgttattagtaataaacacatacaaccgaatagcagcgtcatttcttttcttctgttttcttatatttttatctatatattttccattaaatggcccagacaaaggatcgtatcaagaaatttttggacatctgaaatctttttctgatgtttttcaatattttaatactgtcgactcccctgtttattatttctttaatattctcacacaaaaaatagggataaatacttatcttttttttgccattcaaaatattttaataacaatatctttagcatatatagcaataaaattaagaaacggaatctatatatctttatctttatttttcactcacttattggttccattttcaacaagaattcatttactcactttactatgtatttttattttcatttcttataaaaacatcacacgctatttcgcatcaattcttttatttggtattcatcctatgggttctattttacccttactagtttttaactccgaagatattagatttaaaatcaagctaaaaaatatcattatcttttttgtcattttttctacggcgttatggggatatgattttctttactttaaatttgaacaatatgtatacaacagttcagtgtatacaaatgaatcttcaggattaggtatttcgtttgtcattaatatatatttagcagtcgtttgctatctcacgctcggtaattacttaaaaggtatcgacaaaatagttatattattacctccatttctttctcttttaactgtttttagcccaatgtttaatcggtttttatttccgtctgatttaatgattgtactcttgtttcttaaatatcagaaagaacccaaactattatttctaataatttggatattattatcatcacttagattttataagaattttttaggtaatggagattatattttatga

SEQ ID NO: 8980 - DNA, 1281 bp, Photorhabdus luminescens
atgaagcattgtctattttatatgccgtcagatatttatggcgggaccgagttactatttactagattagctaataaactaactaataactacattgtcacgttgttagtcaaaaatagtgatttggtaaaattatttacattagatgaccgtattaatataactttaatatcggatattaatgactttaaatttgaccacgttgttattagcgcacaagatatgcgcggattttatgaatataatgtacgttttgataatatacttatttggcaattgcaaccagatgaattatgtgctccaatattaaaatatataaacaggttaagaatattaaatattaacatagggagtttatctacttttttaataaacatcttatactataaaagaaaaaaaaatctaatccagtttgctaataaactaatagagaattttagtttggtattcatggataaacctaattatgatacaacatgtcaatggctaaatttaaatttatgtgatatctattatttaccaataacttcagaaactagacgaaaacgaatcactgaacctaaagtaataaatactaaattagttatttctattatctcaagaatttcttttgattttaaatattatcctatttactgttttatcgaaaacttatttaaaacaaattacgagattgaattaaatattgttggggatggagcagcattaaataaattaaaaaataaagtaaagaaacttaaaaatgaaaaatctaatatagacattatttatcatggctttatgaaaaatgaggctgtatttaatgagatttaccccaaaacagatctagttgtaggaatgggaacctcaatattagactcttcatctataggaataccatcactaataatgaatctccactcctcctacataaaggcaagtaaaataaaatataattggagttatgaacaagaaggattttctgttggtgaatatataacaagttcaaactcgaaaaataatggatatgatttaaatgagataatagaaaaactgtataaaaataacactatcatagccaacaaaacatataactactacattcatcatcattcgagtaacgctacattatcccgctttttacttgccctagaaaataataaaaaaatagatgataatttatttaaaaatcatatgaaaaatattatttcatctaattattcatcagaaaaatttattgacgttttcttttctacgattaggttttttaaaaagcattatgaattctatctacgtaagtga

SEQ ID NO: 8981 - DNA, 1026 bp, Photorhabdus luminescens
  misc_feature (22)..(22): n is a, c, g, or t
atgaaaatatttgtggcatcanaacaaaaaatcaaacttgaacgccttcacgacaccactcgcgatggtcaggtacgagacagaataaaagctatccttctggcttctgaagggtggagttctatgatgatagcccaggcattgcgactccatcagaccactgttgaccgccatatcagtgattaccttaatcacggtaaacttaaatcgggtaatgggggctctgacagtttgctttcccgagaacaaactgattttttaatcaaccacttatctcaacatcttttccatcacacccatgaaatcgtggcctatgttgctcagctctggaagattacctttagcattcccggcatgaataaatggctacaccgtcaggggttttcttataaaaaaccttgtggtgtccctcataaattcgatgtagaaaaacagcaacaatttattgaatactatgaaaatcttaaagttgccgcgaaagatgaacccatccttttccttgacgctgttcacccgactcaaggcaccaaactcggttatggctggatgcggaaaggcgagaaaaaaacagtcaaaacaacaggaagccggactcgcctgaatatattgggcgcgctcaacctgaatgccattggtcgtaccgtgttccaggaatatcagaccatcaatgactacaacatttgctgttttttcaatgaaataagaaagtcttatcctgactaccatcaaaaaattcaccttattgtggatggagcgggttacaacaaagctcatcttgttaaggagtgggcttatgttagcaatattgagttacattaccttcctccctatagcccaaatttaaacccaatagagcgattatggaaggtcatgaatgaacaggttcgaaataaccgttatttcgcggataaacatgaatttcgagacaaagtcttcaaatttttcaccacaacgctaccggatatagcggactcgctgatgtctagaattaacgaccattttcaggtgctaaaaactgcatcttga

SEQ ID NO: 8982 - DNA, 1206 bp, Photorhabdus luminescens
ttgcgtatggcgatggggtttgttattgcaaaagttgtagctatttatactggacctacaggaatggcgatgttgggtcaagtacaaagtatggtcggcagcctaaatggtgtgattaacgctccggtgaatagtggtattgtacgctttactgcggagtaccacacaaaaggatttaaagcctgctctccatggtggaaagcctcactttactgggttattgttattaccgcttttacgatacccataggattgatattctcatcatatattgcaagctggcttttacatgactcttcactggcttgggtagttattgtaactgtatttgtgctacctttttcggcattaggcacgttatgcaattcagttattaatggtcagcaacactatcgccgttttgtcggtttagggatgctatcaactctgatttcttctgctgttatgattggtttaattattgctgcaaatattcaaggtgcattacttgcagctacaatacagtcagcgctaataggtatagtaatgctactagcaaatttacgtcaaccttggatgaaacttcgctattggtggggaaaacaagatactcaggcacgtaaagatatagctagttacatgctgatggctttaacaagtgctttgaccattcctatttccttgatattagtaaggaatattctaatatcccatgttggttggaatgtcaccggttactggcaagctgtatggaaaatttctgaagtatatttatcggtgattacattatctctaagcacatattacctacccaaattatcatcattaaatacatatgtcgaaattaggaaagaaataaaccataccgctaaatttatcatgcccattgttatgatattggcatttggagtctacttttttcgagatactgctataagaattttatttactccagagttcattgaagccagaaatttatttgctgttcaattatgtggtgatgttatcaaaattttatcttggttatatgcttaccctatgttatcccgtggttcaaccaagtggtttatttcaacagaaatcatcttttcagtatcacttgtattattaagctatttattcatacaacagtttggagttaaaggcgctaatattgcctatttagtaagttacttagcatatttcatatttatttatgtaaatctaaaaagaatcgcgaggttctga

SEQ ID NO: 8983 - DNA, 1128 bp, Photorhabdus luminescens
ctgataaagatgatcaattttcttgatttaaaagcaataaataaaaaatacgaaaacgaattaaaagaagctagttcaagagtaatagattcaggctggtacataatggggaaagagttagaatcttttgaaaaagaatttgcagagtattgtggcacaaaacattcgatcggtgtcgctaatggcttagatgctttaatactagtcctcagagcatggaaagaattaggtaaaataaaagatggtgatgaagttattgtacctgcaaatacttatatcgcatcagtattagcgattacagcaaataatttgaagcccgttctcattgagccagatcaaaatacatataacttaagccctaataatataatatccgcaatcacagaaaaaacaaaagttattttgcccatacatttgtatggtcaaatctcaccaatgcctgaaatcatgaagattgccaatgaatacaatctattagtactagaagatagcgcacaagcgcatggagctgaaatagtgggtaaaaaagccggtagctggggtaatgcatcaggatttagtttttatccaggaaaaaaccttggtgctttgggtgatgcaggtgcaattacaacaaacgatgaagaattaacaaccactataaaagcattacgtaattatggctcacatgaaaaatataaaaatatttatcaaggcattaacagtcgattagatgagcttcaagctgcatttctctctgtaaaattaaaatacctaaatatcgaaacagaatatcgacgtagcattgcaaagcattatttagagaatattaataatccatacataaaattacctatcaccattgaacaaaatgcactccatccagaaaaccatgtttggcatttgtttgtaattaattgttcacatagggaaaaactccaacaatatctttttgaaaaaggtatccaaacgttgattcattatcctatccctcctcataaacaaacagcgtattcagaatggaatacattaaatttccctattactgaaaaaattcatcagcaggtactttcactcccccttgaccctactatgaacattgaagcaatcgaatatgttatcgatatagttaatggtttcaagccatga

SEQ ID NO: 8984 - DNA, 873 bp, Photorhabdus luminescens
atgaaaggcatcatcttagccggtggttccggcaccagattataccctataacaataggtgtatctaaacagctcctcccggtatacgataagccaatgatctattatccattatcagtactgatgctagcagggataaaagacattcttattattacaacccctgaagatcaaataaacttcaaacgccttttgaacgacggaaatagcttaggaataaagattagttacgcaactcaggataaacctgaaggactggcccaagcattcattatcggtgaagatttcattggtgatgactcagtttgtttagttctaggagataatatcttttggggacaagctttctcaccaaaactacaaaaagcatcttcccaaaaaactggagctaccatctttggttatcaagtaaaagatcctgaacgttttggaattgttgaattcgatgaccagatgaaagcgatttctattgaagaaaaacctaaaaaacccaagtctgactatgctgtcacaggtctttacttctatgacaatcgggttattaatttcgctaagaaagtcactccatcagatcgtggtgaattagaaatcacatcaattaaccagatgtatcttaatgataattctttaaatgtagaactccttggccgcggttttgcatggctagatacaggcacccatgacagcttactagaagccgccacctttgttgaaactattgaaaagcgccaaggctttaaaattgcttgcttagaagagattgcatggcgtaacggctggctgaatgaaaatgatatagccaaagctgctaactctatgtcaaaaaacggatatggaaagtatttacaatctcttattcagaggaagatatga

SEQ ID NO: 8985 - DNA, 960 bp, Photorhabdus luminescens
atggctatattcatcaaccgtaaagtaacagccaatgcctacggactctcctctggtgtcttctgggggctaagtggcgtacttttcgcattattactaaaaaacaccgcactttcctgttgtttcttcattcccatcatactcgcattcctaaatgatacgatttcatgcggatatatgtttatatatcttgtagtgaaaggaaaataccgagcgatacgccttatccccaaaaacaagaaaaatggcataattgtattggcggctatatttggtggcccaatgggcatgtcttgttatatcttagctattcaatacattggcattagctacacagcaactatttcagcaacctacccggctattggcgcactcatttcttttttcctacttaaagatcgcattcaccttatcggcatattgggattaatattggccgttgtatgtactatgatactcggttattcagcatcaactcagacaacatctggctggataggctttttctttgcttttatatgcgcactaggctggagttccgaagttgttatcagctcttacggcatgaacaaagatatacctgctgatattgcttatttcatcaggcaattatcatcctctgtgggctatttaatcatgatcatattattcattcactcctttcctggagttacacatattttttcaaatatagaattatactccttattatttttcacctctctggtcgccacactatcgtacctcttctactacaaagcaatctgcatgcttcaacctatccgtgcgatgagtttaaacatcacctatgctatctgggcagtcatctttgcttatttgctggtagatgaacccatttctataaaactaatactcctatgcgtaggcgtctctgccggttcattgctaactgccgtaaatccacttaatatcaaaaaattgattctgacgcttaaatga

SEQ ID NO: 8986 - DNA, 1875 bp, Photorhabdus luminescens
atgaacaagagaatatttttcaaccaagacagattaattaaaaccatcgtccttctgattgtagatatatttatcattattatttcatactggctgagcatgtggctacgccttgatagagaagtgcccatttacagtttacagcattggttaaccattatattcaccatacctttcacgctatttattttcttaagaattggcttttatagatcgatattaaaatatgtcaacatgagtatattgaaatgggccattattggttcatttctatctactctactattgactgcaatttccttataccaacaagcctttttacccagaactgtaccgattatctacttctcttttctggttatctcactctgcggtacaagatttatctatagaacgctacgtaatttactaaaatataaaggtgctccggttatcatatacggagcaggagaatctggccggcaactgttacccatattaagagaacatagagaattcaacccgattgcttttgttgatgacaatgctaaattacacaatttatctattcatggagtttatgtcttctcttcagagaagataaccatcttagtagaaaaatataatataaagaaaatattattagccatacccagtgcatcaatatctaatagaaaaaaaatactagaaagactccaaaaagaacattgtgaaatcctcaccattccaagtttcaatgatctggttgaaggcaaagcgcaaataaactcactgaagcgcgtttccattaacgatctgttaggaagagaacaagttgatccactacaaagtctactcagtaaaaacatcaaaaacaaaaatgtgcttattaccggtgccggtggttcaatcggatcagaattatgcaggcaaatcattactcaatctccctctcagatagtcctatttgaattaaccgaatattgtctctattcaatagaaaaagagttacaaaagataaactcagatagagatttgaatataacgattactgcaattttaggagatataaaagattcagaaaagatagctagaataatcaataaatttaacattaacaccatataccacgcagcggcatataaacatgttccactggtagaaatgaataccatagagggcattaataacaatatctttggcaccctctcactggctcaagcagcaattaaccaaaaagttgaaaaatttgtattaatctctaccgacaaagccgtccgcccgacgaataccatgggcgcaacaaaaagatttgccgagcttatactacaagcttttgctaaagagcacagttatacaaaattctcaatggttcgctttggcaacgtccttggctcatccggttccgttgtccccctattcgaaaaacagataaaaagtggtggaccgataaccctcactcacaaagacattacccgttacttcatgacaatcccagaagcggctcaattagtcatccaggcaggagcactgggcaataatggcgacgtctttgttctggatatgggagaatcagtaaaaatttatgatctcgcccggaaaatgatccatctttccggcctgacagtgaaagatgaaaccaatcctcatggtgatatcgaaatcaaaattaccggattaagacccggtgaaaaactttatgaagaactcttaattggtgataacgtctctggcactaatcacccaagaatcatgacagccaatgaagtttttctgacctgggataaattaaacccattattaaatgacttaaaaacatcttgtgaaaattacgattttgaaaatattaggcagatcctgattaatgctcctattgattttcatcctaaagattatatttacgatcttttaaaataa

SEQ ID NO: 8987 - DNA, 612 bp, Photorhabdus luminescens
atgatgacatattatttagctataaaaaggctttttgattttacttcttctctcattggaatcatcctactattccctattttaatcacgattgctatctggataaaaatcgattcgaaaggacctatttttttccgacaaaaacgagtaggccaatataatcaagatttttatattcataaatttaggagcatgacgacgggatcagagcaaaaaggacaactcactattggtcatgatctccgtattacccactctggaaaatttatacgcaaatataaaattgatgaattagctcaactgattgacgttgtccgaggaaaaatgagcttagtcgggccaagaccggaagtaccacaatttatggacaaatacccggatgatgtcagaaacaaaatattatcggtaaaacccggcatcacagatttggcttctatagaaatgatcgatgaaaaccagatattaagccaatatcaagatcctcatcaagcctatatcgatattattatgccgataaaagccaagtactacttagaatacatagataaaaagtcatttttctatgacctgaagattattttcaaaacaatttacaaagtagtttttaggtaa

SEQ ID NO: 8988 - DNA, 1158 bp, Photorhabdus luminescens
atgaactcttcttttctccctttcgcactcccagaaatcagccaagaagaaattgatgaagtcattgactcacttaaaacaggctggataaccaccggacctaaaaccagaagatttgaacaagattttgcgcaatatttaggttccgatgttgaagccatagcggtaaattcagccacggcagggttgcatttagcattagaagccattggtattcagccgggtgatgaagtcatcgttccgacctatacctttacggcaaccgcagaagttgtccgttatttgggagctcaccctatttttgttgattctttacctgacagcctgaatattgacccaatagcaatagaaaaagccataaccgccaaaactaaagcaattatgccggtacactttgcaggtttatcctgtgatatggatgccattattgcaatagctaaaaaattcaatctacgaatcattgaagatgccgcccattcatttccgactttatataagggaaagaaaattggcacgctagataccgatgtcaccgtattcagcttttacgcgaataaaaccatgacgacagcggaaggtggcatgctagtctccagacatccagatatcataaaaagagcaaaaataatgcgcctccacggcattagcaaagacgcctttgatcgatatcaatctaaaatacctgcctggtattatgaagtgattgaaccaggctataaatataacatgcccgatatttgtgcatctatcggcatccatcaattacagaaaatagacactttccacaagaaaagagaggcaatggctaaactctatgatgatgaattaaaagatctaccgattatcttacccactaaacctcaagaatctaatagccaacacgcctggcatctatataccattagattaaatgatcaagtcaaaatatccagagatgactttattataaaaatggcagaaaaaaatatcggctgctctgtccattttattccactacacaaacaacccatctggaaaaatacctattctcttaacgaaaacaacttcccagtcgcagaagaaaactttaaaagaattgtatccatccctttatatacaaaaatgaccaaagaagaccaaatatacgttatcaaaacaattaaagagatcttggcataa

SEQ ID NO: 8989 - DNA, 1011 bp, Photorhabdus luminescens
atgataaatatatcagttatttgccctatattaaatgaagaaaaatatataaaagggtgtattgaatcactgctaaaacaagattaccctaccgggcaattagagattatttttatagatggttgtagttcagatagtactttaaaagtaattcagagttatactgaaaaatatgagttcataaaattactatataaccctgcaaaacatgttcctactgctctgaatattggtataaaaaactcattaggggaatatatagccagaatcgatgctcactccagctatcccagtagctacttatccaaactatataacttatcaaaaaaacttgatgctgataatataggtgggattgttaatacaaaaccatgtaattctacaaccatttcccacaatattgcatatgccttaagtagtcgctttggaatgggtaattcctattttcgaattggcattaataatataaaaaaagttgatacagtacctttcggctttttcaaaagaacactattcgataaaatagggctatttgatgaagatttaattagaaaccaagatgatgagtttaacaacagaattataaagcatggaggtaatatatacctttccccagatattattattgattattaccccagagattcaattaaaaaaatctgttctatgttctaccaatacggtttatttaaaccattagtcaatgccaaattgaaaaaaataacatcattctggcaattaataccaccaatttttgtcttagggttaatcctaggattaatcctctcattcactagctcaatatttttatatctatatataggttgtatttttatctatttcttcttaactttactggtatcaataagagcccatttaaaaaataaaaaaaactatattttcttaccattaatatttctgtacatacatttatcttatggatcagggtatctcattggaataatgaaaattatattcaataagaaattccacgtaaaaaacaaaagataa

SEQ ID NO: 8990 - DNA, 1239 bp, Photorhabdus luminescens
atgaatatcgtctatataaaccactatgccggctcaccggatcttgggatggaatttcgtccatatcatttaggacaagaatggattaaatcgggacataatattaccctacttgcagcctcttattctcatgtacggaccaaacaacccaaactgatagagaataaaaaaaccaccgaaaatattaacggattagaatatatctggtatccaaccccgagttataatggaaatggattatccagagtcaaaaatattttctcttttttacggcaaatttggcttgatagccataacttagtcaaaaaatatcgacctgatgttgttattgcttcaagtacatatccaatggatatctggattgccaaacgtcttgccaaaaaagccaatgccaaactggtttttgaactgcatgatttatggccgctttcacccatagaattaggtggaatgtcacctaaacatccatttattcaattatgccaacttgctgaaaacacagcttataaacatgctgatgtggttatttccatgcttcctaaagtacaagaacatacgaaagcacatggattagatctcaataaactacatattatccctaatggcgtggttataaaggattggataaatcaacttactccattaaaccgttcactagaaaaacttattataactgaaaaaaataaagggcataaaattgtatgctatagcggtgcccatggccgcccaaatgcgctagaaaaactactcaaaacggcttcactgcttcatgataaaccgataaccttcttattagtcggcacgggccttgaaaaagataacttaataaaggagtctcaatcactgagaacaaataacgttatattctttgatccgatccccaaaactcaaatcccaacactactcaataaaattgacattgcctatatagggttacaaaagcaatcattattcagatttggcatcagccccaataaactcattgattacatgatggcgggcaaacccattttatgtgcgattgatgccggtaatgatcctgtttctgacgtgaattgcggtatcaccgttaaatcaggcaagccagaagagattgctcgggccttattaaaactcagtgaattatcaactgacgaattaaaccaaatggggaaaaaaggtaaaatttacgctttagaaaatcacgcttattccgtattagcagacaatttcatcaaggccatcatcaatcatgaataa

SEQ ID NO: 8991 - DNA, 1071 bp, Photorhabdus luminescens
atgaaaaaaatcatcaccgtattaggtgccagaccacaattcattaaagcaagcccagtctctcgcgctttaaaaaataataacaaatttaaagaaattatcattcataccggtcaacattttgatactaatatgtctgatgtcttcttcaatgatttagccattcccaaaccggattacacactcaatattcacggtggttcacacggtgacatgacaggtagaatgctcatcgaaattgaaaaagtactcatcacagaaaaaccggatgccgtcatggtatatggcgacacaaactcgactttagctggtgcattagccgcatctaaattacatattccgattatccatgttgaagccggtttacgtagctttaatatgcagatgccagaagagataaacagaatattaaccgataatgtgagttcaattcttttctgtccaacagacactgccatcaataacctacaaaaagaaggcttcggttcaaagcccgttaatatcaaacaagtcggtgatgtgatggaagacgccgctttatattttagccaaatggcgaaaaaacctgatgggctggatgcgataccaaactttatattaaccacgctccatcgtgctgaaaataccgataatcaggaacgtctaactgaaatagtaaacgccttaaataatatacataaaagaactgctattgttgttatgccaattcacccaagaactaaaaaaatgttagcacaatacgacttacatttagatgttcatttaattgagccagtaggatatttagagatgatctggctactcaaaaacaccgccctgattattaccgatagcggtggactgcaaaaagaggcttttttcttcaagaaaccttgtgtgactgtgagggatcaaactgaatgggtagaattaattgccgcgggcgtaaacaaactctcggaggctgacagtaacaaaataacccaagccgttcatgacatgattggaattgacatggactcgattcaatccatgtatggtggtggtatcgctgcgacaagaattgctgacgaactagaaaaatcactatga

SEQ ID NO: 8992 - DNA, 1104 bp, Photorhabdus luminescens
atgaaaatcacacatatgacctcggtacatccacgtttcgacacccgtattttcctaaaagaatgttctgccttacaaaaagaacatgaggtctcacttattgttgcagatggtaaaggtaatgaagtcaagaataacattgctatcattgatgtcggtatattgcccggtcgattaaatagaatttttaaaacaaccgataaagtttataaaaaagcattagaattagacgccgacttatatcattttcatgatccagaactcatccctatcgggctaaaactgaaaaggaaaggtaaaatagtcatttttgattcccatgaagatgtccctaaacaaatttttagcaaaccttacttaaataaatttacccgggttattatctctaaactattcgccctctacgagaagtattctacacctaaatttgatggcattattacagccacaccctcaataagagacaaattcttaaaactcaataacaacaccatagatattaataactatcctatattaggtgagttgcataataaacatgccaactggcatgaaaaagaaaaacaagtctgctatgtcggcggtatttccgacattagaggtatagccgaaatggttgagtccctctctcacctcacaacaaatacaacaatgaaactcgcgggcaatttttcagatacagaactcgagaacaaaataaaaaatatgaaaaattggcacaaaatagatgcactgggatttttaaatcgcatagaaaccaaagagcttttatctaaatctattgcaggtattgttctatatcacccacttcccaatcatatcgatgcccaacccaataaaatattcgaatatatgagtgcgggtatcccggtcatcgcttcaaatttcacattatggaaagatatagttgtaaaaaaccattgtggcatttgtgttgacccattaaaccctaagcaaatagctgatgcaatagattacctatcaaataaccctgatatagcagaagaaatgggtaacaatgggcttctggcagtcaatgaaaaatacaattgggatattgaacaaaataaactaaccaaattttatcaacacattggacgttaa

SEQ ID NO: 8993 - DNA, 1230 bp, Photorhabdus luminescens
atgcaaaataatattaaaataatcctgaaaatatttatctatcaggttattatctacctgaattcaatacttatattagatacattccatgaggtaagaggctataatattaccccacaaggttacttaagtattattttctgttggatatcatttttaccactcattttactcaacaaccaaaaaaatcccgtgatggtttttttatggttaatctatatcacttacattataccggtatcaattatattcccactgattaattcagcttctgtctattcaatcattttcgtctgcacaataaacatattatttttctcatctatattattctttcggataatagatagaataacaataccgaaactaaaaatcccgtgggatttatataaaatactgataataggatgtggtattattgtcctcttattcgtcattagcaatcctggattaagtttaataccccctaatatatttaaagtttattccgtgagacagcactttaaagacaacacaccgctactcacgatgtacatcatcaccaatgggggatatgttatctcgccattgctattactagcttcactctatattagaggtccgataaaatatctgctcattacaataagtattttgatttcctatttaatctacagctcctcaggattaaaaagcatcgcattcatgaatctcgcggttatcattctatacttctatataaaaggaacaaaatcgataagtaactcggtgataaatatcatcctctatttattcctgaccgccgggatattatatttaattttcgatttttatgacccactgatccattggctacgcagagtattcttcacaccgacattaaatacctattatttttatgattatatctacaacaacaatagtgaatttacgacagaagcgccgcaaatagtttctcaaatctattatggcacctcaggttcggctaatactggctttattggagacggtatcgccagatacggtacactgggtttaataataaacttttttatatttaatatattaatctttgcaatgaacctgagctcaaaaaaggttccatttgaactttcaacgacactctatttacccttcgtatacacaatatcaaactcagcgattacagcactactactgacctatgggctgctggcattaagcatattattatttttattcccaacgaaaactaacaaaatacccttatga

SEQ ID NO: 8994 - DNA, 1107 bp, Photorhabdus luminescens
atgaagaaaatcataataaaaataattccctatatcattatcgtgatgattgtcagctatacattcaataaatatgcttatgagctagatgaattcaatggcaatgtgagaaacttagtcatgaaagggaaattcacgcaacgcgaatttaatagcaatggctttcctttatctcactcacctcatattccagagccattcttatccccattttatgttgttcactatggcctgatatactcttctttaggcttaaatcaagataacgccaatatattatggcgaaccgattcatccttacccggatggaatgtaccgccacctcaattcaatcaaaacgaattgattgctaattttaaattttcagccgattggttattaaataatataaaatcatttcatggtgaaagtcattacttatatgattttgattggtcatataaaggctacaaaaataataaactctctgccccctggtggtctggactaaccgatgcctatgccattattctcttattaagagcttatgaccattttgacgatgataaatatctactcacgtcgaaacgactataccaatcatcactcgcacctatccataaaggcggcagtttaacaacattagataatatgccttggattgaagagtacgttgatcctcaagccaattcagaccaattggcttttgtattaaacggcatgatctattctacttatggtattgagtcatttgaaacttatttaaatacagatgaaaacaccagaatatccgataaattatatcaatcaatcagccataatatatttaagttcgacataaaaaatgaatggtccagctatgatttaattggcaacccaagcaatattaaatatcacaaaatacatactcttcttttaaaagatctgatagctagaaatcaaaattttaaaaataaagaaataatagatttatataataattggaataaatccgccgctaatagcggatattattacataaaacatggccctacgagttgggcatactatcaatttatcactatgtatttcctgtctatcttagtattatcattcatttacttctttatccgcaaaaatgcaaaataa

SEQ ID NO: 8995 - DNA, 1218 bp, Photorhabdus luminescens
atgaatcataaattattgaggaatatatctggcttattactctcatcattattcagccagatattattattactatcaacacccgtattaacaagactattttcaccggaagaattaggtatttacgcttcattttcatcgcttttaagtgtttttgccgtaggtgcttgtcttcgatatgaattttcaataagttcatcagggaaaagtcgtgaaattaactcattagtcacattatcttgcattattccaataaccattagcctaatcgttatcactgtttttgcaatatctaacacaccagaaaaaataattataggaaactatatatactatatcccgctaggtattatcacttatggattttatcgagcagtgagtttcaatagtataagagaaaaacaataccatgcactctctatcactaaaataacgcaaaccgttgccatgattagcacccaaatcattggcggcattgcccatttaggcgcaagcagtctcatcttaggccaaatattaggccaatcattaggtgttctatttttaagtaaaagatccaaatatcgtttaattatcagcaaacatgaacttagaaaaataagactactggctaagaaatattatcgatttcccgtttatgattttcctgcggcttcaattaacacattgagtaatgaactgccccaattatttatcatgtccacctatgggctaaaatcggcaggattttatttaattgcatccagaatatcaggagccccaattacactattatcccaaaccgtttcatctatattacaaggatatttaaaagacacgcttatatcacctttcttaaagataaaaaaaacattttattgcctaacactgattgctattttatttgctatagtgacatacttcacgggcatacccatcataacctttatcttcggtgaagagtggcgagaatcaggtaaatatctattatgcttaataccacacttatgcgggcaaataatatactcatcgttatcggtatatttatcaatttatgaacatcagaaaagcaatttatttattcagacaacatcgattatattaagattaatcgccctccttactggatatctattaggcgatatttaccttaccctattattattttcactcacaagttttgttctctatatgacaagtacggcttatattttaaaattatctttcatgcgtcaataa

SEQ ID NO: 8996 - DNA, 1071 bp, Photorhabdus luminescens
atgcaatttaccgatctggcagcacagcaacttaaaattaaagataaaattgacgcgaatatccagaaagtcctcgcacatggaaaatatattttagggcctgaagtcgacgaattagaagcaaagctgattgcctacaccggcgcgccatattgcattacctgcgccaatggcaccgatgccttgcaaattgccttaatggcgattggcattaaacccggcgacgaagtgattaccgccggctttacctacattgccaccgctgaaaccgttgcgctactgggcggggttccagtttatgttgacgtcaaacccaccacgtataacttagatccaacgcaactcgaagcggcgattaccccaaaaaccaaagcgatcattccggtttccttatttggtcaatgtgccgattttgacgaaattaatgccatcgcagcaaaacataacctgatcgtaatagaagacgcggcccaaagttttggcgcgacttataaaggcaaacgttcctgtaacttaacgaccatctcatgtaccagtttcttccctagcaaaccgttgggatgttacggcgatggcggcgctattttcacccgtgatgaagaactggcgaaaattattcgtcaaattgcccgtcatggacaagaccgacgataccaccatatccggatcggaattaatagccgcttagataccctgcaagcagctatcctgttacccaaactggagatattcgatgaagaaatggcattacgtcagcaggtggcagaaaactacaataacgcattgaacggcatcggtatcacgaccacgccctatattgagccacacaatctttcggcctatgcgcaatatactctccgcattaaaaaccgtgatgaattacaacgcagattaaaagaacagggtattcccaccgccattcattacccgatcccgctaaataaacaacccgcggtggccagcaatattgctctgcctataggagacgaaatcgcacaagaagtcattagcttgccgatgcatccttatttatccatagatataattaataaaattgccagttcaatttaa

SEQ ID NO: 8997 - DNA, 588 bp, Photorhabdus luminescens
atgtcagcagaacacataatgatacatcccagtgccatcgttgatgaaggggctcaaatcggcaaaaacagccgtatctggcatttcacccacgtctgctcaggtgctcaaattggcgaaggctgttctctgggccaaaatgtctttattggcaatcaagtcactatcggcaatcactgcaaaatacaaaataatgtttctgtttatgacaatgttcatctggaagatggggtattttgtggcccaagcatggtgttcaccaatgtttataatccgcgttcattgattgaaagaaaaagtgaatatcaaaacacctgggtaaaaaaaggcgccaccttaggtgccaactgtaccattgtttgtggcaccaccattggcgcttatgcttttattggtgccggcgcggtggtgaataaagatgttcctgattatgccctgatggtgggtgtgccggctaaacacattggctggatgagtgaatttggtgaacaattagatttaccgctacacggacaagccaccgccacctgtcctcacactcagcatatttatcaactcaataaccatattgtcgtgcgaattaaataa

SEQ ID NO: 8998 - DNA, 1050 bp, Photorhabdus luminescens
atgctgagcactatcaacgacagaaagataaaatttgctttagtcggttgtggacggatcgctaaaaatcatttcaattctctggaagtacatcaagaagcagccgaattagtcgccgtctgtgataacgatcaagaagcattaaacgcagcagtagaaaaaaccggcgtcccgggtttcagcgacttcaatacaatgttggataacatcaccgcggatatcattatcctgaccactccctctggccttcatccagcacaggcgatgacctgctttgataaaggctttcacgtcgtcaccgaaaagccaatggcaacccggctggctgagggggaaaacatggtcaaagcggcagataaagccggaaaacacctgtttgtcgtcaaacaaaaccgcttaaatgccaccttacaattgctgaaacgggcggtcagtgaaaaacggtttggcaaaatccacctggtccacctgaatgttttctggacccgtccccaggcttattacgatcaagccgcctggcggggcacctgggaatttgatggcggtgccttcatgaatcaggcgagccactatgttgatttaattgaatggctaatcggcccggtcaaagatgttcaggccatgacatcaacccacttagatatcgaaacagaagataccggggtactcaatatccgctggcgggatggcacattaggctcaatggctgtcaccatgtgcacttatccgcaaaatctcgaaggttccatcaccatcttgggggaaaaaggcacggtcagagtggggggtttagccgtcaatgaaatccaggaatggcatttcgctgacgaaaaagagtatgaccaacaagtcaaaaccgccaattacgaaaccacttctgtttatggctttggccatccgctttattacaaaaatgtcattgaggtgatgaaaggcgaagcccaacccatcactgatggccgggaaggcttaaaatccttagagctgcttatcgccgcctacctgtcagccagagataacaaaaccatttctttgcctttaacctattaa

SEQ ID NO: 8999 - DNA, 1311 bp, Photorhabdus luminescens
atgtcctcactcaacattctcaccgagaaatttgataataaaaccgccaccattgccattgttggcctgggttatgttggcttaccgctcatgctcagatataacgatattggttttaaagtgatgggtttcgatatcgataaagaaaaaacagataaactcaatcaaggtcaaagttacattgaacatattccctccgccaaaatcagtcacgcgataaagaccggttttgaagccacgacggatttcaccaacatcgcgcaatgcgatgccattattctttgcgtcccaacgccgttaaataaataccgtgaacctgatattagtttcgtgattaacaccaccgacagggtaaaaccgtatttaagggccgggcaagtcctctccttagaaagtacaacttatccgggcaccaccgaagaagagttactcccccgggttgaagaaagcgggttaaccgtcggtgaagatatctttctggtctattcacctgaacgagaagacccgggtaaccccgatttcgaaacccgcaccattcctaaagtcataggcggccacacagaaaactgcttaaaagcggggatcgccgtttatcaacacgcgattgatcaggttgttccggtcagctcaaccaaagcggcagagatgacaaaactgctggagaatatccatcgggcggtcaatatcggcttagtcaacgaaatgaaactggttgccgataaaatgggcattgatattcacgaagtgattagagccgcagcaaccaaacctttcggctttgttccctattatcccggccccggattaggcgggcactgtattcccattgatcctttctatttaacctggaaagcccgagaatatggtatcaatacccgctttattgaactctccggtgaagtcaattcctccatgcccgattatgtggtcactaaaaccgtattagccctgaacaaagcgaataaatccattaatggcagccacatattaatcctcggcatcgcctataaaaagaatgtggatgatatgcgagaaagcccctcagtacatattatggaaaaattaagcgaattaggggccaatattgaatatgccgatccgcatgtcccggtctttccgaagatgcgggaacatcattttaatttaatcagccagcccatcacggaaaatagtctcaaaaccttcgactgcgttattttagccaccgatcacgacaaatttgattatgaattaattatcaatcacgccaaattagttgtcgatactcgtggcaaatactctcccaatcacaaaaacattatcaaagcttaa

SEQ ID NO: 9000 - DNA, 1371 bp, Photorhabdus luminescens
atgataaacagtttgacggcacgcatcttcgcaattttctggtttactctggcattagtcctaatgttggtattaatggtgccgaaactggattccagacaattgacctctctgctggaaaatgaataccggcagggagtcatgctggaacaacatatcgaagctgaattagctcaagatcccgctaacgatttactttggtggcgtcgtttatttcgcgcggttgaaaaatgggcccctccgggtcagcgcctaatactggtcaccagcgaagggcgcgttattggcgcacaaagaagtgaaatgcaagttgtccgtaactttattggacaatcagataacgcagatcatcctaaaaagaaaaaatatggccgctctgaaatgctagggcccttttccattcgagatggagaagatcattatcaactttatttagttcgtcccgcgaatagcccacaatcggattttattaatctgatgtttgaccggccactattattattaactgctaccatgttaatcagtgcgccactcctattatggctggcatggagtttggctaagcctgcccgtaaattaaaaaatgccgcagacgatgttgctaaaggtaacttacgccaacatccagaactggaagccggcccacaagaatttctggccgccggtaacagcttcaaccagatgatcagtgtattggaaagaatggttatcgcacaacaacggttaatttccgatatctcccatgaactacgcacgcctctcacccgcttacagcttgcaacagcattacttcgccgccgtcatggtgaaaataaagagctagaaagaatagagacagaagcccaacggctagacagcatgattaacgatctgttagtactctcccgcagtcagcataaaaatgaactgttgagagaaaacattaaaatgacagatttatggaacgatattcttgacaatgctcgcttcgaagctgaacagatggataaaacccttgaagcaaccttaccaccgagttcttgggcaatttactgcaacccattagcacttggcagtgcttttgaaaatatcgtgcgtaatgccttacgctactcccaccaccatattgcggtcgcatttcacgccgataatcaagggatcactattaccgttgatgatgacggcccgggcgtcaacccggaagaccgtgaacacatattccgccctttctaccgtacagacgaagcccgcgatcgggaatccggcggcactggccttggcttagccattgttgaaaccgcgattaaccaacaccgcggttgggttcgtgctgaagacagcccactcggcggcttacgcttggttatttggctaccacttcatggccggtaa

SEQ ID NO: 9001 - DNA, 696 bp, Photorhabdus luminescens
atgcataaaatcctattagttgatgatgaccgtgaactgacatcactattaaaagaattacttgaaatggaaggatttaacgttgttatcgctcatgacggagagcaggcattaaaattccttgacgattcgatcgacttattactacttgatattatgatgccgcgtaaaaatggcattacgacgttaaaggagcttcgtctacaccatcaaacgccagttattatgctgacagcgcgaggaagtgatttggatcgtgttctggggctagaattaggggcagatgactatcttgccaaaccatttaatgatcgtgagctagtggcacgtatacgtgctattcttcgccgctcaaactggagtgaacaacagcaaacagacaatggcccacccacgcttcaggtcgataacctacaattgaaccctggccgacaggaagccaactttgctaatcaaattctcgatttaaccggtaccgaatttactttgctctatctattagctcaacatttaggtcaagttgtctcccgtgaacatttgagccaagaagtattaggtaagcgactcacgccatttgaccgcgcaattgatatgcatatttctaacctacgccgtaaattacctgagcgggaagatgggctcccttggtttaagaccttacgtggccgaggatatttaatggtttctgcgacatga

SEQ ID NO: 9002 - DNA, 495 bp, Photorhabdus luminescens
atgcgtaacatagcagcgttagttttagcgtcaatgtttgttcttagctcgacggcatctttagctggaacagcaagtacaatgcacgctgctacggtacctggtaattgtgcaccttgtgaatataaaaatgtaggaagttatcattatcgtaataataacgatattggtgataatgaccatatgtttaacggtatcactttaactgagcagcagcgtcaacagatgcgtgatttggtagggcagaaacatcaaccgcgttcatcgatgtcaatgagtcccacagagcgagaagagatgcgtaagctggtcactgcgaaggattttgatggcgtggcagtaaaggctctgattgaaaggatgatcagatgtaatgtggagcatcaggtagaaatggcacgtatccatcaccagatgtaccaactgttgacgcctgagcaacaagcacaattggaacaacattatcggcagcgtatgtctcagttaccgaactga

SEQ ID NO: 9003 - DNA, 435 bp, Photorhabdus luminescens
gtgtcacagtatgaaaatggaactcatcagccaacctttgaaacaatgtgtgcgttctccaagatattaaaaggccgtgtaatttttctaaataccaaaaatggagatcaacgcattgttcccatttctgacaaattagagaaagaaattcgtggtaaaaagaaaatgggcaagctgttcaatgttgactacataaatttctgtaagatcttacatgtagtaaagcccgacttacctaaaggacaagcaactcatgtcctcaggcacacttttgccagccacttcatgatgaatggagggaatataattgcattacaacagatattagggcacgccagcataatccaaacaatggtctatgcacaccttgccccggactatctgcaacatgccattacattaaaccctcttaagggtgggatagaagtagaataa

SEQ ID NO: 9004 - DNA, 177 bp, Photorhabdus luminescens
ctgattaacaaactaggggggaagatcaagaacggcaacggatcacgccggaagtttatcctcatgggctcagtctatcagactcatcaacctcatcctggtaacgtaatggataaaggcgcagtaaatggccttcgtgagtggttcgaaaatgtaataggggtcgaacatgattaa

SEQ ID NO: 9005 - DNA, 348 bp, Photorhabdus luminescens
atgattaaaagcaacaacattatgactatcgacggccatcccgcttctgttacctacgaagcagaaattggggcctttcgcggcaagtttctggatgtcaccggatattgtgatttcgtatcaaacagtattgacgggcttgaaaaagagggacaaatctcactggctgaatatatagaaacgtgcgaggaagagggaattaacccattcaaagaagaggacaagctaaaatcttttactcttcgttatcctggctggctggaagctcgcttgactgcggcggcaatatcacacgcagtctcaaagaaccaattcatagttcagctgcttgagcgagaacttcaataa

SEQ ID NO: 9006 - DNA, 423 bp, Photorhabdus luminescens
ctgctatgtctcagcacgggtgccagatggggagaagcatcaaccttaaaaagcgcccaagtaaagagttaccgagtgacatttttaaaaaccaaaaatggcaagcaaagggctattccgatatcaaaagagttagaaaaggaaatcaaacagaagtcaggggaattatttgacgttgattacgaaagctttcgtacaaagttaaaatcaataaaacctgatttaccagaaggacaagcaacgcacgttctacgccacacattcgcgagtcattttgtgatgaaaggtggaaacattgttgcactgcaacaaatactcggtcatgccaatatacaacaaactatggcgtatgctcatctggcacccgactatttgcaatttgcaatcatgttaaacccactgaatggcggcatggaaatttag

SEQ ID NO: 9007 - DNA, 189 bp, Photorhabdus luminescens
gtggaggccagtgtagcccgcatttgttggcagttatcgcagctacccgataaccccaaatttgaaaaatacacactctggctaatgacgggaaagattgccccagaatctgggcaaattagcccaactctctcccctgatggtgtagacatcaaaacgtcacaccactcagaccggaaaactggctaa

SEQ ID NO: 9008 - DNA, 315 bp, Photorhabdus luminescens
atgatacaggctattgtttctcatccgggcgttatggtatccaacatgctggaggatttaggggttggcgttcgccagtttgctaaaaacatcggcgtaactccagcgacggtttcccgctttctttcgggcaaaacggcgttaaccccggcacttgccatccgactgtctgctgcgctggggagtaatccggcgttttggatgcgcttacagacgaactacgacttgcgccaactggaagatgagatcgacacgtcagggatcattctatacggcgacaatgacaaaacgccgcagctcacttcaaagcattaa

SEQ ID NO: 9009 - DNA, 153 bp, Photorhabdus luminescens
ttagaagatttaaatattcatgcctacaagttacaccccttgaaaggggatcgggctgacatatggtcaattactgtcagagctaactggcgcatcacattcgaatttaaaaatggtgatgcttacattttaaacctagaggattatcactaa

SEQ ID NO: 9010 - DNA, 186 bp, Photorhabdus luminescens
atgattaagtcatttaaacacaaagagctgaaacaactttttgaaaaaggagttatttcaggcatcccggcgcaggatgctgtccgaatcaatgaccgcttacaggccatcgacacggctagcatgattagaagatttaaatattcatgcctacaagttacaccccttgaaaggggatcgggctga

SEQ ID NO: 9011 - DNA, 303 bp, Photorhabdus luminescens
atgtataagctcacggatcaggctgctgaagattttgctgggatttatgattatacatttttgcagttcggtgaaactcaggctgaccattatacggaggcactggaagcattttttgacacactagctgagatgccacatatagggagggaatacccatctgtcccaggtgtcatgctggttgagtttcaccgtcacacggttttctatactatccgggataccgatattctgattgcgagtatccttcatcaacagatgaatcacccccgttattttcaacgaagtttgtcagcgatctga

SEQ ID NO: 9012 - DNA, 243 bp, Photorhabdus luminescens
atgagaaaaattactactgtcagtatgggtgaacagcttgaccggttcgtacagcacatgattgaaagtggccgttatggaaatgccagtgaagttatacgttcggcgctgcgtttgctggagcaacaagaagcttacgatgagattgtacgcaaggcggttattactggcttggaaagtggggaaagctcgctgaccctacgggatatagcggaacaacggaaacacagacatcatgtataa

SEQ ID NO: 9013 - DNA, 135 bp, Photorhabdus luminescens
gtggtcaaggtctggacacttattttaataaatccttttattacaatatgttatgctttaaaagcaaacaccatcctgtctttcaggccctttttagaactttttttcagtcatttacaacgtatttctttgtaa

SEQ ID NO: 9014 - DNA, 135 bp, Photorhabdus luminescens
atgcgccttccagaaaaatttcgcgagcaattagaagaacaagcgtgtagagacggtgatttttctcttgtaacatggatcaagcggattttgcgtaaagaactacgggaacgaggtattgaaccgaaaggttga

SEQ ID NO: 9015 - DNA, 339 bp, Photorhabdus luminescens
atgaccactaaaattgacactgaaattcgtagggtaactccagccggacataatatattttctgagttaggttttactgagcaagaggctcagcaacttcatgcaacctctttacgagaaatagaaaatacattgcaaatcaaagaacagctaatggaagaaattactttatggattgcagataaaaaaatgaaacaaactgaagtagcaacggtgttgcacatttctcgtccaagagtatctgacgttgtgaataaaaaggtaaataaattcaccattgacgcattagttaatatgttaacccgtataggaaaacctgttcaaattacggtaggctaa

SEQ ID NO: 9016 - DNA, 318 bp, Photorhabdus luminescens
ttggctcttcttattgaagatttgttagccttccctacagatgcacgtaaagacgcaggctatcagcttcatagaatacagcatggaatagatcctgaagattggaaacccttttctgacatcggttctggcgtaaaagaaatacggctaagagacaatacaggtatttatcgtattatgtatgttgctaaattcgatgaagctatttatgtattgcatagttttcagaaaaaaactcaacaaacgagtaaacatgataaggatatcgctaaagtacgatacaacgcagttatccagcaacggagaaatatcaaatga

SEQ ID NO: 9017 - DNA, 408 bp, Photorhabdus luminescens
atggcacaagattatcatcatggtgtctgcgtgcaggaaatcaacgagggcacgcgcactattaccactgtcagcaccgctattgtcgggctagtctgcacagcggatgatgctgacaccaaacctttttccttaaacatgccagtcttgttaaccgatgttctgactgccagtagtaaggccggtaaaacgggcacattgttccatgctctgcgagcgattgccgaccagtccaaacccgtgactgttgttgtgcgtgtggctcaggggaaaactgaagcagaaaccacgtcgaatatcattggcggcgttaccgacgagggcaaaaaaacgggaatgcaggcgctgcttgcggcacaaggtcagctcggcatcagaccgcgtattttgtatgattattccccatga

SEQ ID NO: 9018 - DNA, 294 bp, Photorhabdus luminescens
atgactttccgcgaaaaattggaagcaaagaaaagagagaaaaaccctgaatttatcaaagcatttgaagaaacaaaacagactttagacctacatattcaactgcaagaggaaatgagatcatggagagaacaggcggggttaacaagtgcacaagtagccgaaagaatgggagttaagcctcccacaatttcaagacttgaaaaaaacgcagatagggcaagcattgagagaattttaaaatatgctagcgtttgtggaataaaagaaatcaaacttactattgcatcgtaa

SEQ ID NO: 9019 - DNA, 351 bp, Photorhabdus luminescens
atgatagaaatttttttccatccatccgcaaactctgaaatagatggattatcagaagaattacaaggtaagttttatgcgttgatagacactttatctgataaaccgcatgatttacgagaaccacactgcaaactacttgaaaaaagaaacaaaatttttgaattaagaacaagtaacggagacaacatagcacggggtacatggtgctacggggaagaaaagaacactatttacatgcttagtttctttattaaaaaatcacaaaaaacagacgtaagagacaaacaaacagctataaatagaaaaaaagacatgattaaaatgcataaaagagaggatctaagatga

SEQ ID NO: 9020 - DNA, 675 bp, Photorhabdus luminescens
atgtctggtaacgaggtaaaagatcggcgtccgatcaaaacacgcaatgccgtgtgggccagtaagatggctaagtggttgcaatataaaggggcgacaccaaatggcatatctgttgccagcgttgtttttgctgtattcgctggcgtgtgttttgccgtgtgttttttagtcgagtctttttggttgacttcaattttattgattattggtgccttgcttattcaaggccgactaatgtgtaatttattggatggcatggttgctgttgaagggggattgaagacggctgccggtactgtttttaatgatcttcctgatcgtattgctgattcttttattctgattggggtggggtatggtttaacactttttccatttgcgatttctcttggctgtattgctgcattattcgctgttttgactgcttatattcgcttgttaggtgggacttgtggtttacctcagcgtttcctggggccgatggcgaaacagcatcggatggcattaattaccgttagttcaattgttgccgcttttttacctcagttatggagccagtatcttttattggcggtattagtcgttatcacgttgggttgtctctggacatgtattcggcgaaccagagtcatattgaatgaattacaggagaaggatgcttgtaatgaataa

SEQ ID NO: 9021 - DNA, 642 bp, Photorhabdus luminescens
atgaataaaccacaagaagtgacactggtaagtaaaggtatgggttcgtttctgtctgggctttgccgtttgttaacaggagtgagaattcgttggattgggtgtaagccatcggtagtttcccgaatttattatgctaatcatagcagtcatctggatgggttagttatttgggctgggtttcctcgggtgttacgttctcgggtgcatccagttgctgcgcgtgattattggagtaaaacttatctgcgcagatattttattaataaagtttttcgggctgtgcttattgatcgtaaaggagaagattgtttaaagggaaataccctgacaccaatggaggatgtattaaaacgaggcgaatctttaattttgttcccggaaggaacgcgagggagtggggagcaaattaataagtttaaaggggggctatattatttagcgaagaaatatcctgatattgagcttattccagtttatctggaaaatttaaacaaggttttgccaaaaggctcggcacttgttgttcctgttatttgctcggcaacatttgggcaacctttggaaaagttaggtgcaaaagaggaaaaagctgactttttacagagagctcgtcaggcattggaggcgttaatattatga

SEQ ID NO: 9022 - DNA, 945 bp, Photorhabdus luminescens
atgactatgcttaataataaactaatcctgttgttggggggaatgttcgtgccgttaattattgccagtattgttggtgcaatactctcctccaaatattcaatggataacagtaatgcgacaatcgataatctgaatgcccgcatccgtggctggtgggggatgtgtattatttgtgtgttgtcggtgattattgggccaattggttcagtgttattatttgcgagtatgtcatttttcgctttacgggaatttttcactttgacaccaacacgacgaagtgaccatgaggcgatgttctggtgtttctttattttcatgccattgcaatacattgccgttggtattgagtggtatggcgtgttttctattttcattcctgtttatgtgttcctgtttttacctgctcgtattgcattagcaggggatacaacgaactttctggaacggacagctaaaatacagtggggaatgttagttgctgtattctgtattagccatgcccccgctttattgatgttagatattcctggttatgaaggggagaatgtcgaattattgttgtttttaatgattgtggtgcagatgtcagatgtcttgcaatatgtgtttggtaaattatttggtaaacatcctattgtgcctaaattgagtccgaataaaacagttgaaggttttgttggtggcattttggtttcagtgttattaggaatgtcactttattgggtaacgccattttctccgtgggaggcaggtttgatgtcattagcgattacgctgatgggctttattggtggcttgtgtatgtcggcgataaaacgtgatagtggcattaaagatttcggtgaaatgattgaaggtcatggtggcatgttagataggatcgattcgttatgttttgccgccccagtctttttccatctgacacgttatttttatacataa

SEQ ID NO: 9023 - DNA, 972 bp, Photorhabdus luminescens
atgagcaatgagatcaaaagaatcggtgtcttaacgagtggcggtgatgcgccgggtatgaatgcagctattcgtggtgtggttcgtgcgggattaaccgaagggttggaagttttcggtatttatgatggctatcttggcttgtatgaaaaccgtatgaagaaacttgaccgttttagtgtatccgacatgattaaccgtggtggtacttttctaggttcagcccgtttccctgagttcagggatgagaaggttcgtactgtcgctattgagaacatgagaaaaaatggtcttgatgctctggtcgttatcggcggtgacggttcctatcttggcgcgaaaaaactgacagaagcgggtttcccctgcattggcctgccgggcactattgataatgatgtggcgggtaccgactataccatcggctatttcactgcgctggaaactgtggttgaagcgattgaccgtctgcgtgatacctcgacttcccacaaacgtatttccattgttgaagtaatgggacgttattgtggtgatctcactttgtcagccgctattgcaggcggttgtgagtttattgttttaccggaagtctcatttagttgtgatgagctcgtagctgaaattaaagcgggtatcgataaaggcaaacgccacgccatcgttgcaattaccgaacatgtttgtgatgtttatgaacttgcgaaacatatcgaaaaagagacgcatcatgaaacccgtgccacagtcttaggccatgttcagcgtggtggttccccagttgcctatgatcgtattctggcttcccgtatgggggcatattccattcaattactgttggaaggttatggtggtcgttgtgttggtattcagaacgagaaacttgttcatcatgacatcattgatgcagtgcaaaatatgaaacgtgtgtttaaacaggattggttggaaaccgcgaaaaagttgtattga

SEQ ID NO: 9024 - DNA, 996 bp, Photorhabdus luminescens
atgaaagtcagatggcgtgtggcattggcgttactattgattaccaatagcagcgtctgggcaaaagatcttcaacttcttaatgtttcctatgatccaacccgtgagttatatcagcagtataatcgggcttttagcgattattggcagcagaagacaggggataaagtgataatccggcaatctcatggtggttcgggtaaacaggcaacttctgttatcaacggccttgaggcggatgtggtgacactggctttggcctatgatgtggatgccattgcggaacgtggccggatagcgaaagcatggattaagcgtttgccagagaattctgctccctatacttcaactattgtttttttagtgcggaaaggtaatccaaagcaaattaaagactggtcagatttagttcgtccaggagtatctgttgtgacacctaatccaaaaacatcgggcggtgcacgctggaattatctggctgcatggggttatgggttgattcataacaatcaggaacaggacaaagcgaaagcatttgttaaagccctttaccagaatgttgaagtgctcgattctggcgcaagaggagcgaccagcacttttgtcgagcgtggcatcggtgatgtattaattgcctgggagaatgaggcattattagcgattaatgcgcttgataaagataaatttgaaattgtgacacctagtctttcaattctggctgagccgacggtttctgttgttgataaggttgttgataaacgtcatagccgtgagttagcaacagaatatctgcaatacctttactcacccgttgggcaggagatagcggctaaaaactattatcgaccacgtgataaagtggttgccgataagtaccgctcttcttttcctgcgttggaattatttactgtcgataagatattcggcggttggggtgaagctcaaaaagtgcattttgcgactggcggtgtgttcgatgagattattcagcgataa

SEQ ID NO: 9025 - DNA, 768 bp, Photorhabdus luminescens
atgcgacatccattagttatgggtaactggaaattgaatggcagcacccatatggttaacgaactcatcactggcctgcgtcaagaattaagcagtgttaccggctgtgacgtcgctatcgcgccaccagcgctttatctctctcaggctaaacaagcactggctggcagccgcattgctctaggtgcacaggacgttgacgttaacctgtctggtgcatttaccggtgaaacttccgccacaatgttgaaagacattggcgcagaatacattattatcggccactctgaacgccgtacttaccaccaagaaagtgacgaattcattgcgaaaaaatttgccattcttaaacaacaaggtctaatccctgttttgtgcatcggcgaaactgaacaggaaaatgaagccggccaaactgaaagtgtatgtgcaaggcaaattgatgcagttctgaacacattgggagtagcagccttccaaggtgcggtcatcgcttacgaacctgtttgggcaattggtacaggcaaatcagcaacaccggcacaagctcaagctgtgcataaattcatccgtgatcatattgcgcagaaagatgcagcaatcgcacaacaaatcattatccagtacggtggctctgtgaacgcagataatgccgctgagctattctctcagccagacattgacggtgcattagtcggcggtgcatctctaaaagctaacgctttcgctgttatcgtaaaagccgcagccgctgcgaaaaaagcctaa

SEQ ID NO: 9026 - DNA, 603 bp, Photorhabdus luminescens
atggacgttaataaatttctagccataatattagcggcaagcagtgtcggtttgccattggtagccaatgctgataaatccacaaccacagaacccacagtacaagcgacctatcttctgcctaatgccccctctttcgatgaaactatcccgcgatttcgcgaaaaatataatcgctgcaacccgacattgccactacgcgaatatcgggtaatcataagtaaaaacatttatccgccactgacacgagctgccagcaaaatcaatgaaaaactctattcttccgccgtacttgagcgaggaagcgaaaaaatcaaaagcctgcaactgacattactaccatcagaaaataccgctgaaactcagcaaaaccaaatgctggcagagcagtacatgaccgccctaatgcgccactttaacccaacgctttcacaggaacaaagcaaagagaatattgataacttactcataaacagcaaaaaatcgccattttacagccacaacatcggcgctattcgctatattgtagtaaatagtagtgaaaaaacgcttactttcgctattgaaccgattaagctatggttatttgaacccgataactaa

SEQ ID NO: 9027 - DNA, 435 bp, Photorhabdus luminescens
atgacattacaacaatggggtttttcattcaaaggacgaattgggcggcgtgaattctggattggcattggtgtttgcctggccttgatgtttgttatcttgactattcagggtatgagttctttgaccatgcactatgctgtttttgcacttgtcttggtgatgtatcccgtagcggcaatgatggttaagcgtctgcatgatcgaaataagcggggaggttggtcgctgcttttattactggcagggttgttggttgctgttgactggggtggcctggctccgttctggcaatgggggatcggccgttttatccccacattgatcattgtaatgatggtgcttgattgcggtgtattccgtggtacggatgggccaaaccgatttggtgaggcgacagagaaagtggattttatttctgtcaaagatgattga

SEQ ID NO: 9028 - DNA, 747 bp, Photorhabdus luminescens
atggcaaactgggttacaggaaaagttacacaagttattcactggacgaataccttattcagcatcaggatacatgcaccggttgaaaaatttactgcgggccagtttgcaaaactggcgatggaaatagatgatgaacgggtacaacgggcctactcttatgttaatgccccgatagataataatcttgaattctacttagtgacggttcctgaaggcaaactcagcccacaattagcagctctgcaaccgggtgatgatctcttagtaacagaacaagccgcaggcttttttattcttgatgaaatacctgattgtgaaacattatggatgctttcaacagggaccgccattggcccttatctgtcaatcctccagcaaggagatcatctggatagattcaaaaacatcgtattggtgcatgccgtcagactaacacaagatttaagctatctgcccttaatgcagcaattagttgaacgtctcaatggcaagttacgaattcagactatcgtcagccgtgaacaaaacctcggctcattgactggccgtatcccgacattgatcgagaatggcgaacttgagtccgctgtcggacttacgatgagcagtgacaacagccatattatgttatgtggtaaccctcaaatggtgaaagatacccagcaactgctaaaagagcagcgtggaatggcaaaacacttacgccgcaaaccggggcatatcaccagtgaacaatattggtaa

SEQ ID NO: 9029 - DNA, 1524 bp, Photorhabdus luminescens
atgacaacagaaaatatgattgagaaaaagtatattgtcgcccttgatcagggaaccaccagttcccgagcaataattcttgatcacgacgccaatattatctcaatttcccaaagagagtttacgcaaatttatcctaaaccgggttgggtagaacacgatccaatggaaatctgggcaacccaaagctcaacgctggtagaagtattggcgaaagcggatattagttctgatcagattgccggtattggtattaccaaccaacgtgaaacaacgattatttgggaaaaagagaccggtaaacctatctacaatgccatcgtttggcaatgtcgccgtaccgcggacgcgtgtactaaactaaaacaaaaagagggattggaagaatatattcgccagaatacagggctggtagtagacccttatttctccggcaccaaagtaaaatggatcttagataacgtcgcaggtgcccgtgaacgggctgaaaaaggtgagctcctattcggtactgtggatacttggctggtatggaaaatgactcaaggccgagtccacgttaccgatttcacaaacgcctcccgaacgatgctgttcaatattcacaatctggagtgggatcagcatattcttgatgaattacaaatccctcgttccctactgcctagcgttcattcatcttctgagatttatggtcagaccaacatcggcggtaaaggcggcactcggatccctatctcaggtatcgcaggtgatcaacaagctgctctatatggtcaactttgtgtccaaccgggtatggcgaaaaacacctacgggacaggctgtttcctgctgatgaacacgggtacagatgccgtacgctccaatcacggcctactgacaaccattgcctgtggtcctcgcggcgaagtgaactatgcgcttgaaggtgcggttttcgttggtggtgcctctattcagtggttgcgtgatgaactgaaacttattgcagatgcggctgactccgaatattttgccactaaagttaaaaatagtaacggcgtgtatgtggtccctgcttttaccggccttggtgccccctattgggacccctacgcccgagggtcaattttcggcctaacccgcggtaccaacagtaatcacatcattcgtgcgacgctggaatctatcgcctatcagacccgtgatgtactggatgctatgcaagctgatgcaggcacccggctgcaagcactacgggtagatggcggagccgttgccaataacttcctgatgcaattccaatcagatattcttggcacccgggtagaacgccctgtggtgcgtgaaagcacagcattgggcgcagcattcctcgcaggattggcagttggctactggaaagacctggatgaagtgaaaagtaaagccaccattgagaaagaattccgtccgggtattgaaaccaccgagcgtaattacaaatacaatggctggaaaaaagcagttgcccgtgcgcaggattgggaagataaaggctaa

SEQ ID NO: 9030 - DNA, 831 bp, Photorhabdus luminescens
atgagccaaaccactagcacgacattaaccggacaatgtatctctgagtttcttggtaccgcactattggttttccttggagtaggctgtgttgccgcagcacgtattgccggcgcacaattaggcttatgggaaatcagtattatttggggtatgagcgttgcgttggctgtttatctcaccgcaggtgtttccggtgctcaccttaacccggcagtgacgattgccctatggttgtttgcccgctttgatggcaaaaaggttatccctttcattattgcccaaatgattggtggcttcatcgctgccgctctcatttacatgatgtactacagcgtattccttgattacgaacaggtacacaatatcgttcgtggtacgccagaaagcctgtttaccgcaggtgtattctctacttacccaatggcgtcactgtccatttctcaggcttttatgatagaagttatcattgccgccattctgctctgtttgattctgtcgctgactgacgatggcaatggtattccccgcggtcctctggccccgttactgattggtattgtgattgccgttatcggcggtgcatttggcccattaaccggtttcgcgctgaacccagcccgtgactttggtcccaaattaattgcttatctggccggttggggagatattgccctgacgggtgggcgtgaaatcccttactgtctggttactctgaccgcccccattatcggcggtattgtgggagcatttggctaccgcaaacttattggtcgcaatttaccatctgatgttcacaagactgaagatcagaagaaaaagaaagcctaa

SEQ ID NO: 9031 - DNA, 243 bp, Photorhabdus luminescens
atgtcatttgaagtttttgaaaagctggaagccaaggttcagcaggcgattgatactattaccctgctacaaatggaaattgaagaattaaaagaaaaaaatcgatctttgtctcaggaaattcagaatgcaaccagcggccgtgagtctctggctcatgaaaatgagcaattaaaacaagagcaacaagtatggcaagaacgtttgcgtgccttgttaggcaaaatggaagatgttcagtaa

SEQ ID NO: 9032 - DNA, 510 bp, Photorhabdus luminescens
atgaaatatgatacttccgagctttgtgacatctatcaagaagaagtaaatgtggtagagcctatgttctccaattttggcgggcgtacttcatttggtggtcaaatcatcacggttaaatgctttgaagacaacgggctactttacgacctgcttgaagacaacggtcatggacgcattttactggtagatggtggtggttctgtacgccaagcattaattaacgctgagctggcacaactcgctgtgcaaaatggatgggagggcattgttgtttacggtgctgtacgtcaggttgaccaattagcagagttcgacctcggcattcaagctatagccgctattccggctggctgtcgtgatgaaggaaccggcgcaagcgatatccgggtgaattttggtggtgtcaccttcttctctggcgattatttgtatgccgataacaccggtatcattttgtctgaagaaccgttggaacttgatgacaacgaagaagatgagatcatctga

SEQ ID NO: 9033 - DNA, 918 bp, Photorhabdus luminescens
atgaactcatcaacttctatcagtcaaactcaagcatggctggaaagtttgcgtcctaaaacgctaccactcgcccttgctgccattattactggctcagcccttgctgcctggacagggcatttcaagctaccggttgccttactggctctattaacagcagccatattgcaaatcctgtccaatctcgccaatgattacggtgatgttatcaaaggcagtgatactgaaaagcgtatcgggccactacgtggtatgcaaaaaggcattattaccccctcacagatgaaaaaagcgctgaagattattgtcctgctaacttgcctgtctggtagcgccttgattgctgttgcctgtgaagaacctagcgatatattcggttttttggcacttggcctgctagcaattattgccgcaattacctatacagtcggtgcaaaaccttatggctatatgggacttggcgatatttcagtactgattttctttggctggttaagtgttgccggtacttattatcttcaagcaggtttttttgactcagttgtcatactcccggcgacagcctgtggtcttctctctgctgctgttttaaatatcaataacctgcgtgatattgaagatgacagacggcatggcaaaaacaccctagctgtccgtctcggccctaaaaaagcccgttattatcacggatgtttaataattacagcaatactctgcttggtattattcaccatacaaaacccgtctggctggtcaagctggttgttcctgctcgctctgccttggttgttcaaacatatgtggtatgtacttaatgaacccacaccagagggaatgcggccaatgctgggacagatggttaaggcggcattattgactaatattctattttcagttggtcttatttttaattag

SEQ ID NO: 9034 - DNA, 1332 bp, Photorhabdus luminescens
atgtctgaaatgactccacgcgaaattgtcagcgaacttgacaaacacattattggtcaggataaagcgaaacgcgctgtagctatcgcactccgtaaccgctggcgtcgtatgcagctagatgaaacgctgcgctacgaagtaacgcctaaaaatatcctaatgattggcccgactggggtaggtaaaaccgaaatcgcccgtcgcctggcaaaactggcaaatgcgccgtttatcaaagtcgaagcgaccaaattcaccgaagttggctatgttggtaaagaagtcgactctatcatccgtgatctgaccgatgccgcggttaaaatggtccgcctgcaatccatcgaacaaaaccgttatcgagcagaagaactggcagaagagcgtattctggatgtcttgatcccaccagcaaaaaataactggggacaaacggagacacaagttgagccatcagccgcacgccaggcattccgtaagaaactacgtgaaggtcaacttgatgataaagaaatcgaaattgatgttgctaccacacctgtgggcgtcgagatcatggcacctccgggtatggaagagatgacaaatcagttgcaatctatgttccagaaccttgccggtcagaaacacaaatctcgtaagctaaaaatcaaagatgctttcaagctactgatcgaagaagaagcctctaaactggttaacccggaagaattaaaacaacaggctattgattccgttgaacaacacggcattgtcttcattgatgaaatcgacaaaatctgcaaacgaggtcagacttcaggccctgatgtttcccgtgaaggtgttcagcgtgacctgttaccattggtggaaggttgtacggtatccactaaacacggcatggtaaaaacagaccacatcctgtttatcgcctcaggtgcattccaggttgccagtccttccgatctgatccctgaattacaagggcgtctgccgatccgagtggagttacaggcactcactacaaaagattttgagcgtattctgactgaaccgagtgcatccctgacggaacagtacaaagcattgatggaaacggaaggtatgatcatcagtttcacggatgatggcattagcaaaattgcagaatccgcatggcaggtaaatgaatcaaccgaaaatatcggggcccgtcgcctacatactgtgcttgagcggctgatagaagatatctctttcgaagccagcgaacgtcgtggtcaatcagttgatattgatgccgactatgttaaaaagcatctagatgaattggttgcagatgaagatctgagccgctttatcctataa

SEQ ID NO: 9035 - DNA, 531 bp, Photorhabdus luminescens
gtgactacaatcgtaagtgttcgccgtaatggccaagtcgtaatcggtggtgatggacaggcaacgatgggtaataccgtcatgaaaggcaatgtccgtaaagttcgccgcctctataatgacaaagtaatcgcgggttttgccggcggtacagcagacgcttttactctgtttgaactgtttgaacgtaaacttgaaatgcaccaagggcatctgaccaaagcagcggttgaacttgctaaagactggcgcactgatcgcatgttacgcaaactggaagctctgctggcagtcgcagatgaaaatacctccctaatcattacaggtaacggcgatgtcattcagccagaaaatgacctaattgccattggttccggtggcccattcgcccaatctgccgcacgggcaatgctggagaataccgatctcggcgccagacaaattgcagagaaagcgttaaccattgccggtgatatctgcatttataccaaccataatcacaacttcgaagaacttccttcaaaagcgtaa

SEQ ID NO: 9036 - DNA, 828 bp, Photorhabdus luminescens
gtggcacaacgagattatgtgagtcgcgggcgttcaaacacccgccgtaaaaataccgataagaaaaaataccaagcccaagggctgccaaaagcaacgctggccgtcgcggtagccttagtcgctatctttattggtggcctttactttattacccacaataaacagaaaagcgaaccagaaatactgccaaaacattctcaacaaaacaatgggttaccgccaaaaccagaagaacgctggcgctatatcaaagaattggaaaatcgccccgttggcgttgagacaccacgtgatccctcatccggggggcaaatcaattcacaaacccagttgaccgccgagcaacggcagttacttgaacaaatgcaggcggatatgcgccaaccgacgacttcgctgccagaagtgccatacaatggcgttcaagtgccgcgttcacaagtaatcatcaagccatcagcggagacacaaaaaccgctggaagcaagaccacaaccccagcctcaacaaacgttaccacaacaaccaatgcagactcagccagttcagccacaaactctaccaccggctgaaaccagtaaacctaagcccgtagaaaaggcacagcgtatgattttacaatgtggttcattccgcaatatggatcaagctgaatcagtacgtgccaatctggcatttgcgggtattgaaagccagatcacaacgggagacggctggcatcgtgttgttcttggtccctacagtaaaaacaccgcagaaaaaatgcgggaacgtctgaaaggcgctggcgtatcaggttgcattctccgtgttacagggggttga

SEQ ID NO: 9037 - DNA, 1029 bp, Photorhabdus luminescens
ttggagcagaaaaagaatggcacctccgcaacaatgaaagatgtcgctgaagtggctggcgtttctaccgcaacagtatcgagaacactcatgaatccagaaaaggtttcttcccagacccgacaaaaagtggaacaagctgtactggctgtgggttattatccaaataatttatcccgtaatcttaaacgcggtgagtcaaaaactattttagtgatagtgccaaatatcagcgatccctttttcactgatgtgatttgcggcattgaggagacagcggaacaacatggctatctggttttaatcggtgattgccaacatcagcaaaaacaggaacacgcgtttctcaacctgattgccaccaaacaaattgatggtctgttactactgggttcgaatatcccgtttgatgccagcaaagaagaacaaaaaaacctgccaccaatggtaatggcaaacgaattttcaccagagctagagctgccgactattcacattgataacctgaccgcggcattcaatgcgactcattatctacaaacattggggcataaacgcattgcctgcctctccggcccggaaaatataccgatttgccgctatcgccgtcagggatatatccaagcattgcgtcgctctggtgggacaattcgtgaagattatattgtccaaggtaactttacccatgaaagcggggcaaagctgactgaacagttgctctctctgctggatcctcctacagccatcttctgccacagcgatgtcatggcgattggcgtaatgtggcaggctaaaagaatgggcttaaaaataccggaagatttatcaatcattggttttgataacttaagtctcgccatgtacagcgatccgccgttgacaaccgttggacagcccagttatcaaattggtcacaaggccatgttactgttgctagatcaaatccagggtcacacaacttctggcgggtctcagttactggaatcggaattaattattcggcaaagcacctgttcgcctaaaagctag

SEQ ID NO: 9038 - DNA, 2220 bp, Photorhabdus luminescens
ttgatcgttcggaataattttatggctgttgttcaggttgctttacctgtccctcttacccgctcttttgactatctgctacccgcagagagtcaattacccgttgtaggagtgcgggtaatcgtcccttttggcaaacgtaaagcgattggtatcgtcactgggataactgaccacagtgatattccgatagaacaactgaaaaccatagaatccattctcgatactcactccttatttccagaaaatctttggcaattattgctctgggcatccgactattaccattaccccatcggtgaagtcctgttccatgcattaccggtgctgcttcgtcagggaaaacccgcggaatcaactccactatggcaatggcaagtcacgccaacaggcgctgaattaccgctggcgcaactgaaacgctcgccaaaacagcagcaagtactggcaaccctgcgccgtaaagcaatatatcgccatcagattacagaactggaactgagcgaaagtgctttccaatcgctcaaaaagaagtcacttatcggtttataccctgtgcaacctgaatctgagaactggcaaaatcacttccaaatcaccggcgaacgcctgaaattgaataccgaacaagccacagcagttggtgctatccgtgcagaagaccagcaattctctccctggttactggcgggcatcaccggatcaggtaaaacagaagtttatctcagtgtgttggaaaatattctggaacaaggtaaacaagcgctgatacttgtaccggaaattggcctgacaccacagaccatccgtcgcttccgtgaacgtttcaacgcaccggttgatgttcttcattcagccctgaatgacagtgaacgtctcgctgtatggctacgagcgcgacaaggtgagaacgcaattgtcatcggtacacgctcagccctatttacccctttcgcctgccttggcattatcattattgatgaagaacatgacagctcttataagcaacaggagggctggcgttatcatgcccgcgatttagcggtattcagagcaaaaaaagagaatatcccagtgataatgggctctgcgactccagcactggaaacactttacaatgtgcaacaaggcaaataccgcccgctaacattgtccaaacgggcaggttatgctcagccagcgactcagcatctgttggacttaaaaggcttaccactcaaaatcgggttatctcaaccactaataaaacgtattgaagaacatctacaagccaataatcaggtcatacttttccttaaccgccgcggttactcacctgccctactctgccatgaatgtggctggattgcagaatgccaacgctgtgaccattattacacgctgcatcaataccatcgccagttacgttgccatcattgtgatagcctgcgccccgttccccgtcagtgcccgcaatgcggttctactcatcttcaacctgttggccttggcacagaacagcttgaagacggtatttcagccctattccctaatgtacccgttacccgcattgacagggataccaccagccgcaaaggaacactagaacaacaactggctgacattcatgccggaaatgcccgtatactgattggcacccaaatgctggcaaaaggtcaccattttcctgatgtcacactggtcgcgttactcgatgttgatggtgccttgttttcagcagattttcgggcagcagaacgtttcgcacaactttatacacaggtttctggtcgggctggtcgggctggtaaacgaggagaagtggttcttcagactcatcatcctgaccatccattactgcaaattttgctcaataaaggctacgatgctttcgctattcaagctatggatgaacgcaaaagtgtatttttgccgccatttaccagccatattatcttgcggtcagaagatcacgataatcagcaagcacctgcttttttacaacaactacgcctactttttgaacaccaccctttgcgagatgataacttatggatcatgggcccggttcctgcattacagtcaaaaagaagtggtcgttatcgttggcaactattaattcaacatccatccagaactgttttacaaaaaatcatggcactggtttatccacagataacagccttaccgcaaacccgaaaagtgaaatggaatatcgatgttgatccaacagacagttag

SEQ ID NO: 9039 - DNA, 216 bp, Photorhabdus luminescens
atgaaaaaaggtattcatcctaaatatgaagaaattactgcaacctgctcttgcggtagtgtaatacaagtcagatctaccgctggtcacgctctgaacctggacgtatgcggccaatgccacccattctatacgggtaaacaacgtgatgttgctactggtggtcgtgttgatcgcttcaagaaacgtttcaacgttccaggtgtcagcaagtaa

SEQ ID NO: 9040 - DNA, 318 bp, Photorhabdus luminescens
atggctgagtggaacggtgaatatgtcagcccttatgctgaacatggcaaaaaaagcgaacaagtgaagaaaatcacagtctcaattccgttgaaagtgttgagaatcctcactgatgaacgcactcgtcgccaggtcaataacctgcgtcatgcaactaatagtgaattgttgtgtgaagcattcctgcatgcatttactgggcagccgctgcccgatgatgctgatttacgtaaagagcgtaatgatgaaatcccagaggaagccaaaaaaatcatgcgggaattaggtattgatcctgatacttgggaatattga

SEQ ID NO: 9041 - DNA, 1173 bp, Photorhabdus luminescens
gtggtagctgatatgacacgcaagccggcaacaatagcagttcgcaatgggctgaataatgatgaacagtatggttgtgttgttccgcctatatatctttccagcacatataactttactgattttaatcagccaaggacacatgattattcccgcaggagtaatccgggccgcgatatggtgcaacaggcattagctgagctggaggggggagcgggtgctatcatgaccagcagtggaatgtcagctattcacctgttatgcatggttttccttcaacctggcgatctgttggttgcgcctcatgactgttatggtggcagttaccgtttatttgacagccagactaaacgcggtgcttatgaagtggcctttgtcgatcagagtgatgaacaggcattaaagcaagtcttgtccaaaaaaccaaagttggtattgattgaaacacccagtaatcctttattgcgtattgtcgatattgctcatatatgccagctttcccatgaggtaggtgcgacagtcattgttgataacactttcctgagtcctgtactacagaagcctttggcgttgggggcagatctggttgtgcattcctgtactaaatatcttaatggacattctgatgtgattgccggagctattattgcaaaggatgaagaggttgcaacggagctcgcttggtgggcgaataatattggtgtaaccggtgcggcgtttgatagctacctgctgttgcgtggcatgcgcactttatcgccacgggtcctgttacagcaaaagaatgcattggaactcgtcaattatcttcaacagcaaccgttagtgaaaaaacttttttatcctgctttgaaagatcatcctgggcatgaaattgcttgtaagcaacaatttggttttggcgcaatgataagctttgagttcgatggtggtgaacaggcgatacgccgttttctgtctgagttgaagttatttactttggcggaatcactgggcggtgtggaaaccttaatttctcatacggctaccatgactcacgctggaatgtcagcacaggcaagggcggaagcggggattacggattcactattgcgtgtttctgtgggtattgaagatagtcaggatttaatcgctgatttggaaaatgcatttcaggcagtagtaaaggagtga

SEQ ID NO: 9042 - DNA, 2436 bp, Photorhabdus luminescens
atgggtgcactggtagttgcaacggcggaaaatgaccgccaattacataagtttggtggaagtagtctcgcggatgtgaaatgttatcaacgggtagccaagattatggctaattacagccaacccggtgatttaatggtggtatccgcggcaggcagcacgactaaccagttaattaattggcttaaacttagccagagcgaccgtatttctgctcatcaggtacagcaggttctgcgccgttatcagcaggatctgattagaggtttgctacctgagactgttgctgaagagttggtgaagcgttttattgccgatcttgaaaagctaagtgcattactggataaaccagttagtgatgtgacttatgcagaagtggtggggcacggagagatctggtctgcgcgtttgatgtcggctgtgcttgaagctcagggtattcctagcgcttgggtggatgcccgccagtttttacgcgcggaacgggcggctcagccgcaaattgatgttaccctttcccaaccattgctaaatcagttgctaacacaaaatctaaataaacgactggtggtgaccggttttatctccagtaatcatgatggagaaacagtgttattggggcgaaatggcagtgactactctgcaactcaggttggggctttggcaggggcgaggcgggtaaccatctggagtgatgttgctggtgtttacagtgctgatccgagaaaagtcaaagatgcctgtttgttaccactattacgtttggatgaagccagcgagcttgctcgtcttgccgcacccgtgttgcatgctcgtaccttacagcctgtttcctttagtgatattgatttgctattacgttgcagttaccagccggagcaaggatcaacgcgtattgaaagagttttggcttctggaactggcgcaaaaattgttactagtcacgatgatgtttgcctgattgagttgcatgtggccgctcatcataattttaaacagacatacaaagatattgatctgttgttaaagcgagaacaaattcgcccattggcgacaggcatccatctagactgtaatttgattcagctctgttacacctccgaagtggtgaatagtgcactgagtgtgctggaagatgctacgcttccggggaaactttcccttagagaaggtttggcgctggtggcactggttggcgctggtgtatgcaagaacccattacattgccaccgtttttatcagcaacttaaagatcagccggtagaatttatctggcatgcggaggatggcatcagccttgtcgctgtgttgcggactaatcagactgaacatgtgattcagggattgcatcagagtttgttccgtgctgaaaagcggattggtctgattttgtttggtaaaggaaatattggctctcgttggttggagttattcgctcgtgagcagaaaaacatttcggctcgcagtgattttgaatttgttctggccggtgtggcggatagtcgccggagtttactcgactatcaagggattgatgctagtcgagcgttagctttttttgatgacgaagcgacagaatatgatgttgatgaattatttctctggatgcgagcacatccttatgacgatttggtgattctggatgtgacggcaagtgaagaactcgctcgatgttacagcgattttgccagctatggtttccatgttatcagtgccaataaaattgcgggtgcttccagtagccgcgattatcgttttattcgtgatgcatttgccaaaacaggtcgccattggttttacaatgcaacagttggcgctggcttacctatcaatcataccgtgagggacttacgggagagtggtgataccattttgtccattagtggcattttctccggcacattatcttggctgtttctgcaatttgatggttcagtaccatttagtgatttagtcgaacaggcgtggcaacagggattgacagaacctgatccgcgtattgatttgtctggtcaggatgtgatgcgtaaattgattatccttgcccgtgaagcagggtatgagattgagccagagcaagtgcgtgttgagtcactggtgccgaaagaagcagaatcaggctctattgaacaattctttgataatagcggtgctatcaatgagcagatggtacagcgattagccgcggcgcaggaaatgggcatggtgctgcgttatgttgcccgttttaatgcgaacggtaaggcaaaggtgggtgttgaggcggtacgtcctgatcatccattggcgtctttgctaccgtgcgacaacgtgtttgcgattgagagccgttggtatcgtgataatccgttagtgatccgtgggccgggggcaggccgtgacgtgacagccggagcgattcagtctgatcttaaccgtttgtcacaactgctttaa

SEQ ID NO: 9043 - DNA, 885 bp, Photorhabdus luminescens
atgagtttttttcacgcaaatcagcgagaggcgctgaatcagaatctggctgaactggaaggacagatccgtgtttcatttgaattctttccaccgcgcacagccgagatggaaaaaaccctgtggaaatccattaaccgcctgagcaccctcaagcctaaatttgtttccgttacttatggtgctaactctggcgagcgtgatcgtacccatagcataatcaagggaataaaagagcaaactggccttgaagcggctccgcaccttacctgtattgatgccagccgtgatgaattgtgcgaaatcgcccgtgattattggaaaaatggtattcgccatattgtggctttacggggtgatttaccggaaaacagtgaaaaacccaaaatgtatgggtctgatctggttgagttacttaagaaagaagcggattttgatatttccgttgcggcttaccctgaagttcatcctgaagcaaaaagttctcaggctgatctgattagcctgaaacggaaaattgatgcgggtgcgaaccgtgctattacccaattcttcttcgatgtggaaagttacctgcgttttcgtgaccgctgtgtgactgccgggattgatgtggaaatcgtaccgggaattttgccggtatccaatttccgtcagcttaaacgttttgctgtaatgactaatgtgcgtattccaagttggatgaccagaatgtttgatgggctggatgatgatcctgaaagcgcaaatttagttggtgcttctatcgcaatggatatggtgaagattttaagccgcgaaggtgtgaaggattttcatttttataccttaaaccgcgcagaactgagctatgcaatttgtcatactttgggtgttcgtccttaa

SEQ ID NO: 9044 - DNA, 333 bp, Photorhabdus luminescens
atgatgatagcccaggcattgcgactccatcagaccactgttgaccgccatatcagttatggctggatgcgaaaaggtgagaaaaaaacagtcaaaacaacaggaagccggactcgcctgaatatattgggcgcgctcaacctgaatgccattggtcgtacggtgttccaagaatatcaaaccatcaatgatgacagcatttgccgttttttcaatgaaataagaaagtcttatcctgactaccatcaaaaaattcatcttattgtggatggggcgggttacaacaaagctcatcttgtgaaggagtgggcttatgttagcaatattgagtga

SEQ ID NO: 9045 - DNA, 156 bp, Photorhabdus luminescens
atgaatgaacaggttcgaaataaccgttatttcgcggatgaacatgaatttcgagacaaagtattcaaatttttcaccacaacgctaccggatatagcggactcgctgatgtctagaattaacgaccattttcaggtgctaaaaactgcatcttga

SEQ ID NO: 9046 - DNA, 960 bp, Photorhabdus luminescens
atgagggagtgtgatcgcattaaagcggtcctgctggcctctgaaggctggagttcagtgatgatcgctcaggccctgcgtcttcatgaaatgaccgttaaccgtcatatcagcgattaccttaatcaaggtaaacttaaatctgataatggggggtctgatagtttgctttctcaagaacaaactgattttttaatcaatcacttatctcaacatcttttccatcacacccatgaaatcgtggcctatgttgctcagctctggaatattacctttagcattcccggcatgaataaatggctacaccgtcagggtttttcttataaaaaaccttgtggcgtccctcataaattcgacgcagaaaaacagcgacaatttattgaatattatgagaatcttaaagtcacagcgaaagacgaacccatcctttttcttgatgctgttcacccgactcaaggcaccaaactcggttatggctggatgcgaaaaggcgagaaaaaaacagtcaaaacaacaggaagccggactcgcctgaatatattgggcgcgctcaacctgaatgccattggtcgtacggtgttccaggaatatcaaaccatcaatgactacaatatttgctgttttttcaatgaaataagaaagtcttatcctgactatcatcaaaaaattcatcttattgtggatggggcgggttacaacaaagctcatcttgttaaggagtgggcttatgttagcaatattgagttacattaccttcctccctatagcccaaatttaaacccaatagagcgattatggaaggtcatgaatgaacaggttcgaaataaccgttattttgcggataaacatgaatttcgagacaacgtcttcaaatttttcaccacaacgctaccggatatagcggactcgctgatgtctagaattaacgaccattttcaggtgctaaaaactgcatcttga

SEQ ID NO: 9047 - DNA, 951 bp, Photorhabdus luminescens
atgttggaaaaagttatgccaatttcatccattagcggccatacgctgcttagccaaacgcaagttcctcagcacgcagcagcttctcccctacttgaacagggtaaccgcttgttcgaacagtctgtccgacgtggccctctgcacttccagagctcggatctcaagcatttgatcaccgaattgcgccagttgcagagtgctcccaacagtgcgcaggcccaacgggtgcaggatgctatccagcattgggagagccaccaccctaaagaggtggcggctcgtagtacccgccttgccgagcttaaacaggctctggcagaacaaggcgctgtggtgcgtaccctccagccaaaggtgacgacgactagccctcaggccatgttaaagcaggctatgccagccttacagaagatggaaacttatgcatgtactgatggacttacattcgtcggaaagcacagctctcatcgtcggcaggttgaagagagattggattcatttgggggcagtcagagtcgcaaggctgctaacaaacaggccaatgatatgtccaatatggcggctattgccgctaaacgaggaaacgtcagtcttaaccaactgaaatctattgccgcctgtgtcgctcaagcccaagctggttgctgcacgacttttgcctactccgcggcagccgagctgatgaagcacaatcaagataaccagcagcgcattgaggtagtcgctcatcgtggtgccaaggggcatagccagacccactgctttgtagtggtcggtcgcgatcccaacagtgaactcagcaaacccgaaacttggggtaagcaagcacacgtcatcgatccttgggctgcgaccataggtggtaggttgcaaggcacgccgagtaatccaccgatcgctaacctgtggccgccgactgaatctgtgtttgacaaccataaagagtaa

SEQ ID NO: 9048 - DNA, 396 bp, Photorhabdus luminescens
atgtttaatgccttattatcggaactgtgccgacgccttgggcagaccgaagaatctctgcatgcggaagggctcgatctacctctcggcccttttagtttgcatatccgccaacgcgatgagttggtaactttgtttattccactaggtgatgtcgaaccttgttcgttggctacattggccgattggccatcattgcaactgagccgtagtggtgagggagagactctgctctggagccgtgaatggttggagaggctggatgctgagctgttgaccaacttggtcgagcggatgttacagcaagctagggaccttacggctacggcacctatcactgaaagccaagaatggccgccgttaagtattcaagggagttcgtggcataaagtttag

SEQ ID NO: 9049 - DNA, 582 bp, Photorhabdus luminescens
gtgaagaaaaataaacttgccatattgctatctcttgcttccttgtttggcgttaatgcctatgcccaaacagagcaaccgaaggaggtccctactgctcaaaatgccctggcagctcaacctcagctactgcctaaccctgagagtcctattcgggctgaagaagataaaaagctcgacattaaatctggggtagcttacgcccctgcacctccgctaaccaatatgtgggtctatgccgttggctcaacgaattgcggatgggaatacacttccaacttgccggtgacaaactgcaatcatggaggacagcagctccgcgccgccgttctggaagttggctacggctataactcctttgcttggatgaacggcggcgcactgccatactcgctgtactcttctacacctgtttgcatcacaaacgggtactacaattggccatgtgctgcgggccaaattgtggttggtttccttaaggaatacagcctcgatggctaccagaacggtatcttcagctaccagaacacttccgctaattggcctcgaaataccatgtcaacgcagattagcattctttga

SEQ ID NO: 9050 - DNA, 105 bp, Photorhabdus luminescens
atgtgctcaatagacaacgaaaaagaagccatttttcaccagacgaagcctaatttaagaaaaatcccttatcacttatccaaccctttttccgcagtaaaataa

SEQ ID NO: 9051 - DNA, 2637 bp, Photorhabdus luminescens
atgaaccaacaatattctgcaatgcgtagtaatgtcagcatgctaggtaagctgctcggagacacgatcaaagaagctttaggagaagatattctcgataaagttgagactatccgcaaattatccaaatcatcccgcgcaggtaatgaagcacaccgccagcagctattatctacattgcaaaacctatctaataatgaactgttaccagttgcccgtgctttcaatcaatttctcaacctgacaaacgtcgcagaacaatatcacagtatctccccgcatggtgaagctgccagcaaccccgttgcgttagcgaaattattcactcgcttaaaagaaaaaaatttcaataatggcgatctgaaaaaagcggtaaatgaactgtctattgaactggttctcaccgctcacccaactgaaatcgctcgtcgtacattgatccataaactggtagccgttaacacctgtctatcgcaactcgatcacgatgatctagcggattatgagcgtaacaacattatgcgccgtctgcgccagttagttgcccagtcatggcataccgatgaaatccgcaaaatccgtcctaccccaattgatgaagcgaaatgggggtttgctatggtggaaaacagcttgtgggagggtgtaccagcattcctgcgtgaattcaatgaacaactggaagagtcaattgattacagcctgccagttgaagcggtacctgtccgctttacttcttggatgggcggcgaccgggacggtaacccgaatgtcaccgctgaagtcactcgtcatgtattactgcttagccgctggaaagcagccgatctattcctaaaagatattcaggttctggtttctgagctctccatgtctgaatgcacaccagaagttcgtaaactagctgggggtgatgaaattctggaaccttaccgagaaattgctaaaaaattgcggacacaactcagcaatacattgacctatttggagaagcaactgaaaggagagcaagttctgccaccaactgatttgctggtggataacgaacagctttggcaaccactttacgcctgttatcagtcactaaaaacctgcgggatggaaatcattgccaacggtcaattattagatatcttacgccgtatccgttgtttcggcttatcgctggtacgcatcgatgtacgtcaagaaagcactcgccatacaactgccatttctgaactgacgcaatacctggaattaggtgactacgccagttggtcagaagaagaaaaacaggctttcctactgtatgaattacactccaaacgtccattgattccacacaactggcagccgagcgctgaaacgcaagaagttttcgcaacctgtaaagtgattgccgagtcaccgcaagacgctatcgccgcttacgttatctcaatggctaaagcaccttctgacgtattagcagttcacttgctactgaaagaagccggttgtccgttcactttacccgttgccccattgttcgaaacccttgatgacctgaataatgctgaaaatatcattcagcaattaatgaatattcaatggtatcgcgaactgattcatgacaaacagatggtgatgattggttattctgactcagcaaaagatgccggagtgatggctgcggcatgggcacaataccgagcacaggatgccttgatcaatgtttgtgaaaaagagggtattacgctgaccttattccatggtcgcggcggtactatcggccgtggcggggcgccagcacatgcagcgctgctttcccaaccaccgggaagcctgaaaggtggcctacgtgtgaccgagcaaggcgaaatgatccgctttaaattcggtctgccacaggtcactatcagtagcttagccttgtatgccagtgcgattctggaagcaaacctcctaccaccaccggaacctaaaccagaatggcatcaggtgatggataccctatctgatgtttcctgtaagatgtatcgcgattatgtgcgtgaacagcccgattttgtaccttatttccgcgcggcaacaccagaacaggaattagccaaactgcctttaggttctcgcccagccaaacgtcatccggcgggtggtgtggaaagtttacgcgctatcccgtggattttcgcctggacacaaaatcgtctaatgttaccagcctggttaggtgcaggtgccgcgctacaacaagttgtaaatgatgggaaacaggatgtactagcagaaatgtgccgtgattggccttttttcaccactcggattggtatgttggaaatggtcttcgccaaagctgatttgtggttggcagaatattatgatcatcgtctggtagataagaacttatggccgctaggtcagaaactgcgcaagcaactctccgcggatattaagacggtattagccatttccaaagatgaacacctaatggcagatttaccgtggattgcagaatcaatcgccctgcgtaatgtttacactgatccattaaacgtcctacaggtagaactattactccgttcccgtcaacagcaatattctgatccacaggttgaacaagcgttgatggtcaccattgccggtatcgcagcaggaatgcgaaatacaggttag

SEQ ID NO: 9052 - DNA, 1158 bp, Photorhabdus luminescens
gtgaatattaaattacctccatttattgagctatttcggcaattaatcgcgactccatctatcagtgccaccgatatcagtattgaccaaagtaacgagtctctcatcaacctactggcaagttggttgaaagaaattggtttcgaaattgagatacagcccgtccccgaaaccctcggaaaatacaatctactagctacattgggacgtggcccaggtggattactattgtgtggacacactgataccgtacccttcgacgaaggtctctggacgaaagatcctttcaccctgacagagcgcgataacaaactgtacggtttaggtacagcagacatgaaaggctttttcgcctttattattgatgcgttgcgggacattgatgtcagcaaaataacccgtccgctgtacattctggcaaccgcagatgaagagacgacaatggcgggagcccgctattttgccgcaagtaccactatccgcccagatttcgctattattggtgaacccacttcattgcatcctatctgtgcacacaaaggacatttatcaaacgctatccgcattgttggccaatccgggcactccagtgatccagatcgtggtataaatgccattgacttgatgcacgaatctattggtcacctgattgaactacgcaatacattaaaagagcattacaacaacccggcgtttaccattccatacccaaccatgaacttcggctatattcatggaggtgacgcagtaaaccgtatttgtgcccattgtgaattacatatggatattcgcccattaccgggactaacgctacaggatctgaacggactgctaaatgaagcgctagaaccaatgaagcaacgttggcctggccgcttaactatcgatgaattacattcccctattcccggttatgaatgtccaaccgatcacaaaatggttgacgtgattgaaaaactgctagggcgcaaagctgaaacggtcaattactgtaccgaagcacccttcattcagaaagtatgcccaactttagtccttggcccgggctctattgaacaagcacatcaaccggatgagttcattgatatgtcatttattggacctaccagaaagataatttcccagttaatagatcatttttgtctaagcaataattaa

SEQ ID NO: 9053 - DNA, 1005 bp, Photorhabdus luminescens
atgttgaatacgctggttgttggtgcaagtggttacaccggagcagaactggcagcatatctgcatcgtcatccgcatatgaatctgattaggctcatggtttctgctcagagcgttgatgcagataaatgcttctcagatttacatccacagtataaaggcattgttgatctaccgctgcaaccgctgactgatattattaatgctgctaaagggattgatgtggttttccttgccaccgcccatgaagttagtcatgacattgcgccgctatttctggcagcaggttgcactgtatttgatctctccggtgcctaccgcgtacaaaatgctcagatttatcaacaatactacggattcaaacataagcatactgaatggttagcacaagcagtatatggacttgccgaatggcaggctgaaaacatcaaacaggcccaattagttgctgtaccgggatgttacccaacagtttctcaactctgcctgaaaccgctgttggaaaatagtttgctggatatcagctattggccggtgattaatgcgactagtggtgtaagtggagcaggccggaaagccagtatgaccaacagtttctgcgaaatcagtttgcaaccttatggaatatttacccatcgtcatcaaccggagattgaggaacatctgggaaccagagtggtttttactccacatcttggcaatttcgcccggggtattcttgccacaattacctgtaagttgaagccgggtgttaccgcagaacagatagatgaggtgtatcgtcaagcatacaaagataagccattggtaaggctttacagcaaaggagtaccagcattgaaatccgttgttgggttaccgttctgtgatattggttttgttgtacagggtgaccatctgattgttgtaggtactgaggataatcttttgaagggcgcggcagctcaggcagttcagtgtatgaatatacgttttgggtttgaagaaactcaggcattactttaa

SEQ ID NO: 9054 - DNA, 774 bp, Photorhabdus luminescens
atggaacctttagtcataaagttaggtggcgtgttactggacaatgaagaagcattggaacgtgtgtttactgcattgcaggaatatcggcaaacacatgaacgccagttggttgttgttcatggggggggatatctggtggatgagctgatggagaagttgcagctaccgatagtgaaggaacaaggattacgagtaacacccgctgatcagattgggattatcaccggcgcattggctggtatcgccaataagaccttgttgtcgtgggcgactaaatatcaacttgcatcagttggattatatttaggagatggtaatgtggtcacggtttcccaactgagtgaagagttggggcatgtgggaaaagcgatgccgggcgatgctaagttgctgaaaacgttattggatgcgggttatatgcccattatcagctcgattggggtaacggataaaggggagctgatgaatgtgaatgccgatcaagcagcaacggcgatagctcagacgctaggtgctgatttggtattgctctctgatgttagcggtattttggatggtaaagggcagaaaatccctgacataaatgttgagaaagcagaacagcttattgctcatggcatcattactgacggtatgattgtgaaggtgaatgccgctctagatgcagccaggacattagatcgtccggtagatatcgccagttggcgtcatgcagatcaactgaccgatctatttaacggtgttcccgtcggtactcgtattctggcttaa

SEQ ID NO: 9055 - DNA, 1215 bp, Photorhabdus luminescens
atgcatactaaagatatcaaaaaaatcgttcttgcctattctggtggtctggatacttctgccattattccttggctgaaggagcattatggcaactgtgaagttgttgcgtttgttgctgatgtggggcaaagccgtgaagatttggaaggcgtggagcagaaagctttgcgttctggcgcgtcagaatgtcacgttgtggatctgcgtgaggaattcattaaagattatgtttatccggtactgaaaaccggtgctctgtatgaaggtagctatttgttgggcacttcaatggcacgccccattattgctaaagcacaggttgaattggcactgaaagtaggagcagatgcacttgctcatggtgcaacaggtaagggtaacgatcaggttcggtttgaaagcacttatacggcattagcccctcagctaaaagtagttgcaccgtggagagagtgggatttacgttcccgtgaagcgttgctggattatctgaaagcacgagatattccaaccactgcaacattggagaaaatttacagccgtgatgagaatgcgtggcatatctctaccgaaggtggcgtactggaaagcacttggaatgcatccaataaagattgttgggtgtggacagtcgatccagaagaggcaccagatgaagctgaattggttagtgtcatgattgagaaaggcgaggttgttggggtcaacggcaaagtaatgtctccatatcaatgccttgaagcgctgaatattctgggagtaaaacatggtatcggtcgtatcgatatcgtggaaaaccggctggtgggaatgaaatctcgtggttgttatgaaacaccgggaggaaccatcatgatggctgcgttgcgtggtgttgaacaactggttctggaccgcgatagctttaaatggcgtcagcagcttgggctagaaatgtcttatgtcgtttatgacggacgttggtttgccccgctacgtcgatctattcaggcagcggctgagacgttggctgcggatgtcagcggtgaagtagtactgaaactctataaagggcaggtaacagcgatccagaaaagatcaacaaatagcctttattctgaagcgtttgcaacgtttggtgaagatgaggtttacgatcacagccatgcagcaggatttatccgtctgtattctctcccttcgcgcattcgggcattaaatagtaaagagtaa

SEQ ID NO: 9056 - DNA, 1380 bp, Photorhabdus luminescens
atggcactctggggcgggcgtttcagtcagaaagcagatcaacggttcaaacaatttaacgattcacttcgctttgattaccggttagcggaacaggatattaccggttcagttgcatggtcgaaagcgttgataacggttggtgtgttgaccgttgaagaacaacaaagattggagctggcattaaatgaattgctgaatgaggttcaggctaacccacaagccatcttgcaaagtgatgcagaagatatccatagttgggtagaagggcagttgatcagtaaagttggtgggctgggtaagaagcttcacactggtcgtagccgtaacgatcaggtggcaacagatcttaaactttggtgtaaagaatacatttcacatctccatcaggcaattgtggaattacaacaggtattggtgatcaccgcagagaagaatcaggatacggtgatgccgggttatacccatctgcaaagagcgcagcctattacatttgctcactggtgcttggcatatgtagaaatgttggtccgtgatgaaaatcggttacaggatactttaaaacggctgaatactagcccgcttgggtgcggtgcattggctggaaccgcttatgatattgaccgcgaacaactagcatcatggctaggttttgcttcagcgacgcgtaacagcctagatagtgtttcagatcgtgaccatgtattggaactgctatctaatgccagcattagtatgatccatctttcccgttttgcggaagatctcattttctttaatagcggtgaagcaggatttattgaactgtcagatcgagtcacttccggttcttctctgatgccacagaagaaaaacccggatgcactggagttaatccgtggtaaatgtggccgagtgcagggggcattaaccggtatgatgatgaccttgaaaggtctgccgctggcttataataaagatatgcaggaggataaagaagggttgtttgatgcgctggacatttggctggattgtttgcatatggctgcgttggtgttagacggtattcaggtcaggcgttcacgttgcgcagaagcagctaaacagggttatgctaacgcgactgaattagctgactatttggttgcaaaaggggttccattccgtgaagcccaccatattgttggggaaattgtgatgatggcgcttactcagggtaaggctctggaagcgttgccattgacagagttgcagaagttcagcagtgcaattattgaagatgtatatgatattttgtctctgcaatcttgcttggacaaacgccttgcaaaaggtggcgtatcgccaaaacaagttatgaaagcgattgtagaggctaaacagaggctaaaattaagttag

SEQ ID NO: 9057 - DNA, 906 bp, Photorhabdus luminescens
atgaatatccgcgatctggaatatcttgtggcgcttgcggagcatcggcactttcgccatgctgctgattcttgccacgttagccagcctacgttaagcgggcaaattcgtaagcttgaggataatctgggggtcatgttattagagcgcaccagccgtaaagttttgtttacgcagcaagggatgttattagtagaacaagccagaacagttctccgtgaggtgaggattttgcaggaaatggcatcacttcaaggggaaaatatgtctggtcctctgcatattggcttgatcccgacagttggtccatatctgttgcctcatattatccctaggcttcatagtttgtttcctaagttggaaatgtatctgtatgaagcccagactcaaagtctgttagcccagttggatagtggcaaattggactgtgcgattctggcaatggttaaggagacaagagatttcattgaagtgccattgtttgaagaacccatgaaactagctatctatgatgaccatccttgggcggagcgtaaaaaaatcgctatggatgaattggcaggtgaaaaattgttgatgctagaagatggtcattgcttgcgtgatcaggcaatggggttctgttttcaggctggtgcgaaggaagatacccattttcgtgcaaccagtttggaaaccctgcgtaatatggttgctgccggtagtggaataaccttattgcctgatttggcagtgccacaagagaaaaaacgtgatggcgtctgctatctggagtgtaacagccctgaacctaagcggtctgttgttttgatttatcgtcctggttcacctctgcgtggtcgctatgagcaacttgcagaggctattagagctaaaatgggcacttattacgggcaatcaaaatag

SEQ ID NO: 9058 - DNA, 1398 bp, Photorhabdus luminescens
atgcaacatattcattttgacgccattgtcattggttctggtcccggtggagaaggagcagcaatgggattggtgaaacagggtaaaagcgttgctgttattgaacgctataataatgtcggcggtggttgtactcattggggtaccatcccgtctaaagccctccgccacgccgtcagtcgtattattgaatttaaccaaaatcctctgtacagtgataattcccgcgttcttcgctcttcatttgctgaaatcctgcgccgtgctgaaatggtaattaatcagcaaactagaatgcgtcaaggattttacgaacgtaatgggtgtcgtatgttttccggagaagcaacattcattgatgaccaccgggtgagtgtgcgctatgctgacgataaccacgatattttaagcgcagataagattattatcgcaactggttctcgcccatattgtccgccagatgtcgatttcactcactcccgtatttataacagcgattccattctgaaactggatcatgagccacggcatgtcattatttacggtgccggagtgattggttgcgaatatgcttcaatcttccgtggattaggcgtaaaagttgatttgattaacactcgtaatcacttactcgccttccttgatcaagagatgtcagatgcactttcttaccatttctggaatagcggtatagtgatccgccacaatgaagaatattctaaaattgaaggtgttgatgatggtgttatcgttcaccttaaatccggtaaaaaagtcaaagctgactgtctgctttatgctaatggtcgaacaggtaatacggatactttagggctaaaaaacgttggtctagaagcagatagccgcggtttactgaaagttaataagatctatcaaaccagcaacgaaaatatctacgctgtaggagatgttatcggctatccaagcttggcctcagctgcttatgatcaaggccgaattgccgcccaagcgatgacgaaaggaaacgccgaagttcatctgattgaagatatcccaacgggtatctataccattcctgaaattagctctgtaggtaaaaccgaacagcaattaacagcaatgaaagtgccttatgaagttggacgcgcacaatttaaacatcttgcacgcgcacaaattgcggggatgaacgtaggaagcctgaaaatactgttccacagagaaacaaaagagattcttggcattcattgtttcggggaacgtgcggctgaaattattcatatcggccaggcaattatggaacagaaaggtgaaagtaatactatcgaatatttcgtcaatactactttcaactatccaactatggctgaagcctaccgtgtcgcggctttaaacggccttaaccggctattttga

SEQ ID NO: 9059 - DNA, 549 bp, Photorhabdus luminescens
gtgagtaacattatcggcatcagagcgaaacagaaagaaaaaactcgtcgttcactgattgaagcggctttcagccagttgagtgccgaaaggagttttaccagccttagcttgcgtgaagtcgcccgtgaagcaggtattgcacccacttcattttatcgtcatttccgcgatgttgatgagcttgggctcactatggtggatgaaagtggtttgatgttacgtcagttaatgaggcaagcccggcaacgtattgctaaaggtggcagtgtcatccgcacgtctgtttcaacttttatggaatttatcggtaataacccaaatgcattccgattattattacgtgaacgttcagggacttctgctgaatttcgtgccgctgtcgcacgggaaatccaacattttattgctgagctggcagactatttagaacaggaaagctgtatgccgaggcattttactgaagtgcaggcagaggcaatggtaacaatagtattcagtgcaggtgcagaagcactggatattgatttggagaaaagacagcgttag

SEQ ID NO: 9060 - DNA, 372 bp, Photorhabdus luminescens
atggaacaatatcgccaggacaaaagtacattgttactcgcttttattgtcggattagcaacgaatggaacattttcagcagtttttagctcagttgtttctttttcagttttcccattgataacattgattttatcagtttattgtatccatcagcgctatttgaattactcaatgccagatgggatgcctaagttggttgtcgcctgtttcctcttaggattatttagttatagtgcgattatcagggttgaataccctgaaattggctctaattttctgcccgcagtaatgggtaccgtactggtattttggatttacagaaaggtaaaaattcgtaaaaaccaggcaattacagaaaattgtcattaa

SEQ ID NO: 9061 - DNA, 1101 bp, Photorhabdus luminescens
atgcaaaatctcctgccaacggaaagctatgaacagcaactgacggagaaagtcagccgtttaaaaaacatgatggcacctttccagcccccgaggccagaggttttccgctcaccgctatctcattacagaatgcgagcagaatttcgaatctggcatgagcaggatgatttgtaccatattatgttcgatcaacagacgaaacaacgtattcgccttgttcaattccctgtcgccagtaagttaatcaacaaaatgatggtagtattaattgactccattagatctgaacagatcttgtgtcataagctatttcaaattgattatctgtctacttgcagtaataaaatccttgtttctctgctttatcacaaaaaattgggggaagaatggacacaacaagcattaagactgcgtgaagcgttaagacataaagggtttgacgttgagttaattggcagagccgctaaaaccaaaatcacattggatcatgattatattgatgaggttttacctgtcgcaggccgaaaaatgatttatcgccaggtggaaaacagcttcacccaaccaaatgctagcgtcaatattcatatgcttgaatgggcaattaatattaccaaagattcaaaaggtgatttacttgagctctattgtggtaatggcaatttctctctggcactagctcaaaattttgaacgagtattggcaacagaaattgccaagccatccgttgcggccgctcaatacaacattacagccaatggtattgataatgtacaaattatccgaatgtcagcagaggaattcacccaagcaatgaatggtgaacgcgaatttaatcgccttcagggaataaatttaaaaagctatcaatgtgaaactatctttgtcgatccaccacgtagcggccttgatgaaaaaacacttgagatggtccgggcatatccacggattctttatatttcctgtaacccggaaaccctttgccataatctggagacattaacccaaacgcataaaattagccatctggctctgtttgatcagtttccttatactcatcatatggaatgcggcgtgcttctggaaaaattaaactga

SEQ ID NO: 9062 - DNA, 1860 bp, Photorhabdus luminescens
atgataaataaaaagcggttattattatccactgtttcaattatggtgatttctggctggaatcaagcttctgctgcggtggagtcgcaggattcattggttgtgacggcgagtcgttttaaacagccgatatcaagcatattggctccttatactgttgtaacacgagatgaaattgatcgttggcagtcaaatagtgtagccgatattttgcgtcgtttacccggtgttgatattgcgcggcatggagggattggacaattaagctctttgtttatacgtggtactcatgctagtcatgtattagtactgatggatggaatacgtttgaatcaagcgggcatcagtggctcctctgatttaagccaaatacctgtatcattggttcagaaaattgagtatatccgtggaccacgctccgctgtttatggttctgatgctattggtggtgttattaatatcatcactaccagagagaagctaggaaccagccttaatgtaggtatcggctcacatggctatcaaacttatgatggtgcaactcaacaaacgctagctgaaaatacagttctgacagcagcagctaactatacttataccaaaggatacgatgttgttgctgatggtaataccggtggttttagacaacctgatcgtgacggcttcatgagcaaaatgctttggttaggagtcgatcaaaaatttaatgagcaagtcagtggatttgttcgagcttatggctataacaatagaacatcttatgatgcggatattaattggagttatccatatgccagaccggatactcgtgaactttatagtcgccactatgacatgggagtcagatttaaccaagggatctactcatcccagttaattacaagttatagtcatacaaaagactataactttgatcctcaatatggacgctatgataagtctgctagccttaatgattctgaacaatataacttgcaatgggggaatacttttcagctatatcagggcatagtcagtaccggtgtggatttccaaaaacaatcgatagaagctggaaccagttatattccgaagagtaaaacggtacgtaatacaggaatgtatctgacagcacagcaacaactgaaagattttattttagaaggtgcaattcgttcagataaacattcagaagctggctggaatacaacatggcaagccagtttaggttgggagtttattaaagattatcgcttgatagcctcttatggtacggcatttaaggctccaacgctcagccagatgtacggttttggtggtaatcatgatttgaaaccggaagaaagtaaacaatgggaaggcggtatcgaaggcgtcactggccagctaacttggcgtatgactgtatatcgcaatgagattgagcaattgatcgattatgcgaatagccgctactacaatattggtaaagcgaaaattaaaggtgttgagtggactggcttaatagacactggcatgtttcagcatcaattgacaatacagtatattgacccccgtaatagtgaaactaatgaaattttagttcgtcgtgcgaagcagcaagtgaaatatcaacttgactggcagttatatgattttgattgggggttaacttatcaatatctagggcggcgttatgacaaggatttcagtacatccccggctaagcgtgtgaaattaggtggcgtcagcttttgggatttaacagtttcatatccagtcacttcttatctgacaattcgtgctagaatagccaacctgcttgataaagattacgagacagtttatggctatcgcattccaggacgtgaatactacctcactgggagctataacttctga

SEQ ID NO: 9063 - DNA, 864 bp, Photorhabdus luminescens
atggctatcgcattccaggacgtgaatactacctcactgggagctataacttctgatttaaataaagccgcacgcccaacagttttagtgtttgattctggggtaggcggcttatctatttaccaagagatccgacaattattaccagatctccattatatatatgtttttgataacgaagcattcccttatggtgaaaaatcggaagagtttattgttgaacgagtcgttcaaattgttggtgctattcagcaaaaacaccctctgacaatagtggttattgcatgtaacactgctagtacagtcagcttgccagctctgcgtgagcggttcagctttccggttgttggtgtggttccagcgataaaacctgctgcaaagttaactcgtaatggtgtcgttggattattggcgactagagcaacagttaatcgttcctatacaaaagaacttatcgaaaagtttgcgacaggttgcaggattgaatctataggttctgctgaattagtagaattagctgaaattaaactgcatggtggtaaggtctctcccgatattttaaaaaagatactgaaaccgtggcttggaatgaaaaaaccacctgatacagtggtattgggttgtacccattttccattattagcagaagaattagttcagatattacctgatggcacgcgtttaattgattctggtgttgctattgctcgaagaacggcttggttggttaaacatcagaataatcttgtttgcacttcagcagatagtcttgcttactgtatgaaagtgaatactgatactgatgcattaatccccgttttgcaggagtatggattttcaaaactagaaaaattgataacttaa

SEQ ID NO: 9064 - DNA, 1026 bp, Photorhabdus luminescens
atgctttctcttaaagagtttaatacctttgggttatcagcctatgctaaacgtttagatatagctgaatctgccgagtccttattagctttatggcaaaaagccaaaagcgaaaaacaacctgtattactgcttggtggaggtagtaatgtcttatttactacaaattttgaaggaactgtgattctgaatagaattatggggattcaacagcgggagacagatgaatcatggcatttacatgtaggggcgggagaaaattggcacgaattagtctgtcattctcttaaaaatcaaatctatggattagagaatctggctttaattcctggttgctctggcgcagcaccaattcaaaatattggtgcatatggtattgaatttagagatgtgtgtgaatatgtagatgttcttaatctagaaactggggaacaaacgcgtcttagtgttggtgaatgtcagtttagatatcgtgatagtattttcaagcataaatataaagcaaatcattctattatttctgtaggattattgttgaagaagaattggcagccaatattgaactacggtaatttaactaggctatcgaaagataatgtaactcctcagcagatttttgattcagtatgtgcaatgcgcaccagtaaattacctgatcctgcaataacaggaaacgcgggcagtttcttcaaaaacccaattgtcagtgcggaagttgcggcaaaaatcaaagaaaattaccctgatagcccccaatattcttacacgaatgggatgtttaaattagcggcagcttggctcattgaacgttgtaatttaaaaggttatcgcattggaggtgcatctgtgcatcttagacaagctctagtactgataaatcaggaaaatgctacaggtaaggatgtagttttattggctgcttacattcgccggcaagtgataagtaagtttggtgtattacttgaacctgaggttcgttttattggttctaaaggcgaaattgatgctgtggaatgtatttcatga

SEQ ID NO: 9065 - DNA, 960 bp, Photorhabdus luminescens
atgaaagatataaccgtgccattacagttgattaagattttgtctgacggtgaagttcattccggtcaacagttgggacaatatttagggatgagtagggctggaattaataaacatatacagacaattcgtgagtggggaattgagctagaaacaactcttggtaaggggtatagccttatggcacctatgcagttacttgatgagtctactattttgcaatacttacctcaggatcgtataactgttttgccagttattgattcgactaatcagtatttgttggaacgtttatctgaattgaaatcaggggatgcttgtgttgcagagtaccagtatgctggcagagggcggcgtggaaggaaatgggtttcgccctttggtaaaaatctttatttatctatgtattggcgccttgaacaaggacctgctgctgcaattggattgagtttggttgttggcattgttattgctgaagtattgcatcgatttggcgctggtagaattagggtaaaatggccaaatgatttatatcttgatgataagaaattagcgggaattttagttgaactaataggaaagactggtgatgctgctcaggttgtaataggtgcgggtataaatatttcgatggatcataaggacgaagaacctattaatcagcaatggattaatttgttgcaggcaggaattcaagttgatcgtaataaattggctgtagaaataatacttgatctaaggaaagctctaattcagtttgaaaataaaggcttgtcttcatttgtttctcggtggtttgagttagataattttatggataggccggtgaaattaattattggtagtcaggaagtgtatggtatagctaggggtattaatcagcaaggtgctttgttacttgatcagaatggtgtcataaccccatatattggcggggagatttctttaagaggttgttaa

SEQ ID NO: 9066 - DNA, 951 bp, Photorhabdus luminescens
atgaataaaaaagaaccttttttggctactccatatttgcaattcaatcgtgaacaatgggcaaccttacgtgattcagttccactgacattaacaaaagaagaattaattgatttaaaaggaattaatgaagaaatttctttagaagaagttgttgagatttaccttcctttatctcgcttactcaatttttatattagttcaaatttacgtcgtcaagcagtgctggaacaatttttaggtactgatggacaaaaagtcccttatgtcataggaattgctggcagtgttgctgttggtaaaagcactactgcacgtctattacaagctctgctgagtcgttggcctgaacacagaagcgtagaattaattactacagatggttttctacattctaacagcgtgctgaatgaacgtggactgatgaaaaagaaagggttcccacagtcatatgatatgcatagcttagtgaaatttgtatctgatattaaatcgggctctaaacaagtatccgcaccagtatactctcatcttacctatgatatcgtaccaaatgagcaaaaattcattaaacaaccagacattttgattctagagggtttgaatgtattacaaagcggtatggattatccccatgatccacaccatgtatttgtctctgattttgtcgacttttctatctacgtcgatgcaccagaaaaattactcaaaagttggtatatcagtcgtttcttaaaattccgccaaggtgccttttccgatccagattcttatttccacagttactccaaactatcagaagaagaagccataaatactgcatccgatatctggcaagagatcaatggactgaatttgcgacaaaatattttaccaactcgagaacgcgcaagcctaatcatgacaaaaggtactaatcacactattgaaagcgtaaggctacgtaagtaa

SEQ ID NO: 9067 - DNA, 180 bp, Photorhabdus luminescens
ttggtagagcacacccttggtaagggtgaggccggcagttcgaatctgcctatcagcaccacttccttaatgtccttgtctcccgattttattcctgtaagcgatattcaacgagcaattgcttggttgatgtggtggaaccaccgattccgtgtcttagagggacaatctaatgtctaa

SEQ ID NO: 9068 - DNA, 1185 bp, Photorhabdus luminescens
atgtctaaagaaaagtttgaacgtacaaaaccgcacgttaacgttggtactatcggccacgttgaccacggtaaaactaccctgactgctgctattactactgtactggctaaaacctacggtggtaatgctcgtgcattcgaccaaatcgataacgcaccagaagaaaaagcgcgtggtatcaccatctctacttctcacgtagaatacgatactccaagccgccactatgcgcacgttgactgcccaggccacgccgactacgtgaaaaacatgatcaccggtgcggctcagatggacggcgcaatcctggtagttgccgcgactgacggtccaatgccacagacgcgtgagcacatcctgttaggccgtcaggtaggcgttccttacatcatcgtgttcctgaacaaatgtgacatggtagacgacgaagagctgctggaactggttgagatggaagtgcgtgagctgctgtctcagtacgatttcccaggcgacgacacgccagtcatccgtggttctgctctgaaagcgctggaaggtgatgcagagtgggaagccaaaatcatcgaactggcagaggccctggatagctacattccagagccagagcgtgctattgaccagccattcctgctgccaatcgaagacgtattctctatttcaggccgtggtactgtagttaccggtcgtgtagagcgcggtatcgttaaagtgggtgaagaagttgaaatcgtgggtatcaaagacacgactaaaaccacttgtactggcgtagaaatgttccgcaaactgctggacgaaggccgtgcaggtgagaacgtcggtgttctgctgcgtggtaccaagcgtgacgaaatcgaacgtggtcaggtactggcgaaaccgggttcaatcaagccacacaccactttcgaatcagaagtttatattctgagcaaagacgaaggtggccgtcatacgccattcttcaaaggctaccgtccacagttctacttccgtacaactgacgtgaccggtaccattgaactgccagaaggcgtggaaatggtgatgccaggtgataacattcagatgaaagttaccctgattgccccaatcgcaatggaccagggtctgcgcttcgctatccgtgaaggtggccgtacagtaggtgctggtgttgttgctaaagttatcgcttaa

SEQ ID NO: 9069 - DNA, 195 bp, Photorhabdus luminescens
atgtatgtctgcctatgtaatgcggtgagtgacaaaacaatacgtaatgcggtgcgtcaacatcatattcactctattaaagaactaaaatgtattgtgcctgtaggccgtgattgtggcaaatgcatacgccaagctagagagctaattaatgaggagattgcacagttacccaagatagataacgttgcttga

SEQ ID NO: 9070 - DNA, 477 bp, Photorhabdus luminescens
atgaaaggtgataaaaaaatgattgctcatttgaacaaacttcttggaaatgagcttgttgcaattaatcagtattttctgcacgcccgaatgttcaaaaactggggtcttactcgccttaatgataaggaatatcatgaatctatcgatgaaatgaagcacgccgataggtacattgaacgtatcctttttcttgaagggattcctaatttgcaggatctaggaaaacttaacatcggagaagatatcgaagaaatgctcaaatctgacttgcagctcgaattgcaaggagctaaagatttgaaagaagcgattgcttatgctgattcgattcatgactatgttagccgtgatttaatgattgatattctagatgaagaagaaaagcatattgattggttggaaactcaatttgaattaattgaacgtatggggattcaaaattacactcaatcacagattcttgaaggagaatag

SEQ ID NO: 9071 - DNA, 312 bp, Photorhabdus luminescens
atgcagaaccaaagaatccgtattcgcctgaaagcatttgatcatcgtttgatcgatcaatcaactgcggaaattgtcgagaccgctaagcgtactggtgcgcaggttcgtggtccgatcccgctgccgactcgtaaagagcgttttaccgttctaatttctccgcatgttaataaagatgcgcgtgatcagtacgaaattcgcactcataagcgtctggttgacatcgttgagccaaccgagaaaaccgttgatgctctgatgcgtctggatctggctgccggtgtagacgtgcagatcagcctgggttaa

SEQ ID NO: 9072 - DNA, 630 bp, Photorhabdus luminescens
atgattggtttagtcggtaaaaaagtgggtatgactcgtatcttcactgaagatggcgtttcgatccctgtaactgttatcgaaattgaagataaccgtgttactcaggttaaagagctagataacgatggttatcgtgcaattcaggttactactggtagcaaaaaagctagccgtgtaaataaacctgaagcgggtcatttcgctaaagctggcgttgaagctggccgtatcctgcgtgaattccgcctgtctgaaggcgaagaatatgctgtaggtcaaagcattagcgttgagattttcgctgacgttaagaaagtcgacgttactggtacatctaaaggtaaaggttttgctggtactgttaagcgctggaacttccgtacccaagatgctagccacggtaactctttgtctcatcgtgttccgggttctatcggtcagaaccaaactccgggcaaggtatttaaaggcaagaaaatggcaggccaactgggtaatgaacgcgtaactgttcaaagcctggatgtagtacgtgttgacgctgagcgcaacctgctgctggtcaaaggtgctgttccaggctcaactggtggcaacctgatcgtaaaaccggctgtcaaggcgtaa

SEQ ID NO: 9073 - DNA, 606 bp, Photorhabdus luminescens
atggaattggtaatgaaagacgcgcaaggcgcgctgactgtttccgaaactaccttcgggcgtgatttcaatgaagcgcttgtgcatcaagtagttgttgcttacgcagctggtgcacgtcaaggtactcgtgctcagaaaacccgtgctgaagtttctggttcaggtaaaaaaccatggcgtcagaaaggcactggccgtgcacgttctggttctattaagagcccaatttggcgctctggtggcgtaacttttgcagctaagccacaggaccacagtcaaaaagttaataagaaaatgtaccgtggtgctttaaaaagcatcctgtctgaattggtacgtcaagatcgtttgatcgttgtcgagaagttttctgtagaagcgcctaaaaccaagcttctggttcagaaactgaaagagatggctctggaagatgtgctgattatcactaatgaagttgatgagaatttgttcttagcagctcgcaacctgtacaaggttgatgttcgtgatgtagctggtattgatccagttagcttgatcgccttcgataaagtggttatgactgctgatgctgtgaagcaagttgaggagatgctggcatga

SEQ ID NO: 9074 - DNA, 303 bp, Photorhabdus luminescens
atgatccgtgaagaacgtctgctgaaagtactgcgcgcaccgcacgtatctgaaaaagcttctacagcgatggagaaaagcaacgccatcgttctcaaagttgcgaaagacgcgactaaagcagaaatcaaagctgctgtgcagaaactgtttgaagtcgaagttgaaggtgttaacactttgctggtaaaaggcaaaactaaacgccacggtcagcgtattggtcgtcgtagcgactggaaaaaagcttacgtcacactgaaggaaggccagaatatggacttcatcggtggtgcagagtaa

SEQ ID NO: 9075 - DNA, 825 bp, Photorhabdus luminescens
atggcaattgttaaatgtaaacctacgtctccgggccgtcgccacgttgttaaagtggttaaccctgagctgcataagggtaaaccttatgctccattgctggaaaaaagcagcaaaaccggtggtcgtaacaacaatggccgtattaccactcgtcacattggtggtggccacaagcagcactatcgtttgattgactttaaacgtaataaagatggtatccctgctgtagttgagcgtttggaatatgatccaaatcgttcagcaaatatcgccttggttttgtataaagatggtgaacgtcgttatatccttgcacctaaagggctgaaagctggtgatcagatccaatctggtgttgacgcatctatcaaaactggtaacgcattgccaatgcgcaatatccctgttggttctaccgtacataacgtagaaatgaaaccggggaagggtggtcagttggctcgttccgctggtgcatacgttcagatcgttgcccgtgatggttcttatgtaactttgcgtctgcgttctggtgaaatgcgtaaagttctgtctgactgccgcgccactttaggtgaggttggtaatgcagaacacatgctacgtgttctgggtaaagctggtgcaagtcgctggcgtggcattcgtcctaccgttcgtggtacggcgatgaacccggtagatcacccacatggtggtggtgaaggtcgtaactttggtaaacatcctgtaactccttggggtgttcaaactaaaggtaagaagacccgtagtaataaacgtactgatcagttcatcgtacgtcgccgtactaaaaaataa

SEQ ID NO: 9076 - DNA, 279 bp, Photorhabdus luminescens
atgccacgttctctcaagaaaggtccatttattgacctgcacttgctgaagaaggtagagaaagcggtggaaagcggagacaaaaagcctattaagacttggtcccgtcgttcaacgatctttcctaacatgatcggtttgaccatcgctgtccataatggtcgtcagcatgtaccagtttttgtttccgacgaaatggttggtcataaactaggtgaattcgcgccgacccgtacttatcgcggccatgcggccgataaaaaggctaaaaagcgctaa

SEQ ID NO: 9077 - DNA, 333 bp, Photorhabdus luminescens
atggaaactatcgctaaacatcgccacgctcgttcttctgctcagaaggttcgccttgtagctgacctgattcgcggtaagaaagtgtcgcaagctctggaaactctgacctataccaataagaaagctgctggtttagtgaagaaagtacttgagtctgctattgctaatgcagaacacaacgatggtgctgacattgatgatctgaaggtcacgaagattttcgtagacgaaggcccgaccatgaagcgtattatgcctcgtgcaaaaggtcgtgcagatcgcatcctgaagcgcagcagccacattactgtggttgtgtccgatcgctga

SEQ ID NO: 9078 - DNA, 702 bp, Photorhabdus luminescens
atgggtcagaaagtacatcctaatggtattcgcctgggtattgtcaaaccttggaactctacttggtatgcgaatactaaagaattcgctgacaacctagacagcgattttaaagttcgccagtacttgaagaaagaactggcaaaagcgtctatttcacgcattgttattgaacgtcctgctaaaagtattcgtgtaactattcacactgctcgcccaggtatcgtaatcggtaagaaaggtgaagacgtagaaaaactgcgtaaaactgtagcggaaatcgctggtgttcctgcgcaaattaatatctctgaagtacgtaagcctgaactggacgcgaaactggttgctgacagtattacttcacagttggaacgtcgtattatgttccgtcgtgctatgaagcgtgcagtccagaatgcgatgcgtcaaggcgctaaaggcattaaagtggaagttagtggccgtttaggcggtgctgaaatcgcgcgtcctgaatggtatcgtgaaggtcgtgtaccgttgcacacactgcgtgcagatatcgactacaacacttcagaagcgcacaccacttatggtgtactcggcgttaaggtatggatcttcaaaggtgagatcttgggtggtatggctgctgttgaacaggcggaaaaaccggctgcacaacctaaaaagcagcagcgcaaaggccgcaagtaa

SEQ ID NO: 9079 - DNA, 411 bp, Photorhabdus luminescens
atgttacaaccaaagcgtacgaaattccgtaaaatgcacaaaggccgtaaccgtggcctggcagcaggtgcggatgttagcttcggcactttcggtctgaaagctgtgggccgtggccgtctgacggcacgtcagattgaagcggcacgtcgtgctatgacccgtgcaattaaacgtcaaggtaaaatctggatacgtgtattcccagacaaacctataactgaaaagccactcgaagtgcgtatgggtaaaggtaaaggtaacgtagaatattgggttgccttgatccagcctggtaaagtcctttatgaaatggacggtgtgcctgaagagctggctcgtgaagcattcaagctggcagcagcgaaactgcctatcaagaccacctttgtaactaagacggtgatgtaa

SEQ ID NO: 9080 - DNA, 192 bp, Photorhabdus luminescens
atgaaagcacaagagctgcgcgaaaaaagcgttgaagagctgaaaactgagctgctgaatttgctgcgtgaacaatttaacctgcgcatgcaggctgcaagtggccagctacaacagtctcatctgttgaaacaagtgcgtcataatatcgcacgcgttaagactttattgactgagaaggcgggtgcgtaa

SEQ ID NO: 9081 - DNA, 255 bp, Photorhabdus luminescens
atgaccgataaaattcgtactttgcaaggtcgtgttgtaagtgacaaaatggagaaatctattgttgttgctattgagcgtaaggtgaaacaccctctgtatggtaaattcatcaaacgtacgactaaactgcatgtacatgacgagaacaatgaatgtggcattggtgatgtggtggaaatccgcgaaacccgtccactgtccaaaactaaatcttggactttagttcgcgttgtagagaaagcgattctgtaa

SEQ ID NO: 9082 - DNA, 372 bp, Photorhabdus luminescens
atgatccaagaacagactatgctgaacgtggccgacaactccggtgcacgtcgcgtaatgtgtatcaaggttctgggtggctcgcaccgtcgctatgcacacgtcggcgacatcataaaagtcaccatcaaggaagcaattcctcgtggtaaagtgaaaaaaggtgatgtcctgaaagcggtagtggtgcgcaccaggaagggtgttcgtcgccctgacggttctgtcattcgcttcgatggcaatgcttgcgtgttgttaaacaacacaagtgagcaagttatcggtacgcgtatttttgggccggtaactcgtgaacttcgtaatgaaaagttcatgaaaattatctccctggcaccagaagtactctaa

SEQ ID NO: 9083 - DNA, 315 bp, Photorhabdus luminescens
atggcagcgaaaatccgtcgtgatgacgaagttatcgtgttgactggaaaagataaaggtaagcgcggtaaagtaaaacaggttctttctactgggaaagtcattgttgaaggtatcaacttggttaaaaagcatcagaagcctgttccggctctgaaccagccaggtggcatcgttgaaaaagaagctgcaattcaggtttcaaacgttgcgatcttcaatgcggcaaccggtaaggctgaccgtgtaggttttagatttgaagacggaaaaaaaattcgtttctttaaatctaacagcgaaactatcaagtaa

SEQ ID NO: 9084 - DNA, 540 bp, Photorhabdus luminescens
atggcgaaactgcatgattactacaaagacgaggtagtccaaaaactgatgactcagtttggctacaattctgtcatgcaagtccctcgggtcgagaagatcaccctgaacatgggtgttggtgaagcaattgctgataagaaactgctggataatgcagcagcggatctggcagcaatctctggtcaaaaaccattgatcaccaaagcgcgcaaatcagttgcaggcttcaaaatccgtcagggctatccaatcggctgtaaagtgaccctgcgtggtgaacgtatgtgggagtttcttgagcgcctgatttctattgctgtacctcgtattcgtgacttccgtggtttgtctgctaagtcatttgatggtcgtggcaattacagcatgggtgtacgtgagcaaatcatcttccctgaaatcgattacgataaagtggatcgtgttcgtggtctggatattactatcaccacaactgcgaaatctgatgatgaaggccgcgcactgttggctgcttttaacttcccgttccgcaagtaa

SEQ ID NO: 9085 - DNA, 306 bp, Photorhabdus luminescens
atggctaagcaatcaatgaaagcacgtgatgtaaaacgtgcgaaattagctgaaaaattcttcactaaacgtgtagaattgaaagctgtcatttctgatgtgaatgcatctgatgaagagcgttggaatgctgttcttaagctgcaaacactgccacgtgattccagcccctctcgtcagcgtaaccgctgccgccaaactggtcgtccgcatgcgtttttgcggaagtttgggttgagccgtattaaagtccgtgaagccgccatgcgcggtgaaattccgggccttaaaaaggctagctggtaa

SEQ ID NO: 9086 - DNA, 393 bp, Photorhabdus luminescens
atgagcatgcaagatcccatcgcggatatgctgacccgtatccgtaacggtcaggccgcgaataaagttgcggtcaccatgccttcctccaagctgaaagtggcaattgccaaggtgctgaaggaagaaggttatattgaagattataaaattgaaggcgacaccaagccagagctggaattagtactgaaatacttccagggcaaggctgttgtagaaagtattcagcgtgtaagtcgaccaagtctgcgcatctataagaaaaaagatgagctgccacaagttatggctggtttgggtatcgctgttgtttctacctctaaaggtgtaatgactgatcgtgcagctcgccaagctggtcttggtggcgagattctctgctacgtagcttaa

SEQ ID NO: 9087 - DNA, 534 bp, Photorhabdus luminescens
atgtctcgtgttgcaaaagcacccgtcgttattcctaccgacgtagaggtaaaactcgacggtcaggttatttcgattaagggtaaaaacggcgagttgagtcgtacaatccacagcgcagttgaagttaagcatgcagataatcaactgaccttcgctccacgcgatggttatgttgatggttgggcacaggcgggtacaactcgttctttgatgaatgctatggttatcggtgttaccgaaggcttcactaagaaacttcaactggtaggtgttggttatcgtgcagcagtcaaaggcaatgttatcaacatgtctctgggcttctcacatccagttgaccacgaactaccagcaggcattactgcagaatgtccgtcacaaactgaaatcgtactaaagggtgctgataaacaggtaatcggtcaggttgcggcagaactgcgtgcctatcgtcgtcctgagccttataaaggtaagggtgttcgttacgccgacgaagtcgtgcgtatcaaagaggctaagaagaagtaa

SEQ ID NO: 9088 - DNA, 354 bp, Photorhabdus luminescens
atggataagaaagcagctcgtatccgtcgtgcgacccgcgcacgccgcaagctccaggaactgggtgcaactcgcctggtggtacatcgtacccctcgccatatttatgcgcaggttatcgcaccaaacggttctgaaactttggtggcagcttctactacagaaaaagctatcaatgaacaactgaaatacactggaaataaagaagcagcagcagcagttggcaaggcaattgctgaacgtgcattggaaaaaggtattaaagatgtatcctttgaccgctctggtttccaatatcatggtcgagtccaggcactggcagatgctgcccgtgaagctggccttcagttctaa

SEQ ID NO: 9089 - DNA, 501 bp, Photorhabdus luminescens
atggctcacatcgaaaaacaagctggcgaactgcaggaaaagctgattgcggtaaatcgcgtatctaaaaccgtaaaaggtggccggattttcagctttaccgcactaactgttgtaggtgatggtaatggtcgcgttggttttggctacggcaaagcacgcgaagttccggcagcaatccagaaagcgatggaaaaagcccgtcgcaatatgaaaaccgtcgcactgaacagcggcactttgtatcacccagtaaaaggtgcacacactggttcccgtgtgttcatgcagcctgctcacgaaggtactggtatcatcgcaggcggtgctatgcgtgctgttttggaggtggctggtgttcgtaacgtactggctaaaacctatggttccactaaccctattaatgtggttcgtgcaactctggatgctttagacagcatgaagtctccagaaatggtcgcagctaagcgtggtaaatccgtcgaagaaattctggggtaa

SEQ ID NO: 9090 - DNA, 180 bp, Photorhabdus luminescens
atggctaagactattaaagtaacacagattcgcagttcaatcggccgtctgcctaaacataaggcaactttggttggtttaggtctgcgccgtatcggtcatacagtagagcgtgaagatactcctgctatacgtggtatgatcaacttggtttcctatatggttaaagttgaggagtaa

SEQ ID NO: 9091 - DNA, 435 bp, Photorhabdus luminescens
atgcgcttaaatactctgtctccggctgatggttccaagcatgcgcctaaacgtgtaggtcgtggtattggttctggcctgggtaaaaccggtggccgtggtcacaagggtcagaaatctcgttctggcggtggcgtccgtcgcggttttgaaggtggtcagatgcctttgtaccgtcgtttgccaaaatttggctttacttcacgtaaggcgatggttacagcagaagttcgtttgtctgattttgctgccgttgaaggcgatattatcgatctgaatgcattgaaagcagctaacattgttggcactcaaattgaatttgcgaaagttattctttctggcgaaatcaatcgtgcagtaactgtgcgtggccttcgtgttactaagggcgctcatgctgcaattgaagctgctggcggtaaaattgaggaataa

SEQ ID NO: 9092 - DNA, 1332 bp, Photorhabdus luminescens
atggctaaacaaccaggattagatttccaaagtgctaaaggtggactgggcgagctgaaacgtaggctgttgtttgttattggcgcgttaattgttttccgtattggttcttttattcctatccctggtattgatgccactgtgcttgccaaattgctcgaacagcaaaggggcaccatcattgaaatgtttaacatgttctctggtggtgctttaagtcgtgcttctatctttgcactggggataatgccgtatatttctgcgtctattattattcagttgttgacggtggttcatccaacgttggcagagattaagaaggaaggggaagctggtcgtcgtaagattagccagtatactcgctatggtactttagtgctggctatattccagtcaatcggtattgctactggtttgccgaatatgccaggaatgcaagggctggtgatcaatccagggtttgctttctacttcacggctgttgtgagcctagttactgggactatgttcctaatgtggttgggtgagcagattactgagcgtggtattggaaacggtatctctatcataatctttgctggtatcgttgcgggtttgccgccggccattggccataccattgagcaagctcggcaaggcgatctgcacttcctcctgttgctgttggttgcagtgttagtgtttgcagtgactttcttcgttgttttcatggagcgtggccaacgacgtatcgttgttaactatgcaaaacgtcagcaaggtcgccgagtttatgctgcacagagtacacatttaccgttgaaagtgaatatggctggggttatccctgctatttttgcttccagcattattctgttccctggtaccatagcttcctggtttgggggaggaactggttggaactggctgactactatttcaatgtacttgcagcctgggcaaccgctttatgtgttactctacgcgtctgcaatcatcttcttctgttttttctataccgcgttggttttcaacccgagagaaacagcagataacctgaagaagtccggtgcatttgtaccaggaattcgtccgggagagcaaacagccaagtacattgataaggtaatgacacgcctaactttagttggtgcgatgtatattacttttatctgcttaatcccggagttcatgcgtgacgcgatgaaggtgccattttattttggcggtacttcgctacttattgtagttgtagtcatcatggactttatggctcaagtgcaaactctgatgatgtcaagtcagtatgagtccgcattgaagaaggcaaatcttaaaggttataaccgttaa

SEQ ID NO: 9093 - DNA, 357 bp, Photorhabdus luminescens
gtggcccgtatagcaggcattaacattcctgatcagaagcataccgtgatcgctttaacatcgatctacggaattggcaaaactcgctcccaagccatttgtgctgcggcgggtattgctgagcatgttaagatcagcgagctgtctgaagagcaaattgataagctgcgtgacgaagttgccaaatacgttgtagaaggcgatttgcgtcgtgaagtaaccctgagcatcaaacgtctgatggatcttggtacttatcgtggtttacgtcaccgtcgtggtctacctgttcgcggccagcgtactaagaccaacgcacgtacccgtaagggtccacgtaagccgatcaagaaataa

SEQ ID NO: 9094 - DNA, 390 bp, Photorhabdus luminescens
atggcaaaagcacctattcgtgcacgtaagcgtgtaagaaagcaagtctctgacggtgtggctcatatccatgcttctttcaacaacaccatcgtgaccattactgaccgccagggtaacgccttgggttgggcaactgctggtggttccggtttccgtggttctcgtaaatctactccgtttgcagctcaggttgcagcagagcgctgtgccgaagcagtgaaagaatacggaattaagaacctggaagttatggttaaaggacctggtcctggccgcgagtcaactattcgagcgttaaatgcggcaggtttccgcattactaacattactgatgtgactccgatccctcataacggttgtcgtccacctaaaaaacgtcgcgtttaa

SEQ ID NO: 9095 - DNA, 621 bp, Photorhabdus luminescens
atggcaagatatttgggtcctaagctcaagctgagccgtcgcgagggtacagatctattcctgaagtctggcgttcgcgcgattgacaccaagtgtaaattagaacaagcacctgggcagcatggcgcacgtaaaccgcgtctgtctgactacggtgtgcagttacgtgagaaacaaaaagttcgtcgtatttacggtgttctagaacgtcaattccgtaactattataaagaagcaactcgtctgaaaggcaacacaggtgaaaacctgctgagtttgctggaaggtcgtctggacaacgttgtttaccgtatgggtttcggggcgactcgtgctgaatcacgccaaatggtaagccataaggctatcatggtgaatggccgcgttgttaacatcgcttcttatcaggtatccccgaatgacgtagtcagcgttcgcgaaaaatcgaaaaagcagtctcgtatcaaggcggctttagagctggctgagcagcgtgagaaaccaacttggttggaggttgatgctgtgaagatggaaggtgtgttcaaacgtattccagaacgtgccgatctgtctgctgacatcaacgaacacctgatcgtcgagctttactctaagtaa

SEQ ID NO: 9096 - DNA, 990 bp, Photorhabdus luminescens
atgcagggttctgtgacagagtttctaaaaccgcgcctggttgatatcgagcaagtcagttcgacgcacgccaaggtgacccttgagccattagagcgtggctttggccatactcttggtaacgcactgcgccgtattctgctttcgtctatgccgggttgtgcggtgactgaggttgagattgatggtgtactgcatgagtacagcaccaaagaaggtgtacaggaagatatcctggagattctcctcaacctgaaagggctggcggtaagagttcagggaaaagatgaagttattcttaccttgaataagtctggcattggccctgtgactgcagccgacattatccacgacggagatgtcgaaatcgtcaagccgcaacatgtaatctgccacctgactgacgaaactgcttctataagcatgcgcattaaagttcagcgtggtcgaggttatgtgccggcttctgcccggattcattcggaagaagatgagcgccctattggtcgtttgttagtagacgcttgttatagcccagtagagcgtattgcctacaatgttgaagcagcgcgtgtagaacaacgtaccgatttggacaagttggttatcgagatggaaactaacggtacaatcgatcctgaagaggcgattcgccgtgcagctactattttggctgaacagctggaagcttttgttgatttacgtgatgtacgtcagccagaagtaaaagaggagaagccagagtttgatccgatcctgctgcgccctgttgacgatctggaattgactgtccgctctgctaactgtcttaaggcagaagctatccactacatcggtgatttggtacagcgtaccgaggttgagttgcttaagacacctaacctgggtaaaaaatctcttacagagatcaaagacgtactggcttcacgtggcttatctctgggcatgcgcttagaaaactggccaccagcaagtattgctgatgaataa

SEQ ID NO: 9097 - DNA, 393 bp, Photorhabdus luminescens
atgcgccatcgtaagagtggtcgtcaattgaaccgcaacagcagccatcgccaagctatgttccgtaatatggcaggttctttggtccgtcatgaaatcatcaagacgactctgcctaaagcgaaagaactgcgtcgcgtcgttgagccgctgattactcttgccaagatcgacagcgtagctaatcgtcgtctggcattcgcccgtactcgtgacaacgaaatcgtggcaaaactgtttaatgagctgggcccgcgttttgcgagccgcgcaggtggctacactcgtattcttaagtgtggcttccgtgctggtgacaatgctccgatggcatacatcgagcttgttgaccgtgctactgagcctcaaacagaagttgcgactgcggagtaa

SEQ ID NO: 9098 - DNA, 417 bp, Photorhabdus luminescens
atgtatcgtattggtcaactggctaaattagcgaatgtaactcctgatactgtgcgtttctatgaaaaacaaggaatgatggaacatcagaaccgtactgaaggagggtatagactttatacagagcaagatctacagcgccttcggtttatacgctatgctaagcaattagggtttacattggaagctattacagaattattgtctattcgtgtagatccagcccatcatacttgtgaagagtcaaagcaaattgtagattctaggttaatggaagtggaggaaaaacttcttgaaatgcgaaaaatgcgtgattcacttaagatgctaagtgatgcttgttgtggcagttctcatataagtatttactgttctattcttgaaactttagaacaaggtgctttgaataagaaataa

SEQ ID NO: 9099 - DNA, 201 bp, Photorhabdus luminescens
atgattacatatcaccataagaaaggtgtaataaaggataatgctctagaagctctattacgtgatccgctatttaaacaacgagttgaaaaaaataaaaaaggaaaaggaagttaccagaggaaagaaaaacatagcaaagcaagtagctgggagaccagtggtaaggggtcattagattctttactactggtcttttag

SEQ ID NO: 9100 - DNA, 1377 bp, Photorhabdus luminescens
atgaaaataattattcttggtgcaggtcaagttggcggtacattagctgaaaatctggtaggtgaaaataacgatatcaccatagtcgatactgatcccaaccgtctacaccaactacaggataaattcgatctcagagtagtcaatggtcatggttcttaccccagagtattaagagaagctggtgctgaagatgctgatatgttagttgctgtaactaattctgacgaaactaacatgatcgcatgtcaaattgcttattccttatttaacaccccaaataaagttgcgcgaatacgcgcagcagaatatattcgtgaagcagataaactttttctgcccaatgatattcctattgattatcttatttcaccagaacaacttgttatagattatatttataaactaattcaatatcctggcgccttacaagtcgttaactttgccgaaggccgagtaagtattgttgcagtaaaagcttattatggaggctcacttgtagggaatgcactttcctcacttcgtgaacacatgccgcatattaataccagagttgcagcaatattccgtcaggatcgaccaataagacctcaaggttctacaattattgaagccggtgacgaagttttctttgtagctgcatcacaacatattcgtgctgtaatgagtgagcttcaacgtttagaaaaaccctacaaacgtattatgattgtaggtggcggtaatgtgggagcaggcctcgcactacgtctagaaaaagattacagggttaaattaattgaacgaaatcagcaaagagctatagaactagccgaattattacatgacaccattgttttctatggggatgcctccgatcaagagttattagctgaagaacatatagaacaagttgatgtatttattgctctaaccaacgatgacgaggcaaatatcatgtctgcaatgcttgccaaacgcatgggtgccaaaaaagccatagttctcattcaacgtagtgcatatgtcgatttagtacaaggtggtgtcattgatattgcaatctctccacaacaagcgacgatttccgctctgttaggtcatgttcgcaaagcagatattgtaagcgtttcctcattacgtcgtggagtggccgaagctatcgaagcgattgctcatggggatgaaaatacgtcaaaggttgttggtcgaactgtaggtgatattaaattaccaccaggcactacaattagtgcaatagctcgcggtaacgaagtccttattgctagtgattacagtgttatcgaacaaggagatcatgtaattatgtttattacagataagaaatttgtccccgaagtagagaaactattccagccaagcccttttttcctttaa

SEQ ID NO: 9101 - DNA, 1290 bp, Photorhabdus luminescens
atgaaaaacacatataatctgcgaagtatcaccgcaaaagcaatcaatcaagttctggatcaaggacagtctctcagtacagtcttacccaaactgcaacaaaatataactgataaagacaaacccttgttacaggaattatctttcggagtgttacgcgtattaccacagctagagtggataataggtcaactaatggtaaaaccattaaaaggtaaacaacgtattcttcattacctgcttatggttgggatataccaacttgcctatactcgtattccagcccatgccgcacttgctgaaacagtaaacggagccgtaactctgaagcattctcaattaaaagggttaattaatggcgttcttcgccaatttcagagacaacagctacagttaatggaatgtacgcaaaataattccagccaccacttacacccagaatggctattaactcgaatccaaaaagcctatccacaacaatggcaacaacttattaatgctaataataaaaaaccccctatgtggttacgagttaatcgtatataccatagtcgggatgaatatctcactcttcttcgtaaatcaggaattgatgcggaaccagcgcccaaatcaccttctgctatccgcataatttccccttgccctgtaacaatattacctggatttgacaaaggttgggtcactgtccaagatttatccgcacaagagtgtgtcgagttactaaaacccataaatggagagaaaattctcgatctttgtgcagcaccaggagggaaaacaacatatatcctcgaaatagcaccagaatctcaagtagtagcggtagatattgatgagcaaagaatcaaacgagtaaaagaaaatctcaaacgccttaactgccacgctacagtaaaaaccggtgatggacgccaccctgaacattgggcagagaaccagcaattcgaccgcattcttttggatgcaccgtgttcagcaacaggagtaatccgtcgccatcctgatatcaagtggttacgccgcgaggaagatattgctcaattagttcaattacaatctgaaattcttgatgcaatttggccatacttaaagaaaagcggaacgttagtatatgcaacctgttctattctaccagatgaaaattgtcagcaaatcagctcgtttttaaaacgccactcagatgcaaaactcgcgggaacagagacaaatgattgtctaggaaaacaaataatacctgagttaaatggtggtgatggtttcttttacgctcgattaactaaacggtaa

SEQ ID NO: 9102 - DNA, 948 bp, Photorhabdus luminescens
gtgtctgattctttacgtattgtttttgccggaacacctgattttgcagcacgccatctagaggctttgttaatgtctcagcatgaggtggttggcgttctaactcgaccagataaaccggcaggaagaggtaaaaaactaacacccagtcctgtaaaagtactggcagaggaacgtaatatcaccgtttttcagccagctactttacgctcagaagaaaaccaacaatgggttctaaaacaacaacctgatgttctcatcgttgttgcctatggattgatccttcccaaagttgttttaaatattccagaattaggttgcctaaacgtacatggttccctactaccacgttggcgaggtgcagcacccattcaacgctcactttgggctggtgatacagaaactggcgtaacaataatgcaaatggatataggtcttgatactggcgacatgctatataaagcaagatgccctattacacctgaggataccagtgccagtttatacgaaaaactggccaatattgggccagatgcgttactcaaaacattatcattaataacatcaggtaaaagtcaacctgaaactcaaaacgaaaatttagttacctacgctgaaaaactaagcaaagaagaagcccgcataaattgggaactatctgcaacccaccttgaacgttgtattcgcgcatttaatccctggcccatgagctttttcgaaatggaaggacaacctattaaagtttggaaagcagaagccattgaagaacaaacttcggtagagccaggaactgtactaaaagcagacaaagaaggtatttatattgctaccgctgatggaattctgaacattacacagttacaacctgccggtaaaaaagcaatgtcagcagcaaatctacttaattctaaacgtgaatggtttactccaggtaataaaatcaactga

SEQ ID NO: 9103 - DNA, 513 bp, Photorhabdus luminescens
atgtcagtattacaagtattacattacccagacgagcggcttcgcactattgcaacgcctgttgaaacagttgatgcagagattcgacgtatcattgatgatatgtttgaaactatgtatgcagaagaaggtatcggtttggcagcaacacaagttgatattcatcagcgtattgttgttattgacgtatcagaaacacgtaatgagcgtctcgttctgatcaacccagaattactggaaaaaagtggtgaaactgggatcgaagagggctgtttgtctattcctgaacaacgagcactggtgccacgagccgaaaaagtcaaaatcaaagccctagattacaatggtcgaccatttgaattacaagctgatgacttacttgcaatttgtattcagcatgagatggaccacttaattggtaaactttttgtggattacttatctccactgaaacgccaacgtatacgccagaaagtagaaaaactggataaacaaaaagcccgaaccaagtaa

SEQ ID NO: 9104 - DNA, 1086 bp, Photorhabdus luminescens
atggaagctatggaagtatggttgcgaatgaagatgatttctcatttggcaacagagagagcagcaaatgttgcagaaaaattgttatattccgggagtcgttatctcactgtgttgaaagatagtggattatcgccagaacaatgtctgcaatttactaaagtaaataaaaccttactagcttcatgccttaagtggctggaacagccagagcaccatttattgacatattctcacccttcgtatccacctctattaaagcagatacatacccctccgcttgtgctttttgtggcaggaaaaccagatattcttttaaagaagcaggtggcgatggtagggagcaggacagcaagttattatggtgagagatggggaagaatttttgcaagtgaactggttggatatgagttagttattgctagtggtttagctatcggtattgatggtatttgtcaccgagctgcattggatagtggaggtaaaacagtagctgtattaggtagtgggcttggacagatttatcctcatagacacggattattagcaaagcaaattgaggagaatggtgctcttgtttctgaattttttccggatactccgccacgcgcaaaaaattttcctagaagaaatagaattatcagtggattaagctcagcagtgattgttgtagaggcaggtcaaaatagtggttcgttaattactgctcgttgtgcccttgaacaaggaagggatgtatttgcattaccagggcttttgggaaattcagtgagcgaaggcaatcactggttaataaaacaaggtgcatacttagctacaaatgcaatggatattgtggaacatgtttacagttcattacaatggttgaatatggaaagaacggaggaagaagtaaaaccgcagtttgagcaaactgagttgccatttactgatgtgctagttaacgtaggcgctgaagtaacgcctgttgatattattgctcagcgttcttcattacctataactgaggtcatgacaaagctccttgagctggaattactgggtaaggtgactgtggttgctggtggttatgtgcgtgtgaattaa

SEQ ID NO: 9105 - DNA, 531 bp, Photorhabdus luminescens
atggttcctttctccaccaatgaaactgaatattgccctgaatgtggttctgcgttggttatgcgtaatggtatccatggcccatttcttggatgttctggttatccatcatgtcaatatattcgtccattaaaagggcaacgtgatgggcatgtggtaaaagaacttgaagggcagctatgtcccgcgtgtggagtcaatttgattttgtgccaaggacgttatggcatgttcattggctgtagtcgttatcctgaatgcgaacatacagaactaattgataaaccggatgagacgttaatagcctgtccgcaatgtaaacaaggacaactactccaaaggaaatcacgtttcggaaaaattttccatgcgtgtaaccgttaccctaattgccagtttgtattaaataataagccaattgcgggtaaatgtgagttttgttcttattcgttgctagtggaaaaacgtacatcacaaggtgtaaagttattttgtgctagtaagttgtgtggaaaacggcaaataaattaa

SEQ ID NO: 9106 - DNA, 570 bp, Photorhabdus luminescens
atgagcaatgaagcatcacctgcatttgagagtgtattaacagcattaaaagcagaaaaagtgattgcctatccgactgaagctgtttttggacttggatgtgatcctgatagtgaaaaagcagtaaatgaactgcttatattaaagaaacgtccttggcagaaagggttgattcttatcgcagataattatgaacaattacaaccgtatcttgatgataaacttctaacagaagaacaaaaaaaagctatgtttgcttgttggccagggcctgtaacctgggtgattcctgccaaatttagtgcacctaagtggttgacagggcaattcgctaccttggctgtcagagttagtgatcatcctttggtgaaacagttatgtactttttatgggaaaccgttggtgtcgaccagtgcaaatttgaatggccttgaaccatgcagaacagcagaagaagttagacaacagtttggagataagcttcctatattaaacggagatgttggaggtcggaaaaacccttcagaaattcgggatgctttaactggtgagctttatcgtcaagggtaa

SEQ ID NO: 9107 - DNA, 819 bp, Photorhabdus luminescens
atggatcaatttgctgtctttggtaatcctgttgcgcatagtaaatctccgcgtatccatcagttatttgctagacagacaggtattgagcatcgttatgggaaaattctggtgccgataagtaaatttcaagaggcattggatacatttcttaaacagggaggtataggagtcaatattactgtgccatttaaagagcaggcatttattcgagcaaatgagttgactgaacgggcaagactcagcggtgcagttaatactttgaaattacttaataataatcaattgcttggtgataacacggatggtatagggttattaacagacttgatgcgacttgagtttattactcaagggcagcatattttaatcattggagctggtggagctgccagaggtgttttatttccattattagaatttggttgtaaaattacaattacaaaccgcacgtttagtcgcgctatacaggttgctaataatttttcggcaataggcagtattcggcctgctgagatgaaagtacttaatagtcctgagtttgatctcattatcaatgcgactgcatctggtattaatggtgagattcctactatatctccattcatatttaatgagaattgtgtctgttatgatatgttttaccaggctaatttgacgccctttatttcctttgctaggaagcatggtgtttctcgttatgcggatgggctggggatgttagtggggcaagctgctcattcatttaaattatggcatggtgtattgcctgaaatttcacctgtgttactaacattggaacaggagttacgttcgtga

SEQ ID NO: 9108 - DNA, 264 bp, Photorhabdus luminescens
gtgaatcaatctatccaatttcctgatagagaagagtggagcgagcaagagcagatagtcatttttcccgcactggtaaatggattattggttcaatgtgttataagtgccaaggagcttttataccgttatggggcggaagatcatcatccactaagtctttttcgacaaaatcgttgggatatagaagaagaattcgaattagtaattaataacgaggatgatgatcatttgggacgttacatattaccttcctgcaaatag

SEQ ID NO: 9109 - DNA, 546 bp, Photorhabdus luminescens
atgtccgaaacgttacgcagttaccttgatattcagcccaaagttggtcagaacgttatgctagattcatctagtgtaatcattggtgatgttagacttgctgatgatgtcagtatatggcctttagttgtcatccgtggggacgttaattatgtatctattggtgcacgtactaacattcaagatggctctatattacatgtgacacacaaaacaacagacaatcctgatggttttcccttgattgtgggggatgatgtcactattgggcataaagttatacttcatggctgcactatcggtaatcaagtacttatcggtatgggctccatcctacttgatggttcagtgattgaagataacgttattattggtgcaggcagcctagtagccccaggtaagatattagaaagtgggtacctttatattggtagtcctgcccgccaggccagaaaactaaaacctgaagaattaaaagggctatgttattcggcaagccattacgttagcttgaaaaataactatttgcaggaaggtaatatgtaa

SEQ ID NO: 9110 - DNA, 837 bp, Photorhabdus luminescens
gtggacactgaattactgaaaaccttcttggaagtcagtaaaactcgtcactttgggagagcagccgaatcactgtacctgacgcaatcagcagttagctttcgcatacgccaactagaaaatcaattaggtactcatcttttcactcgccatcgcaataacatccgtcttacagcagcgggagagcgccttattccctatgcagaatcactgatgagcacctggcaattggctaaaaaagagataatgcatgcttctcaacatactgaattaacaattggtgccactgcatcactatgggaatcatatttaacttcctggttacaagacttctataaaaaacatcaggaattaagattggaatcccgagtttctacacggcaatcccttgttaagcagcttcattcacgtgagttagatctgttgattactaccgaaccgcccaaaatggatgagttccaaagcctattattaggaaatattcgcttgaagttattaacaacagaagaaaatctgaaataccaaattaaaaattacatcaaactagaatggggagctgatttccatcatcaggaacaacggattttaaaaagtgatcagttacccaccatcacaaccacttcagcacatatagcccgccaactgctcaatagcgtaagaggagccgccttcttaccaatacactggcaaaatgaatatccagagctggtctcttatccaaatactgaactaattgaacgcccattatatgccatatggctacaaaaaaatgatcagcaagcattcattcaacagctattaaaaatacctatcatacatacttctacaagaggttaa

SEQ ID NO: 9111 - DNA, 339 bp, Photorhabdus luminescens
atggccgaaagcttcatcacgactaatcgtttttttgataacaaaaattaccctcgcgggttctcccgccatggcgatttcaccattaaagaggcgcaattactagagcgccatggttatgcgttcaatgagttagatcttggtaaacgcgagcctcaaacagaagtagaagagctgtttgttgctgtttgccggggtgagcggcagcctgtgacaatagaagaaaaagtctggaccaaatatcttgcaaggattaggcgtccaaagcgttttcatactctttcaggcggtaagccccagatcgatgcttctgatgactataccgacactgatgattaa

SEQ ID NO: 9112 - DNA, 1524 bp, Photorhabdus luminescens
atggccctcgctgttatttataccagagcgactataggtattcatgcccctattgttactgttgaagcgcatattagtaatggtttacctggattaaccttagttggtttgcctgaaacagccgtaaaagaagcaagagatcgtgtcagaagcgcattgatcaacagcgggtttacctatccgcctaaaagaatcaccgtcaatcttgcacccgcagatcttcccaaagaaggcggccgttatgatttgccgatcgctatcgctattctagccgcttcagaacaaatacctaccaataaactaagtcattacgaatttcttggtgaactcgctctatccgggggtttacggaaagttaacggcgcaattccagccgcactcagcgcaggaaaagcaggaagacaacttattctaccaacagaaaacgcaatggagctggcaattttatctcagaatgaaacgttaatgacagaacacctcttacatatctgccactttcttcagggagaacaacaactgctgacagcaccaatccaacatgaatccttaacagaaccatcacaaccggatcttcaggatattattggccaggaacaagcaaaacgcgccctagaaatcacagcagcaggcggacataatcttttgctacttggcccaccagggacaggaaaaacaatgttggcaagccggctatgtagtctattaccaccattaacaaacaaagaggcccttgaggttgccgccatcaatagcctgatggatacctacctttcacctcaacaatggcatacacgcccatttagagcgcctcatcacagttcttcaatggcagctctggtcggcggcggtgggctcccaaaacctggtgaaatttcacttgctcacaacggcgtgctatttctagatgaactacctgaatttgaacgcagagtccttgatgctctcagagaaccgctggaatcaggggaaatcattatctcccgagccagagcaaaagtttgttttcctgcccaagttcaattgatagcagcaatgaatcctagccctacaggctatcatcagggcattaacaatcgaagtagtcctcagcaaatacttcgatacctagcgaaactttctggtcctttcttagatcgtttcgatctctcaattgaagttcccttgttacccattggaacattgagtagctctgttagaccaagcgaaagcagcaaagatgtaagattaagagtactggcggcgcgagaaatacaactgaaacgttgtggaaaaattaatgctcatctgaatagtaaagagacagaggcattttgtaagctcaaacctaacgacgctgtatttctagaacaaactctaataaagctagggctttcaatccgagcatggcaccgaattctgaaaacatcccggacacttgccgacttagaagaaaaaaaagagatagaaaaaccacatatcatggaagccttaagctatcgcagtatggacaggttattaatacaattacaaaaacaatcaggttag

SEQ ID NO: 9113 - DNA, 84 bp, Photorhabdus luminescens
ttgtctcacagggtaaacacaggggatatgaaaaatgaatggggcgcagtgggttgtaaaggcattacgaacgcaggggattga

SEQ ID NO: 9114 - DNA, 1647 bp, Photorhabdus luminescens
atgaatggggcgcagtgggttgtaaaggcattacgaacgcaggggattgataaggtttttggctaccctggtggtacgatcatgccggtttatgatgctttgtacgatggtggtgtggagcatttgctttgtcggcatgaacagggggcagctatggctgcaatcggctatgcgagagccagtggtaagccgggagtttgtatcgctacatcgggaccgggagcaacaaacttaatcactggattagccgatgcattgttagattctgttcctattgttgctatcactggtcaggttggttctgaattgattggaactgatgccttccaagaagtcgatgttttaggtctctcccttgcttgtaccaaacacagtttcttagtggactcactggaagatttacctcaaattatggcggaagccttttctattgccactagtggtcgacctggcccagttttgattgatattcctaaagatattcagttgaaagaggggaattttgtaccacatttggtacccgttgaacaaaaggagccctgctcggaaagtgaattagaacaagcccggaaaatggttgcggctgcgacaaagccagtgttgtatgtcggtggtggagtagggatgtctcaagcagtttctgttctgcgagattttgttgtggaaacaggtatgccggttgcttctacgttgaaaggcttgggggctgccgattcagaacatccatgttatctgggaatgcttgggatgcatggttcgaaagcggccaatcttgccgttcagtcatgtgatttgttgattgctgtaggtgctcgttttgatgatcgtgtgactggcaaacttaatacttttgctccgtgtgcaaaaatcattcatctggatatcgatccggcagagttgggtaaattacgtcaggctcatgtgtcgttgctgggggatgtgaaggtattattgccccgtttgcaacagccattgtcaattatgccctggcaacaggaagttaagtatctgaaagctgaatatccttggtgttatgaccatcagggagagagtatctatgcgccttggttattgaagcaggtttcagatcgtaaaacatttaatacggttattactaccgatgttggacaacatcaaatgtggacagctcagcatatgacgtttgatgggcctgaaaatttcattacatctagtggattgggctcgatgggatttggtatccctgctgcaattggtgctcagattgctcgaccggaagatatggtgatttgtgtctctggagatggttctttcatgatgaatgtccaagaactggggacaattaaacgcaagcaattacccgtaaaaattttattgttggataaccagcgattgggaatggtgcggcaatggcaggagttgttttttgataagcgatatagcgaaacgacattaacagataaccccgattttgtcacattagcgaaagcttttgatattccggggcaacatatcacggataaatcacagattgatgaagcgctgaatgcattattcagcagtaagggcccctatttattacaggtatctattgaggaattagagaacgtttggccgttagttcctcccggtgcaagcaatgaaactatgttggagaaatcattatga

SEQ ID NO: 9115 - DNA, 258 bp, Photorhabdus luminescens
atgatgcagcatcaacttgcaatccatgctcgtttccgtcctgaaatattagagcgcatcttacgggtaacgcgtcatcgtggatttcagatctgttccatgaatatggatcaaacaatggatggcgataatgttaatatcgaattaattgttgccagccaaaaaccggttaatttgttgtcttcacaactgactaaattagtggatgtcgctggcgtcaagatcctgcaacaaaaatcacaactcatacgtgcataa

SEQ ID NO: 9116 - DNA, 927 bp, Photorhabdus luminescens
atgacgaagcaatccgattacatttggttcaatggtgagatggttccttgggcagatgctaaagttcacgtaatgtcccatgctttacattacggcacatctgtttttgagggaattcgctgctatgactctcataaagggccagtggtttttcgccatcgtgagcatatgcagcgtttacatgactctgcaaagatttatcgtatgccgttgaaccagagtgtcgatgaattaatggaggcgtgtcgggcaactcttcgtaaaaataatttagtcagtgcttatatacgtccattggtctttatcggtgatgttggcatgggggttaatccacctgctggttataaaactgatgtcattattgccgcctttccgtggggagcttatttgggagaaggcgcattggatcaaggaattgatgcgatggtttcttcatggaatcgtgcggcaccaaacacaatgccaactgcggctaaagccggtggtaactacctgtcttcgcttttagtcggtagtgaagctcgtcgtcgtgggtatcaggaaggtattgcactggatgtttctggttatatctctgagggtgcgggtgaaaatctatttgaagtaaaagatggcatattatttaccccaccatttacctctgctgcattaccaggaattactcgtgatgccattattaaactggcgaaagatttagggctggaagtgcgtgagcaggtattgtcgcgcgaatcattgtacctggctgatgaagtttttatgtctggcacagcggctgaaatcacacccgttcgtagtgttgatgatattcaggttggtatcggtagatgtggacctattaccaaaaaaattcaacaagctttctttggcttgtttgatggcacgacagatgataaatggggctggttagatccagtcaatccttaa

SEQ ID NO: 9117 - DNA, 1851 bp, Photorhabdus luminescens
atgcctaagtaccgttctgccactacgactcatggccgcaatatggcaggagctcgcgctttatggcgcgcgacagggatgaccgatgcagatttcggtaaaccgattattgcagtagttaactcatttactcagtttgttccagggcatgttcatttgcgggacttaggtaaactggttgcggaacagattgaagcatcaggcggtgttgcaaaagagttcaatacgatagcggtggatgacggtatcgcaatggggcatggtggtatgctctattctctgccgtcacgtgaattgatcgctgattctgttgaatatatggtgaatgcacattgtgcggacgctatggtgtgtatttccaattgtgacaaaattaccccaggaatgctgatggcagcactacgtctgaacattccggcgatttttgtttccggtggccctatggaggcaggtaaaactaaattgtcagatcagattattaaattggatctgatcgatgccatgatccaaggcgcgaacccgaaggtcagtgatgaagatagcaatcagattgagcgctcagcttgcccaacttgtggttcctgctcaggcatgtttactgctaactctatgaattgccttacagaggcactgggtttgtcgcaaccggggaatggctcattactggctactcatgcagatcgtaaggcgctgtttctgaatgcaggcaagcgcattgttgagttgactaagcgttattatgaacaaaatgatgacagtgctctgccgcgtagtattgcaacgaaagccgcatttgaaaatgcgatgatgttggatattgcaatggggggatcaacgaatactgtgcttcacttactggctgcggcgcaggaaggggaagttgatttcactatggcggatattgatcgtttgtctcgtcagatccctcatctatgtaaagttgcaccaagtacacaaaaataccatatggaagatgttcaccgtgctggtggtgtgatcggtattttaggtgagctggatagagcgggtttgttgaatcgtcaggttaaaaatgttttgggtctggatttgttacaaacgcttaatcaatacgatgtgatgcagacggtagatgagtcagtgaaggaaatgtattcggcaggccctgcgggtatccgtactactcaggcattttcacaagattgtcgttggccttcgttggatactgaccgtgtagaagggtgtattcgcgacattgaacatgcctatagtcgggatggtggtcttgctgttctatttggtaatttggctatagatggttgtattgtaaaaaccgccggggttgatgagggcagtctgacgttccgtgggccagccaaagtttacgaaagtcaggaagatgcggttgatgcgatcttgggtggaaaagtcgttgctggtgatgtggtggtcattcgttatgaagggccaaaaggtgggccaggcatgcaggaaatgttgtatccgacgacttatctaaaatctgtggggctaggcaaaagctgtgcattgattaccgatggccgtttctctggtggtacctcgggtttgtcgatcggccatgtttctcccgaagcggctaatggtgggctaatcggtttggttcaagatggcgatattattgatattgatattccactgcggaaaattcgacttgatgtagatgaaaggatacttgctacccgtaaagaagtggaatttgcccgcggtgataaatcgtggacgccgaaagcccgtgaacgtcaggtatcgcttgccttgagagcttatgcttcattggcgaccagtgcggataaaggtgctgtccgtgataaatctaagttagggggataa

SEQ ID NO: 9118 - DNA, 1401 bp, Photorhabdus luminescens
atggctgcatgtcttcccttaacttcctcaccaaatggtgcagagtatttgaaagcagcattaagcgcgcctgtttatgaagttgctcaggtgactcctttgcaggaaatggagaaaatttctgcccgcttgggaaatactattttggtaaagcgggaagatcggcaacctgttcacagtttcaagctccgtggtgcgtatgccatgattgcgagtttgactgaggaacaaaaaaaccgaggagtgattaccgcgtcagccggtaaccatgctcagggggttgcactttctgccaatcgtttgggaattaactctttgattgttatgccggttactactgcggatattaaagtcgatgcggtccggagtttcggtggtaaggctctgttgtatggtgctaattttgatgaggctaaagctaaagcgatagaaatggcacaacaggagggctatacctttgttcctccgtttgatcatcctgctgtaatcgcaggtcaggcaacactggcgatggaacttttgcaacaggatgtgcgtctggatcgaatctttgtacctgtcggtgggggggggttgattgctggcgttgctgtgttgattaagcaactgatgccagaaattaaaattattggggtggaagcggaagattcagcttgcctgaaagcagcaatggaggctggacatccggtagatttaccacgagttggtttgtttgctgaaggtgttgcggttaagcgtatcggtgatgaaacatttcgtttgtgtcagcaatatgtagatgatgttatcacggtagacagtgatgctatttgtgccgcggtaaaagatctgtttgaggatgtgcgtgcgattgctgagccatccggtgcattggcacttgctggattgaaaaagtatgttcagcagcatcagcttagaggtgagcgactggcacatattctttctggcgctaacgtaagcttccacgggttacgttatgtctctgagcgttgtgaattgggcgagcagcgggaagcattgctggcagtgactattcctgaacagaaagggagtttcctgagtttttgccagaaattgggcgatcgggtggtaacagagtttaattatcgttatacggatgcagatcctgatcaggcttgtcttttcgttggtgttcgcctgagtcgtggtgaggtagaacgacgggaaattatcgaggaattgcgtaccgcaggatatcaggttgccgatctctctgatgatgagatggcgaaattacatgttcgctatatgatcggcggtcgtccatctaagccattgaaagagcgcttatttagttttgaatttcctgaatcaccgggggctttgctaaagttcctccaaactttgggaactcactggaatattacgttatttccataa

SEQ ID NO: 9119 - DNA, 1518 bp, Photorhabdus luminescens
atgctaaaagagccattatcaggagccaaacttggctggctaaccctggctttagcattagccgcttttttacaaatattggacctgaccattgctaacgttgcaatatcaacaattgctggagatctgggttcatcagtatcacaaggaacctgggttattacctcatttgctgttgctaacgcgatctctatcccattaactggctggttagcaaagcggttcggggaagtccgggttttcttaatttcaatgatcttatttgtgatcacttcctggttatgtggtattgctaatagcttggaaatgttgattatttcccgcgtcctgcaaggtatctcagccgggccaattatgcccctttctcaaagtttgctactcaacaactatcctccgctaaaacgcaatatggcattggctctgtggtcaatgactatcgttatcgctccagtttgtggtccgatactcggcggttggatcagcgacaactaccattgggggtggatctttctcatcaacgttccggttggctttgccgccattgctatcacctggatgctgttaaaagatcgggaaactgaaataacggcgaggtcaattgatatcgtaggactaattttattggtcatcggtgttggttgttttcagctattgcttgatagaggaaaagagcttgattggttcaactcaacagaaattattgcattagccattatcgcagttattgccataactttcctgatcatctgggaattcaccgatgatgatccgatcattgatttatcactatttaaatcacgcaattttactatcggtactttatgtatcagtttggctttcctactccatataggcactctggttttgcagcctcaactattgcaaatggtatttggttatacggccacttgggcaggattggtaatggctccattagggatagtgccaataatgctcgttccactcattggtcgttttagttcaaaaattgatatgcgttatttagttatgtttagctttatcatttttgcactctgtttcttttggagaactcatacctttgagctatcaatggatttttccactgctgcctggccacaatttattcagggctttgctatcgcctgtttaattatgccactaacagccattatattatctgatgttgaacccgctaaaatcgcttctgcgggcagtttatttaactttttacgcacgctggcaacatccgtgggtacttccattaccacgaccatgtggtcccgtcgcgaagctgtccatcatgtccagttaactgaatcgataactccccataatcctattgcccaacaagcctatgagaaaatggaacaattagggatgacacacgctcaagccagtcactctctggcacgtgaaatcactaatcagggattgattattgctgctaacgagatttattggctatttggctttatttttctgatcttgctgatcttgatctggctggcaaaacccaccgtcggagaaaagaaataa

SEQ ID NO: 9120 - DNA, 1173 bp, Photorhabdus luminescens
atgaccggagaaatacaatcacctccgcttaatgagaaaaagtcaaaacgtaagttagcactgatcctcgcaactctcttatttgcttttgtcgggttgggttacttcacctattggcttatttcattacgtcattatcaagcgactgatgatgcttacgttgtgggtaatcaggtacaagtgatggcccagatcaccggtagcgtaaccgccatttatgccgataataccgacttcgttcaacaaggcgatattttgctacgtttagactctattgatgcggaacatgcttttgagcgagcgaaaaataccttggctaataatgtcaggcaaactcaccaaaccattattgataatgaaaaactattggctaacattgatctcaaacaaacggcattacaacaggctcaagacgatttaaaacgacgtgaacatttgggactcacaggtgctatcgccaaagaaaatctgattcattcccgcaatagcgtacaaatggcaaaatctgagctgaatgttgcccgacaacaatattatgccaataaagcactagttatagacaccccattagatcaacaacctgcgattaaactggccgcttcccagctccgcgatgcatggttaaccttacagcgcacccagattgtcgcgccggtaacaggctacgtttcacgccgcagtgttcaagtaggctcacaaataaaaagtggtgctccactgatggttatcgtacccgctgaccaactttgggtcgaagctaacttcaaagaagttcaacttgccaatgtgcgtattggtcaacccgtaaccctgattagcgatttctatggtagtgatgtcacttataagggccggatcgttggtcttgatatgggaactggcagtgcattttctttattgccggcacaaaacgccaccggtaactggatcaaagtagttcaacgtttacccgttcgtgttgaactagaagcacaacaacttattgctcatcctttacgcatcggtttatccatgcacgccgcggttgatacccgaaatcagggtggtctggtgcttgctgacacgcctcgtaatggcattgtttatgaaaccaacgttttaacttacaacaccgtagaaattgatcggctaattaacgaaatcattcaagttaataccagtcaaaataagtga

SEQ ID NO: 9121 - DNA, 744 bp, Photorhabdus luminescens
atgaatatcagcaccccttgggtttttatttcaggtggatcacgtggtatcggcaaaggcatagtaaaaatgctagcagctcaaaactatcacgtggtttttacctataaatccagcataaatgaagcacaaatattgtgtcatgacattgaacagcaaggttatcgctgtgagggctatcaatgtgacgtctcaaacgcgaaagaagtcacaacattgtcagcagaacttatctcacaatatggcgctccttatgccatcatcaataacgccggaattacacaagatgcattgctgataaatatgaaagaagaagagtggcataatgtcatttccaccaatctttcttctatctatttagtgaatcactcatttctccctgaaatgattactgctggagaaggctgcattatccatatgagctcagtcactgcatttaaagctaactcagggcaagttaactacgctgccaccaaagccgccatgatcggtattacccgctcattagctgttgaagttggccgatttaatgtccgggtcaataccgttgcgccaggcttgattgacactgaaatgctggctcatatccccgcgccacataggaaaaaactgttatctaacatcccactgggccgcttgggttcagtagaagatattgctctgacagtcaatttcctactcagccctggaggacgctacattaccgggcaaacattcgttattgatggaggaatgaccgcttga

SEQ ID NO: 9122 - DNA, 816 bp, Photorhabdus luminescens
atgaacgttcaatttagcaaaaaagatctcagtcaatgggctaaattctctggagactacaatcctatccattttgatgaaaaaatcgcaagagaagttgggttaggtggtattgcagtacacggcatgctggccatgatcccgctcaaaagcggatacgattatctgtcacaactaaatcgggaaatgggcagacagtggcacgttaatttacgcaatcccgtacctctggatgcctgctattgcgtcaaaactaagcacactaaccggaatgggaaaacgacctttaatctgcaagacgaaacaaccaacctgaaacctctgattggtcactatagttgtttcgatttttcacaaaaaactagctttcccgaaaaaccacgttgccaagttcccatacaagagacaataaaaaaatccatcgaatttaaacataccttcccggaagtcaatgaattctggatctttcttgatgctctgatgttttatctttttatgcagcaaagtgccaaaactgcactagcaacagaatttaaaacctattttggcaaacaagaacatgatgaaacatgcctcaaagatctcattgttttgcatgttatgcacaccgtgagtttctctccagcgctgcttaatcgccaaatcccagatgaaatgccaaatatcgaatatacgatcgtaccaaaagatacattcgacgttgatggttcgttatacggtacgctggaaatcccgatctggctgaatggcgaaatctctttagttgttgagatgagtctgatgggaacaacaaaaagaaagcagattgccaactaa

SEQ ID NO: 9123 - DNA, 1266 bp, Photorhabdus luminescens
atgaatattcaaacaggctatcaccgcgttgccgtcacaggctatggttctatctgttcgcttgggcaaaatacccaagaaatttgggatgcaatcctaaattatcgtgtaggctacaaaaaggaagaacacccagacgcttctgttgtagctaaatttttcggtaatatccctttctcgcctgatgtatcacggttttccaaaaagttattaaagaacctgcccaaattcagcaaacttgggctgattgcggcggatgaagcaatcaagatggcatttggtaacgataaaaccgctcttgacgaaaattattcgccttttgaacgcggcgtcatttttggcactggctggggtggagaagatgcaaccgttgaaaacagccattcctatgctgatcaaggcattgcttcaccgatgaccaatattatgtctatgcacagcgtaggaacagccgcaatttcaatgaactggaacttacggggatatcaaaataccccggttgcagcttgtgcaaccggcagtatggcgataggtgatgcgtttgaacttatccgcagtggacgcactaaaatgatgctggcagggggtggtgaaagcatcagagatccattcattgtctggagtatcgacattcttggagcattgagtaaagaacaggaatctgtcgaaaaggcttgctgcccattcagtaaagatcgtagtggttttgttatgtcggagggtgccgcaatattatgccttgaagactatgattgcgctgttgccaggggagctaaaatactggcggaagtgattggctatggcaataactctgatgcgtcagatatgaccgccccggccccagattgcaaaggacgggtcatggcaattcagatggcgctggaacaggccaaactctccacctcagatattcactatattaatgctcatgggacatcaaccccattaaacgacattaacgaaaccgatgttctaaaaatgagcctgggcgagcacgcttatcgtattcctatttccagtacaaaatcctatacaggccatcttattgccggagcaggagcaattgaatccattttctgtctcaaagcgatagagacagcaacgattcccgcaacgatgcacttgaataaccctgatccgctatgcgatctggattatgtccccaatatccaccgaactcaccaacttattgacaccgctttaaatgttaactacggattcggtggcacaaactgtgcacttattttcaggaaggccgatagatga

SEQ ID NO: 9124 - DNA, 237 bp, Photorhabdus luminescens
atgaaactgtttgaattacttcaatctcaaattactgaattaaccgatatcgaaccagaagatattactctcgacactctacttgatgatattcatttagtgagtctggatttcgtttctattcaggttgcgttaaaaagagaaatgggaattcaactgaatttcgataagttccagcgggataatacgacaacaatcggtgactttgtcaattacgttagtgaattagcaaaataa

SEQ ID NO: 9125 - DNA, 1191 bp, Photorhabdus luminescens
atgacaagtctatatttcgactacaacgccacaacaccgctaagtgttaaagcacagttggcgattaaagacgcaatgtctgtttttgctaatccatctagccactacagcttaagtagcatggcgaaaaagttgctcactgacgctagaatatcgatggctgcattgatgggcacagtcccagagcaaatcctgtttacatcagggggaaccgaaagtaataaccaagccttatccagcttgttagcaacactttccggttcggatctgtctgctcatcatgttattagctcttccattgagcatccgtctgttctggcaccgttactctggtatcagcaacgcggacttcagctaacactgatcaaccccgataatcaaggacggataagtgtacaaagtatccaggaaaacttgcagccacaaacccgtctgatcaccttaatggcgattaacaacgaaaccggcgtgatccagccctatgaagcggtcgcctctttagcaaaagaggccggtgtttatctgcatatcgatgcagtacaggctattggtaaacggccttttagctgtgacacactttccggtgtaacgaccatatctttctccggccataagtttaacggcccgaaaggtattggcgggctttaccatgcaccaggtattcaattaaatcccttgctacatggtggagggcaagaacaaggagtacgcagcggcactgagaacaccttaggacttgctggactggcggcggcagctaaagaatcactgaacagcttgcaaggacgcttcaatacttacaaaacgctcagaacaaccttgctatctcggttagatcaacatcatgttaactacctaattaatggtaataccaatccagcgtttcaggcaccttggactctcaatttaagtttctcgggtattcgtgctgaatcgctagccagcaggctagatttacgtcacggcatctctttatccttaggatcagcctgtagcaataacaaatcaacccaacgttctcacgttctggctgctatgggattacccgatgatcgtattgatagtgcggtacgcatcagcttcggatatgccacaagccaagatgatattgagatattggctaacgccatcaaacaagaaacgtataacttacttaaaatttcagggaaatctttaatcacccaggaataa

SEQ ID NO: 9126 - DNA, 357 bp, Photorhabdus luminescens
atgtttaacaacatcattattgacaacttttgcaatcctgattgccaggggacgttatccgcccccaccattaaactggcattaggtaaccctgtatgtggtgacaaggttgatatcgacctgacattagataaccaagggcgggtaaataatgcctgttttcgtgcatggggatgtaccgcctccctggcaatgtctaaccagttttgtcgccatgctaaaggtaagactctcgaagaattgaatgcattatcgcctgaaggcatagatgcattattaggtgagttagaacccgcacagcaacactgccttgatatgctgcataagctatttgagcagctaaagggaaaaatatga

SEQ ID NO: 9127 - DNA, 1179 bp, Photorhabdus luminescens
atggaaaatatcaaaaatatatatgacggtataaaatctcgtggcggaaatccgttgaagtggctaatagccgatgtcgaccttctctataagttgtctaaagaagaacaacaggaattaaaaacctgtttgcttaaggacgcttttaatttccattatcataataacccttactataaagatatttgtgaaaaacaaggtattaaaccagaagatatccagaactataatgatttggttcgcatcccactcatacccgttgcaacttataaatcagccgaaagtcaccgtttattaagcaaaccattatctgaaatcgaacatgaaatgcgctcaacgggtaccagtggaattcctagcgtttatcgtcgttgccacgatacgatggatcatacagtattggctgtctattccaattatcgcagtatgttcaaagtatctggcggtgccggcctatgcttatgcccgtcaacagaagatattccagaaatggcactggtcaaaatctttaatttcctgacgggtttattagatacccgacgctatatgattaatcaggaccacttctccccagaagatgctttgaatcaattaatccagtggaaaggcaaattcacccggcatttaattggccctccattcatgatccatcgttttattacgttcctaaaagagaataataccaagctcactttagatcgcgatagcatggtaattactatgggcggctggaaacgttttaccggggatatgatctcccgcagcgaattgaatgcagatatcgaagaatggatgggcattccagcttcccggaatcgtgatatgtatggtctggttgaagcaaacgtccttgccatcgaagatgaatataaccataagcatgttcctccttatattcatttctccgtccgtgatcctaacgatttaacacgtgaattacctgatggcgaaaccggacaattagtgatcttagatccactctctgtttccactcccggcatgttactgacagaagatttggtctacttgcgtaccgatcctaataaatcctggcgtaattctcagcgaattcagtttgttatgcgtaccgctgctgctaaagagtttggttgctgtgcggtcaaccttgagagaaaaatgtcagacgatgaaagtacctcagctacacccgcagtataa

SEQ ID NO: 9128 - DNA, 1086 bp, Photorhabdus luminescens
atgatgaaaatggattgcttaattgtgggtgccggtcaagccgggttaagtttagctgctacccttgcggctaagaatattaatgtctgcatattagagcgggaggcacgtattggtgatgtgtggcgcaggcgtccagataatatgctattattcacttcacgcggtatgactcaacttcatggcttaccgttccctggaattaaagaaggttatccagataaaaatgaagtcgctgattaccttgagcgctatgcttcacatcataaccttgcgatacatactcaaaccgaagtggttgaggtgaagcacgatacagatggctatcgtgttaaaacaaaagatggaaaagtatttcatgcaccttgtttggttaatgcaacaggggctaatcaattagttgatattccggcgcttgctgagcggttttctaccgatatacaacaaattacagcagatcaatatcgggaacctaagcaaattaaaacgggcagccgagttgctgtcgttggtgatggtgcgagtggtcgtcagattgctaaagatttggcagcaactgcgaaggtgacattattttgtggttcctcccgtcctctcttacctaatagaatattgggcaaagatatcttttggtggttaagtaaaagcggtctgttatttgccaattattacagtttagtcgggaaaattatgcggcggcgtaatcctatcccttgtggtgatctgaaaaaccatcgattagctgttttggatataaaaatagcgaataggttagttgatataaaagacaataaattatgtgattcgtccggcaatcaatatgaggtggatacggttatctggtgtttggggtataaagatgatacggcatggttaacgcttcccggtgctgcggatgctaatggattcgtttgtaaaaatggtcatgcagaaggtgggaaaaccccttatcctgggttatttatcgttgggcggaaatggttgagtagccgtggttctgaattgatgttaggggcttataaagacacttgtcgggtcgctaaatgggtagaaaattatctgaaagagcatgtaccattaaaatga

SEQ ID NO: 9129 - DNA, 855 bp, Photorhabdus luminescens
atgttacacaaaatagacaaatcaccgtattttattaaattctataaattccatctacaagatctcgttttctcttataatatgcaaacagaatggcatcatcatccttgcatccaattaagtgtatcaccacataattcactcatgaggattgatactgaaaatgaatcgaggcaagcacatggattcattatttcttctaatattaaacataaattacactcggaagggcaactctgttttaatctactgatagatctagccaacccattatgtcatttattactacatcagatgagaggctcagatataatatatttaaatcaagaatcatctggtttgatagcaaactattttactaattgtttacaatcagaaacctctccagatattttcatcttaaataaccttttaggtaaaatagaagattgccattgttatcaagataaacgaatcataaaagcagcctctcttattactgaattaccggttaaatgtatatcctctcgtgaaatatcaaatcaactctatttatccgaaagtcgattcttgcatctctttagagaaaaaatgggaactaatttccgcagctatctattatggaaacgcctgcatcatgctattgatgagatacattcatcagattcactgactttattagcttgtaatagcggattttccgatggcgcacacttcagtcgtacctgtatgacgctatatggattaaggccctctgaattaaaacatgccagtaagaacagaattcaacaagcacaacaaaaatatttcaatttatcatcaacattaacaggtctaaattttacaaagaaaaatatctgggttatgaataaatag

SEQ ID NO: 9130 - DNA, 882 bp, Photorhabdus luminescens
atggatatacgtgatctcaaactgtttctacatctggctgaaagctgccattttggccacacagcaaaagcaatgcatgtcagtccatccacattatcccgccaaattcagcgtattgaagatattttgggacatccattatttttacgagataatcgcaccgtaaaactgacctttgccggcgagcaatttaaacaatttgcccaacagacactgttacaatatcagcaactaaagcattccttgaatcaacaaagcccatctctaagtggtgagttacgtctgttttgttcggtcaccgcggcctacagtcacttaccacagatcctagaccgttttcgtgcagaacatcctatggttgaaattaaactcaccacaggtgatgccgcagatgcggtcaataagatacagtctaatgatgccgatttaggcatcgccggtaagccggaaaaactaccagataatgtcagcttcaccaaaatgggtgaagtcccactggtactgattgcgccttccctcccttgcgctgtacgagcacttgtaatgcaaaagtcccctgactggaataacattcccttcattttgccggaacacggcccatcacgtaagcgcattgagcactggttccgtcaccataaaattaccaacccatcaatttacgctaccgtgtccggtcatgaagccattgtttctatggttgcattgggttgtggagtagcattaattcccaatgtcgttgtagaaaacagccctgaaccggtacgcagtcgcatatctttattggacaatatttctttagtagagccgtttgaattaggtatgtgcgtacagagaagacggcttaatgaacccttgattaaagcgttttggggattgttataa

SEQ ID NO: 9131 - DNA, 1479 bp, Photorhabdus luminescens
atggctaattattttaatacgctgaatttgcgtcagcagttggcgcagttaggtaaatgtcgttttatggcgcgggaagagtttgttgatgagacaggatatttaaaaggtaaaaaagtggttatcgtcggttgcggagcgcaggggctgaatcagggcctgaatatgcgtgactccggtctggatatcgcttatgccctgcgtaaagaggccattgaagaaaaacgcgcttcatggcgtaaagcaacggaaaatggttttcaagtcggtacttatgaagagttaataccgcaggctgatttggtgattaacctgacaccagataagcaacactcttctgttgttagcgcagttcaaccgttgatgaaagaaggcgctgcactgggttattctcacggcttaaatattgttgaagtcggtgaacaaatccgtaaagacatcacggtggtgatggtagcgcctaagtgtcctggcaccgaagtgcgtgaagaatataaacggggttttggtgtgcctactttgatcgcagttcacccggaaaacgatccgaaaggtgaaggtatggcaatcgctaaggcatgggccgcggcaacgggcgcgcatcgcgctggtgttctggaatcttctttcgtggctgaagtgaaatccgacctgatgggtgagcaaactattctgtgcggtatgttacaggctggttcactgctgtgttatgacaaactggtggcagatggtgctgagccgggttatgcaggaaaattgatccagtttggctgggaaaccatcacagaagccctgaaacaaggtggtatcaccctgatgatggaccgtctgtctaacccggcaaaactgcgagcgtatgcgctgtctgagcagttgaaagaaatgatgacgccgctgttccagaaacatatggatgatatcatttctggtgaattttcctccggtatgatggctgactgggccaatgatgataagaaactattaggttggcgtgaggaaaccggtaacacttcgtttgagaattcacctgaatatgatggcaaaatcagtgaacaggaatattttgatcacggcgttttaatggttgctatggtgaaagcgggggttgaactggcattcgaaattatggttgataccggtattattgctgaatctgcctattatgagtctctgcatgaattaccgctgattgcgaatactatctctcgtaaacgtctgtacgaaatgaatgtcgttatttctgacacagcagaatatggtaactatttgttctctcatgttgcggtcccactgttgaaagagaagtttatgggttcgctacaggcgggtgatttaggtaagcccgttgtagataacggtattgataacgcccagttgcgcgatgtaaacgaggctattcgtcaccacccaattgaagttgttggccgcgtattacgtggttacatgacagatatgaaacgtattgcagttggtggttga

SEQ ID NO: 9132 - DNA, 2028 bp, Photorhabdus luminescens
atgcgattaaatcctagccaacaacaagctgtcgaatttgttaccggtccttgtctggtcctggcgggggcgggttctggtaaaactagagtgatcaccaataaaattgctcatcttatccgtacttgtggctatcagcctcgccatatcgccgctgtgacgtttactaataaagccgcacgggaaatgaaagagcgtgtagcacaaactctggggcgcaaagaggctaaggggttgatgatttcgactttccacactttggggttggaaatcattaagcgcgaatacaaaacgttaggaatgaaaagcaatttctcgttatttgatgatcaggaccagatggctttgttgaaagatttaacagccgatttactggaggaagataaagatctattacaaaaactgatctccaccatttcaaattggaaaaatgatctgctttctccacagcaagttttggcattggtccgttctgctcaggagcaccagtttgctgaatgttatcgccgttatgatttacatctggcgagctgtaatgtattggattttgacgatttgattaccaaaccgactttgctaatgcagcgtgatgaagaagtcagggagcgttggcaaaaccgtattcgttatctgttggtagatgaatatcaggacactaataccagtcaatatcaactggttaaattgttggtggggcaaagggctcgttttacggtggtgggtgatgatgaccagtcgatctattcatggcgcggtgcaagaccacaaaatttggtgttactgaaagaggatttccctaagcttaatgtgatcaaattagaacaaaactatcgttcctctggctgtattctgaaagcagctaatattttgatcgccaataaccctcacgtgtttgaaaaacggcttttttctgaactggggtatggtgatccattgaaagtgattacagctaataatgaagagcatgaggcggaaagggttattggggagctgatggcacatcactttatcaataagacccaatataaagattacgctattctctaccgaggaaatcatcaatcccgcgtgtttgaaaagatgctgatgcaaaaccgcattccttaccggatttctggtggtacttctttctttgcccgccctgaaattaaggacttgctagcttatctgcgggtgctgactaatcccgaagatgacagcgcattcctaagaattgtcaatacgccaagacgtgaaattggtgctgctaccattcaaaaactgggtgagtgggcgaatcagcgcaataaaagtctctatcaggctagtttcgatctcggtttggaacaaagtctaactggccgcggtttggcggcattacagcgttttattcactggatggatgagataactcgtcaggttgaacgagatcctttgctagcggtgcgtgatctacttcatggtatggattatgaaagctggctgtacgaaacatcaccgagtccgaaagcggctgaaatgcggatgaaaaatattaatcagttattcacttggatgagtgaaatgctggaaggtgatgaactgaacgaagcaatgactttatctcaggtggtcgcgcgtttcacattacgggatatgctggagcgagacgaagatggtgaggagtttgatcaggtgcaattgatgactttacatgcttccaaagggttagagtttccctatgtatttctggttggcatggaagaagggctgttgcctcatcagagcagtattgatgaagaaaatattgatgaagagcgacgattggcttatgtagggatcacccgagctcaacgggagttattctttactttatgtaaagaacgtcgtcaatatggcgagttaatccgtccagaaccaagccgttttttgcatgagttgccacaggatgacttacattggccacaagataaaaaaatagtgactgccgaagaaagaatgcaaaaagggcaatcgcgtattgcggatatcaaatcgcgtttagggcttggacaaaaaaataagtcataa

SEQ ID NO: 9133 - DNA, 1503 bp, Photorhabdus luminescens
atgctgagttcttcttcgctctatgcggctatcgacctgggttcaaacagttttcatatgctggttgtgcgtgaagtatccggcagtatgcaaatactggcacgaatcaaacgtaaagtcaggctggccgccggattagataaaaataaccgcttatctcaacaggcaatggagagaggttggcaatgtctcaggattttttctgaacgcttacaagatataccaccatcacaaatccgcgttgttgctacagcaactttacgtatcgctgaaaattcagacgaatttgtgggaaaagcatcagaaatccttgattgcccggttaaagtaatcagtggcgaagatgaagctcggcttatttatcaaggcgttgcccatacaactggcggccctgaaaaacgtctggttgtagatattggtggtgcaagtacagaactggttacggggaatggggcaaaagcctctcagttatccagcctaagtatgggttgtgttacctggcttgaaggctactttaatgaccgtagcctgacggaagaaaatttcgccagagccgaagctgccgcacatgaaacgttgaaactcattgccccaaaactgatcgaacaaggctggcagatttgtgtaggcgcttccggtaccgttcaggctctgcaagaaatcatgattgctcagggtatggatgaactgatcactttgccgaaacttcaagagctcaaacataaagcgattgaatgcggtaagctggaagagctggaaatagaaggattgacgctggaacgggctttagttttcccaagtggccttgctatcctgatagcgattttccaggcattaaatattgaaagtatgatccttgcgggcggcgccttacgggaaggtcttgtttacggcatgctggatttaccaatagaaccagatattcgtaccagaacactacgtaatatacagcgacgttttcagctagacgttgaacagtctcaacgggtcaaacaattggctgaacacttcctacaacaggttgctaaaccttgggaacttgatagccgatgtcatgaattattacaaagtgcctgtttgatacatgaaattggcctaagtattgatttccatcaagctccatcacatgcagcctatctgatcaattatctcgctctccccggctatacgcctgcacagaaaaaactcttagccacattgctaaagaaccagagcggccctattgatttgttttcctttaatcaacaaaacgccttacctctgatacaagctcaacgtttatgtcgtctgttgcggttagctatcatcttcgccaaccgtcgtcgaaatgacacgctccctgctctacgtttaaaagtgagtgatgaagcgttaacaataacgttacctcatggctggctaatgcaacaccctctgagggcagagtctttacagcaggaaattcagtggcaaaaccatgctcaatggtcacttgttttaggcgagcaggatgctcaaacctga

SEQ ID NO: 9134 - DNA, 1287 bp, Photorhabdus luminescens
atgagtaaaacacacttgacagaaaagaagttttccgacttcgccttgcaccccaaggttatagaagctcttgataataagggcttttctaattgtacaccgatacaagcactgacattgcctttcactgtcgaaggtcgtgatgtcgcggggcaagcgcaaaccggtacggggaagacgctagcatttttagcgtctgcttttcattatttactaactcatcccgcagcggaggagcgtcaaaccaatcagccaagagcgctgattatggctcctacccgcgagctcgctgtacagatttactctgacgcagaagatctggcacaggcaacaggtctaaagatgggtcttgcctacggcggtgatggttacgacaagcagctgaaaatactggaatccggagttgacatccttatcggcactaccggacgtctaatcgactataccaaacaggggcacattaatctgaatgcggtccaagttgtggttcttgatgaagctgatcgcatgtacgatctcggttttatcaaagatatccgctggctattccgtcggatgccaccagtaaacgaacgcatgaacctactgttttctgccacactctcttaccgagtccgagaactggcatttgagcaaatgaatcatgcagagtatatcgaggtagaaccgttacagaaaacaggacaccgcatccgcgaagagctgttttatccttctaatgaagaaaagatgcgcctgcttcaaacgttgttggaagaagagtggcctgatcgatgcattattttcgccaatacaaaacatcgttgtgaagatatctgggcgcatctggctgctgacggacatcgagttgggttactaaccggtgatgtagcacaaaaaaaacggttacgcattctggaagaattcagcaacggcaatattgatattctggttgcaactgatgtcgcagcccgtgggttgcacattcctttagtcactcatgtttttaattatgacttaccagacgactgcgaggattatgttcaccgcattggccgtactggtcgtgcaggtgaaagtggtcattcgatcagcctggcctgtgaagaatatgcactaaacctgccagcgattgaagattatattcaacactctatcccggtcagcaaatataacagtcaagccttgctgaaagatttaccggcacctaaacgccgataccgttcgcgttcaggaaatcatcagcgccgtaacaatttgtcgcatcgtaataatacaccacgtaataaccgtaaacgttcaggctga

SEQ ID NO: 9135 - DNA, 327 bp, Photorhabdus luminescens
atgagcgacaaaattattcatttgagtgacgctagctttgatactgacgttcttaacgcagcaggtccagttcttgtcgatttttgggctgcctggtgtggaccatgtaaaatgattgcacctattttagatgaaattgccccagaatattcaggcaaactgactattactaaattgaacattgatgacaacccggcaactgctcctaagtatggtatccgtggtattcctacactgttgctgtttaaagatggtcaggttgctgctacaaaagtgggagcactgtcaaaaactcaattgaaagaatttttggatgctaatctctga

SEQ ID NO: 9136 - DNA, 1260 bp, Photorhabdus luminescens
atgaatcttaccgaattaaagaatacgccggtatctgaactgattacacttggcgaaaatatggggctggaaaatctagcccgtatgcgtaaacaagatattatcttctctatccttaagcagcatgcgaaaagtggggaagatatcttcggtgatggcgtgttggagatattgcaggatggctttggattcctccgttcagcagacagctcctaccttgccggccccgatgatatctacgtttctcccagccaaatccgtcgttttaacctccgcaccggtgacacaatttcaggtaaaattcgtccacctaaagaaggtgaacgctattttgccctgttgaaggttaacgaagttaattttgacaaaccagaaaatgcccgcagtaaaattctttttgaaaacttaaccccgctgcatgctaatagccgcctgcgtatggaacgtggtaatggttccactgaggatctgactgcccgtgttctggatctggctgcaccgattggccgtggacaacgtggtctgatcgtcgcgccaccaaaagcgggtaaaacgatgttgctgcaaaatattgccgctaacatagctcacaatcatccagattgtgtattgatggtacttctgattgatgaacgtccagaagaagtcactgaaatgcaacgcctggtaaaaggtgaggttattgcttctacttttgatgaacccgcttctcgtcacgttcaggtggcagagatggttattgagaaagcaaaacgtctggttgaacacaaaaaagatgtgattattctgcttgactctattactcgcttagcacgtgcctataatactgttgttcccgcatccggtaaggtattgactggtggtgtggatgctaacgcgttacatcgtccgaaacgtttcttcggggctgcgcgtaatgtggaagagggcggaagcctgaccattattgcgactgcgttggtggatacgggttctaagatggatgaagtgatttacgaagagttcaaaggcactggtaacatggagctgcatctctcccgtaaaattgctgaaaaacgtgttttcccagctattgattacaaccgttctggtacacgtaaagaagaactactcaccacctctgaagagctacagaaaatgtggattctgcgcaaaattattcatccgatgggcgaaattgatgcgatggaattccttatcaacaaactggctatgagcaaaacgaacgacgatttctttgacatgatgaaacgttcatag

SEQ ID NO: 9137 - DNA, 1086 bp, Photorhabdus luminescens
gtgaatattctcagcatgaatattgaaattttttatgtttttctgttttcttttgcgtttttgtttatggctcgcaaaatagcaaagaaagttggccttgttgataagcccaattatcgtaagtgtcatcaggggttagtgcctctggttggaggaatatcaatatttgttggcatctgttttgcttttgttatcacaaaagaatttattcctcacaagtggttatatttggtttgtgctggtgtattggtatttgtcggtgcattggatgaccgttttgatatcagcgttaaggtccgggcaaccatccaagctctggttggtattgcgatgatgtattttgctggcctgaagttagatagtcttggttatgcttttggcccttgggacatgacacttggaccgtttagttatgttgtgacactatttgctgtctgggctgctatcaatgcatttaatatggttgatgggatagatggattattaggcggattatcttgtgtctccttcggtgctttggggatcttactgtatcaaagtggtaatacggcactagcattatggtgttttgcatttattgctgccattctcccttatattgttcttaatcttggtttattaagccaacgtttcaaagtgtttatgggggatgcgggcagtacactgattggttttaccattatctggttgctcattgaatctactcaggggaatgagcgccctgttaatccagttactgcgttgtggattgttgccattccattaatggatatggttgctattatgtaccgccggttacggaagggaatgagcccattttctcctgacaggcaacatattcaccacctagttatgcggtctggattctcatcacgtcaggcttttattttaatcactgttgcagccactttattagccgctgtcggcattactggagaatggctggaatttgtgcctgagtggataatgttggcactgttcttgcttgcatttgtgttgtatggctattgcctcaagcgtgtatggaaggtagctcgtttcattaaacggcaaaagcgtcgtatgcgccgttcagctaaccattaa

SEQ ID NO: 9138 - DNA, 1056 bp, Photorhabdus luminescens
gtgataaaatcagaaacgaaatctattcaggataaacaagctctggagcatgagctggatatcagagctttgtgcagtgcgctatggcatggaaaggtatggatcattgtactggcaataattttcgcaaccgcggcgctaggagcatcttatctgatgcaacaaaaatggagtgccaccgcaatcactgatctgcctacgactaatcagttgggaagttattactctcagcagcagtttttgcgcaatctggatactcacattaatatttcattggaaactcagttaccgtctatttcagaagaagcctataaggagttcatcactcaggttgccgcatatgatactcgccgtgaattctggttgaaatctgattattacaagcagcagcaggaaggcgatgccagagctgatgcggccttattagatgaattagtcaataatattcagtttattcctcatgatgataaaaaagtgctgaatgacagcattaaactgaccgctgagtcttctggacaagcaaatcaactcctgcgccagtacattgcttttgccaatagtcgtgccagtactcatttaaatgatgaagtaaaaggtgcatggattacccgtgcccaatctatggatgcattggttaagcgtcaagaaatggtcgctaaagcggtttatagccgcgaaatgaatgtattacaacagtccctgaaaattgcggaaaaacaagggattcggcgcaatcaaacggatacaccggtggatcagttgcccgattcaaaaatgtttatgttaggggcgccgttgttacaggctcaacttgagactttggaagcaatagggcctaagtatgatgtggactatgaccggaatattgcaatgttagcagcatggaatgttcacccgacgttacaggatcaattccaggcttaccgctatttgagaacaccagaggagcctgttaccagagacagccctcgcagaatgtttttgatgatcatgtggggtgcagttggcgctttagtgggagccggcgtggcattggttagatgctcacgtaagtaa

SEQ ID NO: 9139 - DNA, 1152 bp, Photorhabdus luminescens
ctgcaagttactgactataagagagtcactgtgaaagtgttgactgtgtttggtactcggccggaggctatcaagatggctccgttagtacacgcgttggcaagggatgaagccttcgaagcgaaagtatgtgtcaccgcccaacatcgggaaatgttggatcaggtgttacacctttttgagatcactcccgattttgatctcaatattatgaaatcagggcaagatctaacggatattacctgtcgtattttggcaggattgaaacctgttttagcagaatttaaacctgatgttgtattggttcacggagatacgacaacaacaatggcaaccagtttggcagcgttctatcaacgtatccctgttggtcacattgaagctggattaagaacgggtgatctttattccccttggccggaagaggcaaaccgtaagattgcagggcatctggcaatgtatcatttcgctccgacggaaaattcccacaataatttattgaaagaatccattgcagataatcgggtttttgttaccggaaatacagtaattgatgcgttgctgtgggtacgcgatcgaataatgaatgatgaggctatgcggagtaagctagcgaagcattacccgtttattgatactaataaaaaaatgattctggtgacggggcatcgtcgtgaaagttttggtggtgggtttgagcgaatttgtgaagctttggcacagatagcccgcgctcatccagatgtgcaagtagtctatccggttcatctaaacccgaatgtcagtgagccagtaaagcgcattttgcatgatattgataacgttattctcattaagccccaggattatttgccatttgtttatctaatgaaccatgcctatatgatcctgacagattccggtggtattcaggaagaagcgccttctttaggaaagccggtattggtaatgcgtaatactactgaacggtcagaggcggttgatgctggaacagtacgtttggttgggacagaaacaaaaactatcgtggaagaggtgactcgattgttgacagacgatgctgcctatcagcgaatgagccgcgctcacaatccttacggggatggcgatgcctgtcaacgtattctcgacgctttgaaaaaaatcaggtga

SEQ ID NO: 9140 - DNA, 1278 bp, Photorhabdus luminescens
atgagctttgaaactgtgagctttgaaactatttctgttattggtcttggttatattggcttgccaacggcagcagcgtttgcatcccgtaataagaaagtcattggcgtggatgttaatcagcatgcggtagaaaccatcaaccgtggtgcaattcatattgtagaaccggatctagacaaagtggtaaaagttgccgtagaaggtggttacctgaaggcagtgattgccccgttacccgcagatgcttttctgatagcggttccgacgccttttaaaggcgatcatgagccggatatgacgtatgtccgttccgcagccgaatctgtggcgccggtgctgaaaaaaggtgatctggttattctggaatctacctcaccagtaggcgcgacggagcagatggcagaatggctggccgcagcgcgtcctgatttaactttcccacaacaggttggagaagagtccgatattgatatcgcttactgtcctgaacgtgtgttgccaggacaagttatggttgaattaattaagaatgaccgcgttgttggcggtatgacattaaaatcttcggccagagctagcgagttgtataaaattttccttgaaggtgaatgtgttgtcactaattcaaggactgctgaaatgtgtaagctgacagaaaacagtttccgagatgtaaacattgcatttgccaacgaactttctctgatttgtgctgatcaaggtatcaacgtgtgggaactgatcagtttggcaaatcgccacccgcgtgtaaatattctccaaccaggccctggcgtgggtggtcattgtattgctgttgatccgtggttcattgtttctcaaaacccgaaacaatcacgtcttattcatacagcacgtatgattaatgatgacaaaccattgtgggttgtgaatcaagtaaaagcggctgttgcggattgtttggctgaaagtggaaaacgtgcaagcgaagtgaaaattgcctgttttgggttggcatttaaaccaaatattgacgatttgcgtgagagtccagcggcacatatcaccggtatgattgcacaatggcatacaggtgaaacgttggctgtagaacctcatattcatgaattatctgcacctttgaaggaaataactcaattagttaatctggaaaaagcgctggaagaagcagatattctgttgatgctggtagatcataatcagtttaaagctgtaaacagtcatgaaattaaacagaagtggattgtggatacaaaaggagtctggcgttga

SEQ ID NO: 9141 - DNA, 1071 bp, Photorhabdus luminescens
ttgagacgtattctaatcacaggtggtgcaggttttattggctccgcggttgtgcggcatatcattaataatacagaagacagcgtggttgtagttgatagcctgacttatgccggtaatctggcgtctcttgccccggttgcggatagccctcgttatgcgtttgaacaggttgatatctgtcaacgtggagcgctggatcgggtctttgaacaatatcagccggattgtgtgatgcatttggcggcagaaagccatgtggatcgctctattgatggccctacggcatttatcgaaaccaacattgtgggtacttatactttgttggaagctgcacgtgctttctggcagaaactcaatgaagagaagcaagctgttttccggtttcaccacatttcaacagatgaagtgtatggtgatttacatggtgaggagggcttctttaccgaaacaacaccttatgcgccaagtagcccatattcggcgtctaaagcgtccagcgatcatttggtaagagcatggcaccggacttatggtttaccggtcattatcactaattgttcaaataactatggtccttaccatttcccggaaaaactgatcccactgatgatcttaaatgcattagcaggaaaatctttaccggtatatggtgaagggaaacaaattcgcgattggttgtatgtggaagaccacgccagagcgctctatttggttgtgacagaagctgaaccgggcaaaacctacaatattggaggtcataatgaacgcaaaaatattgatgtggtttgtgcgatttgtgaacttctggaagaattttgtcctgagaaacccgtggggattgcttattatcgagacttgattacttatgttgcggatcgcccaggccatgatatgcgctatgccattgatgcggcgaaagttgagcgtgagctaggctggagaccacaagagacatttgaatcaggtattcgtaaaacagttcaatggtatttggaaaatgaaaactggtggcgtaaggttcaagatggttcttatgccggtgaacgccttggattaggtaaaaactga

SEQ ID NO: 9142 - DNA, 882 bp, Photorhabdus luminescens
atgaaagggatcattctggcaggtggatcgggaactcggttgcatccgataacacaaggtgtttccaaacaactactgccaatttatgataagccgatgatttactatcctttgtcagtactcatgctagcagggatacgtgatattctaattatctctacgccagaagatttaccttctttccgccggctgttaggtgatggtaacagatttggtattcacttgagctataaagaacagccatcaccggatggtttagctcaggcatttttgattggtgaggagttcattaacggcgggccttgctgtttggtattgggagacaatatctactttggacaaggatttagcccaaaactgaagaatgttgtttctcgtggcaaaggggcgactgtttttggttatcaagtgatggatcctgaacggtttggggtggtggaatttgatgacgtgttccgcgttctttccattgaagaaaaaccagaaaagccaaaatccaactgggcggtaacgggtctctatttctacgataatcaagtggtagattttgctaagcaggtcaagccttctgccaggggtgaactagagattaccagtattaaccagatgtatttggaacgtggtgaactaaacattgagttgttagggcgtggttttgcctggttggatactggcactcatgacagcctgattgaagccagcacttttgtgcagaccgtagagaagcgtcaaggttttaaaatcgcttgtcttgaagagatcgcctggcgtaatggttggctggatgatgcacagttaagagaaacagtaaaatccttgtcaaaaactggctatggccaatatctgctggatttgctccatgtccgtgcgcgccaatattga

SEQ ID NO: 9143 - DNA, 591 bp, Photorhabdus luminescens
gtgcaggctaaagtacctgcgcagcgattggatcttattgatggattatccgcgttgggcttttcgttagtagaaggggaagtagacctttccttaatgattggcatagaaaatgctgaaaatgctaaagacaatcctgagagtaacctacttttggctgagaggcgagatatcccgatgttgaaggaggtggcttccaacgtatttcctttgagtcgtttccgaaccccgtggtatcaaccacaggatagtggtcgtttttacgcgacttgggttgaaaaagcggtattagggacatttgatcatcagtgtttactggtaaacggagataatgagcaacccgcagggtttgttaccttacgggatataggcgcaggagaggctcgtataggtttgctagccgtattcccaggaaatattggctgtgggattggctcaaaattaatgttggcggcgcagcagtggtgtcagcaccaccaaatacatcagttaaggattgcgacacaaaccagcaacattgctgctttgcgcctttatacacgcagtggtgcgtttgttgaaagcaccgcgtattggttatataggggatga

SEQ ID NO: 9144 - DNA, 1131 bp, Photorhabdus luminescens
atgattccatttaacaaaccaccagtagttggcactgaattagattacatgaagcaagccatggaaagcggtaagctttgcggggatggtggtttcaccaagcgttgtgaagagtggatggaacaacatttcaattgcccgaaagttctattgacaccatcctgtaccgctgcactggaaatggcggctattttgctgaatatccaacccggtgatgaagttattatgccgagtttcactttcgtttccagttctaacgcgtttgtactgcgtggagcaactgttgtatttgtggatatccgtccagataccatgaatattgatgaaaccaaaatcgaagcagcaattacagctaaaacacgcgtgattgttccagtgcattatgccggtgtagcctgtgaaatggataccattatggccttggcagagaaatataatctgtttgtcgtggaagatgctgcacagggagtaatgtctacttataaagggcgtgcattgggaactatcggacacattggttgctacagtttccacgaaaccaaaaactactcctctggtggtgaaggtggtgcagcacttatcaatgatcaatcattgatttctcgtgcggaaattgtccgtgaaaaagggactaatcgtagtcagtttttccgtggtcaagttgataaatatacttggcgcgatatcggttcgagttatcttatgtcggaacttcaggctgcttatttgtgggcacaattggaagaggctgagaaaatcaatgagcgtcgtcttgccttgtggaatacctattatcaagcattaaaaccgctggttgatgctggtctcctgacattgccggtcataccggaagagctggagcataatgctcacatgttctatatcaagctgaaagatgttgaagaacgctcagcattcaatagctatatgaaggacgcaggtgtactaacagtattccattatgtttctctgcacaccagccccggtggtgaaaaatttggccgttttcatggggaagattgttttactacttgtgaaagtgatcgtctagtgcgcttgccgatgttttacaacataacagacgctgaacagcagattgtcatcaaacatattcgggaatacttcgcctga

SEQ ID NO: 9145 - DNA, 1251 bp, Photorhabdus luminescens
atgtcgttggctaaagcatcaatatggactgcgggctctacactgataaaaatcggtgtagggcttttaatcgttaaattactggcggttgcttttggccccagcggggttgggcaggcgggtaatttccgtcagcttattactgtgcttggggtattggctggtgccggtatttttaatggtgtgacgaaatatgttgctgagtatcagcagcagccagaaagattgcgtgcggtattgggaacatcttctgccattatccttgggttttccacgctgttggcggtgatttttttgctgtttagcgggtctatcagtacgggattattcggccatcaagattatgagtcagttgtgcaggcactcgcctttattcaaatggggattgcttttgccaactattttttggctattttgaaaggataccgagatgcacagaggaatgcgctggcgattatttttggtagcgtgattggcgtgatggcctattatctctgttttgttcttggtgggtatgaaggcgctttggcgggtttggctttagtgccagcattaatcatatttcctgcgggattgatggtttggcgtctcaaagcggtatcaatttcaagctttaagcccatgtgggataaagtactggctggccagcttggcaagtttacccttatggctttgctgacttctattaccttaccggttgcctacattatgatgcgaaatctgctggcagcgcattatagttggcgcgatgtgggtatctggcaaggtgtaagcagtatttccgatgcttacctgcaatttatcacagcatcttttactgtttatctgttgcctacgctttcacgattgcagggtaagaatgaaatatcaaatgagataattaaggcgctgaaatttgttttgcctgcggtggctattgcaagttttactgtatggctgctgcgtgattttgccatttggttactgttttctgacaaatttactgctatgcgtgatctatttgcctggcagttggtgggtgatgtcttgaaggtaggcgcttatgtttttggttatctggtgattgccaaggctgcgttgcgtttttatgtgttgacggaagttagccagtttttattgcttactggttttgcccactggcttattcctgtaaatggagcgttaggtgcagcacaagcctatatggcaacttacattatttatttcaccctttgttgtggtgcatttcttatttatcgtaggcgagcatga

SEQ ID NO: 9146 - DNA, 1086 bp, Photorhabdus luminescens
atgacaacccttattcacgttttgggatctgatatcccacatcacaatcgaacagtactgcgcttttttaatgacgtcttagtacaagaaattggttttttagccaaaccgaagtttatggtggtgacgaagaatcgcgctttattggatgattgcccggcattagatatggcattcttcgacagtaaaaaatctctggctcaggcggttattgctcaagcgtgttcagatagagattgccggttcttttttcatggtcaatttaatgtgagtttgtggttggcgctgttgtcaggaaaaatcaaacgtcatcagttttggtggcatgcttggggagctgatctgtatgaagactcccagcagttaaaattccgtctattctatttcttgcgccgtttggcgcagcgtcgggtagggcatgtgtttgcggttcgtggagatctctatttttattctcaacatcatccaaacgtaccaacatcattgctctattttccaaccagaatggaacctgctttgacaattgcagaaagagtacctgttgaagatggcaagatgacaattttgttggggaattctggtgatcgatcgaaccgccatattacggcattgaaagtaattcataagcagtttggcgataaggtgcgaatcattatcccaatgggttatcctgaaaacaatcaggtttatattaatcaggtagaacaagctgctttatcattgttccggccagaaaatttgaacattattaagcaaaatatggcgtttgatgattatctggcattattgcgccgttgtgatttagggtatttcatgtttaatcgccagcaggggattggaacaatttgtctgttgatacaatttggtgtgccatttgtacttagtcgtcagaatcttttttggcgagatttaatagaacaacaggtgccggtatttttcgccggtaatcctttagatagccaactgattgcagaagcacaacggcagatgctctccttggatagaaatgtgatagctttttttagcccgaactttattgatggctggcggcaggcgttggcaaaagcggcgggagagcagcaatga

SEQ ID NO: 9147 - DNA, 1380 bp, Photorhabdus luminescens
atgactttaacgcagtttggcggattatttgttgtttatttaatatcactggttttcatcctgacgttgacttatcaggaattccggcgtgtacgctttaattttaatatattcttctcattgctttatttgctgacattctattttggttttccactgacatgtttgttggttttccaatttgatgttgaagtggtacctgtggacgccttactacacgctctactggcttcgacctgcttttatggtatttattacgtcagttataaaacacggctaagaaagccatctatgcagcctaaagcaccggtattcaccatgaaccgggtagaaactaactttacatggttactactggcatcagttgcggtggtgacagtggggctgttctttatgcaaaacggttttctactgtttaaattacagtcatacagtcaaattttttccagtcaggtttccggtgttgccctgaaacggttcttttacttctttattcctgccatgttggtggtttatttcttgaagccgacccagttacgctggctgttttttctgattagtacggttgcttttgggatactgacttatgtcgttgttggcggaacacgggctaatattatcattgcgttcgcgttgtttctgtttattggcattgtgcgtggctggataaccttgtggatgttggtaacggcgggcgcaatagggattgttggcatgttttggttggcactcaaacgctatagtttggatgtcagcggcgcagaggcgttttatacttttctctaccttacgagggatactttttccccgtgggaaaattttgcattactgctgaataactacgacaaaattgattttcaggggttggcacctattatccgtgatttctatgtctttattccaagttggctttggccaggacgtcctgatgctgtgttgaattctgcgaattattttacttgggaagtactggataaccactctggtctggcaatttctccgactctgataggctctctggttgtgatgggaggcgtgctgtttattccggttggtgcgattgttgttggattgataattaagtggtttgactggatttatgaattaggaaaacaggagactaatcgttataaggccgctatcttgcaggcattttgctttggcgcgatcttcaacatgattgtgttagctcgtgaaggcgtggattcatttgtttcccgagtggtatttttctgtattatttttggcttatgtctggtaattgctaagttgttgtattggctatttgagagtgcagggcttattagaatgtatctgactggcaaccgagtggtatcacaaaaatgtccgctgcaatgtgaggaaagaaaatggagctaa

SEQ ID NO: 9148 - DNA, 738 bp, Photorhabdus luminescens
atggagctaaacaatattcctaaatacagtattcgtggtctgaatatttggggcttccgcgatatggcgcactttcttgaccatatttttcaacgcgaacaggtaaagacgggtactatggtggcgattaatgcggaaaaagttctgacggcagaggaagatacagctttaagtacactgctgagtgacgcagaatatctgtatgctgatggtatcagtattgtacgtgctattcgccgtaaataccctgacactgaagtttctcgtgtagcgggtgctgatttatgggaagctatcatggagcgtgccggtaaagaaggcacacctatttttctggttggaggtaaaccagagatattgaaacagactgaaagcaaactgcgggctcagtggaacgtcaatattgttggcagccagaacggttatttcacgccagaagaacgtaatgctgtttttgaacggattcatgccagcggtgcggtgattgtgacagttgcaatgggatcgcctaaacaggagatttttatgcgtgactgtcgaaaaattcattcgaatgcgttgtatatgggcgttggcggtacttatgacgtatttaccggccatgtgaaacgtgcgccaaaagcatggcagaatttggggcttgaatggctttatcgcctgttatcacaaccaagccgtattcgtcgccaatttaagttattgaaatttattggatattattacagtggtcgtctgtaa

SEQ ID NO: 9149 - DNA, 1392 bp, Photorhabdus luminescens
atggacagggaatttatggcagatcaacaacatagcttgcaacggggtttagaagcccgtcatatagagctgatcgcactaggcggcacaattggtgtcggtctgtttatgggctcggccagcacactgaaatgggctggtccttccgttttgctggcttacattattgccggaatttttgtttttttcattatgcgatcgatgggagaaatgctgtttcttgaacctgtcacgggttctttcgcctcttttggacataaatatctcagcccatactggggatgcctcaccgcttggggctattggtttatgtgggtggcggtagggatatcagaaataacggctattggtgtttatgctgagttctggttccctgaacttcctcagtgggtatcagcattaattgcggtggcgttggtcgctttggcgaaccttgcggcggtacgtctttatggtgagctggaattttggtttgccatgattaaggtgaccacaattattgtcatgatcctgattggcttgggattgatatttttcggtattggtaatcaatggcagcctattggattggataatctgactgtgcatggtggtttctttgcgggtgattggcaagggtttctgtttgcgctctgtattgtggttgcatcttatcagggggtggagctggttggtatcactgcgggggaagcgaagaaccctcaggtgacattgaaaaaagcgattaacaatattctctggcgtatcctgattttctacgtgggtgcgattttcattgtagtgacattatttccatggacagaagtgggtgcacagggcagcccgtttgtcatgacatttaccaaagtggggatcacctcagcggcagccgtgattaactttgtggtattgacggccgcgctttccggctgtaacagcggtatgtacagtggtgggcggatgctttatgcgctggcgcaaaaccgtcagctaccttcatcattgactaaattgtcaaagaatggggtaccggtaattggtattgctatcactatcttgtgtttgattgtgggctctagtttgaattatttgatcccaaatccgcaggcggtttttgtttatgtttacagtgccagtgtgctaccaggaatggtaccgtggtttgttattctgatgagccaattgcgttttcgtcagtatcatcaacaagcactgaaacaacatagttttaaatctatcctgttcccctatgtaaattacctgacattggcatttttatgttgtgtgttggtagggatggcaattaacccggatacccgtttttcattgctggtaggtgggggatttttgttgatagtgtcgctgatttattggttggtgaagctttttaacggtaaaaaaccaaaagcctga

SEQ ID NO: 9150 - DNA, 102 bp, Photorhabdus luminescens
gtggctaatgggactcgaacccacgacaactggaatcacaatccagggctctaccaactgagctatagccaccataacagctatttactgctaaatacttaa

SEQ ID NO: 9151 - DNA, 1617 bp, Photorhabdus luminescens
atgtccacacctatacctgccattaaacgtctcgatcatcttggccttatcgccgctttttgtcatgaagccggtttaccccgcatgattgatgccattatcccaaaatattcatcgcataccgtctctcacggcgacgcttttctggcgatgatccttaacgggctggggtttcacagccggacattgcacatgttttccggcttttttcaacataagccgattgcgcgtttaattggcgctgacattgaagctgaacaccttaatgatgatgtgctcggccgaacactggatgccttatatgaagcgggggtgtcggaagtttatcaggtgcttgctgagcaagtagttgataaattagggttaaatcccgattccgttcatttggatatcacgagttttcatgtcgatggtgactatgacagcgcgttgggagatgacacaaaacgcattgcactggtgccgggttatagccgggatcaccggcctgaactgaaccaggttgtccttgaactgatttgcgaaaatcaggcaggtatccctgtctatatgcaggctatgagcgggaatacgaatgatgccaaagcctttgcccagacgatcaaaacccatattcaatgcctgaaagcagcacaaaacagccgctactttgtggccgatgccgccctttatactgaagccgcgatcgcttcgcttcatcagcaaaaacaacgatttattacgcgtgttcccctgacgatcaaggaagctaaacagtctctcctgaacgtgacagcggagcaattcagccccatcagtgagggctattcaggctgctgggtgacgtcatcatatggcggcgttcctcagcgttggttactggtgaacagtacggcggcagaaaaacgtgaaaaccagactttccggaaaaacacactcagggaaacagaaaacgagtctaaacagttcgacaaactgggcaaaaagccctttgcctgccgggaggatgccttacaggcactgcatgattttgagtctcaatgccagtttatcggcatcgcctcgccggaaattcaggcgattaccgcgtatgcggggcgcgggaaacccggcaagcatcaaccccccaaatcggttcattatcaattagccggtcaggcttatacccggttagacaaggtgaagcaggccagattgcgggtcgggaggtttattttagcgaccaatgaacgggatgaaggacggcttgatatggcggcgttactggctaattataaggcacaacaaaaggtggagcggggttttcgcttcctgaaaagtccggaattcctgacgtctgccattttcctgaaaaaaccggagcggatagaagcgctgttaatggtgatgacatgttgtctcatggtttatgcggcgctggaacataaaattcgccatgaattgaaacaaaatgtgccgtttttccccgatatgaagaacaaaccgacacaatcccccaccgcgcgttgggtatttctggcctttgaagggatcagcacctttgaatttcaagaacataaaatggtgacaggaatgcaatcttaccaccatgagcttttgagtttattaggtgcacaatataaagcggtttattcctga

SEQ ID NO: 9152 - DNA, 174 bp, Photorhabdus luminescens
ttggcattttttcttggttcctttggcgctcataaattttatctgagcaaaatcggtatggggattttatatctgttattttgctggacatttatccctgcacttatcgcatttattgaatttattatttatctttgcacttccgatgaagattttgccaaaaaatatggttag

SEQ ID NO: 9153 - DNA, 1239 bp, Photorhabdus luminescens
atgctgaaagttctattactgtttgtggtactcattgttggtattgtgctcggtccgataattgctggccatcagggatatgtgctgattcaaactgacaattacaacattgaaaccagtgttaccggcctgttcattatatttgttcttttacaactggtactctgcctctttggttggtgctaccgcagagttatacgcacaggctcacgtacccgtggctggttccttggacgcaaacgcagccgtgcccatgcccaaacaaaagcagcgttgctcaaactggcagaaggcgatttcaaacaagttgagcaattactgacccgtaatgctgatcatgcggaacaacctgtagtcaactacttactggcggctgaagcagcccaacaacgcggagatgaatttcgtaccaatcagtatctggaacgtgcagcagaagtcgcagacaataatcagttgcctgtggatattacccgtgtacgtattcaactcactcaaggtgaaattcatgcagcccgtcatggtgtagataagctactaaatcaagcttcacgccatccagaagtcttacgcctggctgaacaagcctatatgaagtcaggagcttaccagtcactgattgatatactgccggtaatggaaaaaatccatctacatgatgagttacaaattcacaaattgcgccagcaagcctatatcggtctgatgaatcagtacatggcagaacaaggcagcgaaggcttaaaacgttggtggcatgatcaaagccgaaaaattcgccatgatgtggctttacaagttgcaatatctgaacatttaattgaatgtgatgaccatgaaactgcacaaaagatcatcttggaaagtttaaaacgtcaatacgacgaacgtttactcttattgatccctcgcttaaaaagcgaagatccaaagccgatacaaaacgcattggaccatcagttaaaacaacatggttcgacccctctgttaaacagtacacttggacaagttgctttgcgccacggagaatgggaaaaagcagtaaaagactttaaaactgcattagcccaacgtcctgatgcacatgattatgcttggttagccgatgcattggacaaactacgtaaaccagaagaggccgcacaagttcgtcgcgagggattagtactcactttaaagcgtgaaagtaatgtcgtgaagagtgatctcgttaatagtaatagtgctgtaatgtcgtga

SEQ ID NO: 9154 - DNA, 1125 bp, Photorhabdus luminescens
atgacggagcaaaaacagtcctccgagacagttgaacaaacaaaaactacggttgaaaactcgcaacagctcgaaaccgcgcctcaaaagcaagaacgttctggcacgctaaaaaacataattgctattgcaatcatgctggcaatcggtggcggtctttattattacggacagcaacaaagccatttactgagtacagagaaccacgagctacgccaacaactggaatcattgaaacaacaacaatcacaggataaacagcatattgaagcgctgtttaaagaacaatcacagactttaagccatttttccgcacaaaatgagcaactgggtcatagtctacaagagttacaggccaaaatctctgcgttatccagttctgatgtaaaaagctggctactagcacaagctgattttctggtcaaaatggcaggccggaaattatggaatgatcaagatatagtcaccgccgctgctctgctgaaaaatgcagatgccagtctctctgaaatgaatgatccaagcctgattgaaatccgtcgtgcaattacacaagacatcagtacattatctgccattagtcagattgattttgacggcattatcctgcgagttaatcagctttctaaccaagtagataacctgcgtctggctgacaatacaaccgatggttcgccaatggacgaagataatgatgaattaaccggtacattatctgaatggcgccagaatctgagcaaaagctggaagagtttcatggataatttcattaccatccgtcgccgggataccgcagcagagccattactggcaccaaatcaagatatctatctacgagaaaatatccgagcccgtctgttgattgccgcccaagcaataccccgtcatcaaggtgaagtttttaaacaatcattagaaacagtttcaacttgggttagagcttactttgatatcaatgatcccaataccaaagcattcctggaagaaattgattcattaagccagcagcctgtttccataactgcgccagaccacctttcaagccagcctttactggaaaaactgatgcaaacccgggttcgcagcttactttcccaatcttctgaaactaatcaggagggttaa

SEQ ID NO: 9155 - DNA, 741 bp, Photorhabdus luminescens
atgagtattctggtgactcgccctgctcctgccggagaggaactagtcagaaggttacaggctgcgggaaaaacagctttcagcgcacctttaatcaatattcacccaggttcagagctgccacagctagctgagaagcttaaccctctaaatacccgtgatatggtatttctattgtcaaaaaatgcagtttattatgcaaacaatcagttaaataaaattaatctgtcatggcccgacaagctgatttattatgctatcggcagatcaaccgctctggcttttcatcaactaacaggtatgaatgttatctggtcatcagagggtgagaccagcgaaatcttgctaaaactaccatcgctacatcaggttgaaaataaacaagctttgctgctcagaggaaatggcgggcgtgaacttattgcccggacgctgacagaaagaggtgccacagttgactattgtgaatgttatttccgccagcccgtagactacccggcagcagaattcagtgcccactggcaaaagtatggagtacaaactttagttgtaaccagtggcgaaatactgcaactgttatataacttaatacccgaaagtgatcgaaacaggtggttattgcattgccgcctgattgtggtaagcgaacgtcttgcacatgccgcccgaaatttgggctggcaggatgttaaagttgcaaaaagtgcagataacgacgccttaattcaggcactagaataa

SEQ ID NO: 9156 - DNA, 942 bp, Photorhabdus luminescens
atgtcaactaaaaccatccgtatcgcaacccgccaaagccctttagctatgtggcaagcgctgtatgttcagcaaaaactgcaacaatgtcacccagatctggaagttcaactggttccaatggtaacccagggcgatgtcattctggacacgcctctggcaaaaatcggaggaaaagggctgtttgtcaaagagttagagttagctctacttgaaggccgagccgatatcgccgtccattcaatgaaagacgtcccgatctcttttcctgaggggctaggtctggtcactatttgtgaacgtgatgatcctcgtgatgctttcgtctctgtgaaatatcactctctggatgaattgccaacaggcagcatcgttggcacatcaagtttacgccgccagtgtcaactccgtgaattacgtcctgatctgattgtccgtgaccttcggggcaatgttggaacccgcctgaacaagttggataatggtcactatgatgcaatcatccttgccgtcgcaggattgaaaaggttaaaactgcatgagcgtatccgtacgccgttgacggcagaacaatcattacctgccgttggtcaaggcgcggtaggaattgaatgccgcctagacgaccaacaaacacaaactctgttagcaccattaaaccactatgatacagaagtttgtgttcttgccgaacgtgcgatgaatacccgactggaaggaggctgccaagtaccaataggtagctatgctatctggcaggacgggaaaatctggttacgggcattagttggcgcacctgatggtagcgttattattcgcggtgagagaacagctttaccaaaagatgcctgccaggcaggggttgaattggcagaagagttgttggaacggggagcacgggaaattctaacccaagtttatcgaggaaatccctccacatga

SEQ ID NO: 9157 - DNA, 2571 bp, Photorhabdus luminescens
ttgtacctttatatcgaaacactgaagcagagactggatgcgataaaccaactcaggttagaacgcgcctctaccgccatgagtgcggaatttaaacaggtatacagtttactgccagtattattgcactatcatcattcgatgatgccaggttacattaacggtaatgttccctatggcgtatgttttttcgtgcatgatgaagcacaaaaatcttatcttaatgatttagaaaataaattagatcacttcatagaacagcctgccaatggtgaacttcctattaccggtatttactcaatgggcagtacttcatcaatcgggcagagcggttgttctgatttggatatctgggtatgtcatcagtcatggcttgataatgatgagcgccttttgctgcaacgtaagtgtacgcttattgagcagtgggcggcagcgcttggtattgaagtcaatttttttcttattgatgaaaaccgctttcgccacaatgcgagtggtagcctcggtggtgaggattgcggctctactcagcatattctgttacttgatgaattttatcgtaccgctgtacgtatggcgggtaagcgtttgttatgggaaatggtgcctgtagaagaagaacgccattatgatgaatatgttttatcgctttatgcgcaaggtgttctgacgccaaatgagtggcttgatctcggtggattgggtgagctatctgctgaagagtactttggtgctagcttatggcaactctacaaaagtatcgattccccttataaagccgtattaaaaagcttgttactggaagcgtattcttgggaatatcccaatggtaagttactggcaatggagatgaaacagcgcctacatgcaggtgaaatagtttcctttggccttgacgcatacagcatgatgcttgagcgtgttacccgttatctgattgaaattaatgatacgacccgtttagatctaatacgtcgatgtttttatttaaaagtttgtgaaaaactctctctaaatcaagatgataaaggctgcattggctggcgacgccaggttttgacccaactgatctatgagtggaagtgggatccagagcggttgaaaattttggataaccgcaacttatggaaaattgaacaggttcgtgatgcgcataatgaactgctcgataccatgatgcagagctatcgtaatcttatccgttttgcccgccgtaataatctgagtgtcagtgccagtccacaggatattggtgtgctgacgcgtaaactttatgctgcatttgaagcattgccagggaaagtaacgctggttaatccgcaaatttcgccagatctatcagagaaaaatttaacatttatttatgttcctcaagggcgtgcaaaccgtagcggttggtatctctacaatcaggctccggctattggatcgatcattggtcatcaacctctggaatataatcgttatctcaataaactggtgtcgtggacctactttaacggcttgttaacagaaaaatcgtgtatccatattcatcatggcgaaactcaatgtgatgagctgaagctgcatgaattgattaatgatatttctactcattttcctatccgcctgccatcaccgacaccgaaagcactctatagcccgtgtgaaattcgtcatttggcaataattgtcaatctggagaaagatccgaccgctgagttctccaatcaggttgtacattttgatttccgtaagcttgatgtattcagttttggtgaatcgcaacagtgtttggtggaaagcattgacttactttatcgtaattcatggaatgaagtgaggaccttacactttagtggtgggcaatctgtgctggaagcgttgaagaccatactgggcaaaatgcatcaagatgctgcgccgccagcggcggttgaagtgttctgttacagcgaacatttacgagggcttattcgaactcggatccagcaactggtatctgaatgtattgaattacgtttatccagcaatcgtcaggacccaggtcgttttaaagcattacgtattgccggccagacttgggggctgttctttgaacgtcttaacgtatctgtgcagaaattggaaaatgccgtggaattctatggggcaatctctaataacaaattgcatgggttgccggtgaaaattaataccaaagagacacatttacccgcggtggttgatggctttgccagtgagggtattattcaatttttcttcgaaaatacgcaagataatcaaagttttaatatttatattctggatgaaaccaaccgggtagaaatttattctcattgcgagggaagtaaggaagaattggtacgcgacgtcagtcggttttattcttcatctcatgatcggtttacctatggatcaagttttatcaactttaacttgccacagttttatcagattgtgcaaatgaaaggccagattcaggtgattccatttagtggatcatctttttcacatttgtgtgtggctcatgatggggaaaatgaagagcagccagaactttatcgttctgtgtcacattactga

SEQ ID NO: 9158 - DNA, 321 bp, Photorhabdus luminescens
atgaacgacagtgaatttcaccagttagctgaccaactgatactttatatcgaagggcagttagataattatgatggcaatgctgatatcgactgtgaaaccaatggcggtgtcatgaccctgagctttgataatgacagcaaaattattatcaatcgccaggaacctttccatcaaatctggctggcaacaaaaggcggtggttatcattttgactacaaagaaggtcagtggatttgtgaccgcagcggggacaattttttaaccatgctagcatacgccatcaccgaacaaagtggcgaacagttcagtttcccataa

SEQ ID NO: 9159 - DNA, 186 bp, Photorhabdus luminescens
atgaagaaaaaattacgtggatttctggctatcataaccttatttgtactttccggctgtggactgaaaggtcctctctattttcctccagaacaaccatcgaccgagaaggcaacaactgcatctcagattcccgcgaatactgagcagcaagggcagcaagtggatagtacctctcagaaataa

SEQ ID NO: 9160 - DNA, 825 bp, Photorhabdus luminescens
atgcagttctccaaaatgcatggtctgggtaatgactttatggtcgttgatgctgtgacccaaaatgtttatttctcaccagagctgatctgtcgtttggcagataggcataccggtgtgggctttgatcaattattaattgttgaagcaccttatgatccggatatggattttcactatcgtatttttaatgctgacggcagtgaagttgcacaatgtggcaatggagcgcgttgttttgcccgttttgtccgccttaagggattaattaataagcgtgatattaaagtcagcacgcaatcgggacggatggtgttgagtatcaccaatgatgatcaggtttgcgttaatatgggggagcctgaatttgagccgcatcatgtgccatttcgtgcgttaagggcggaaaaaacctatattttacgggtagcagagagaactgttctttgtggtgttgtctctatggggaatcctcattgtgtgattcaagtgccagatgtggaaacggccgaagtagacattttggggccagctttggaaagccacgaaagatttcctgaacgggcgaatattggtttcatgcaaattttaaaccgtggtcatattcgcttacgggtttatgaacgtggtgttggggaaacccaagcttgtggcagtggtgcttgtgcagcggtagcagtaggtattcagcagcaattgctcgacaaccatgttcgggtagatttgccgggaggttcactgtttatctgttgggatgggccgggaaaaccgctctatatgacgggaccggcgatgcacgtttatgatggcacaattcatctgtaa

SEQ ID NO: 9161 - DNA, 705 bp, Photorhabdus luminescens
atggagaaaaaagaagagcagttaagcatcaatgacatacttgatgatcagactgttgtggattatttattggaaaaccccaatttctttatccgtaatgcatgtgtcgttgaacagatgcgggttcctcacccggtgagagaaacgatttctttggttgaatggtatatgagccgccagagaacgcgtattgcttatctggaagaagatataactctgctcatggaacaggcgagagtgaacgaacaactgtttgagcagttgcttaaattacttgttaatttggttgcggcagagagtttgcaagatatgcttagtcggttaagtttatgggctaagaatatgggactaaatagtgccagtatccgtcttttcagtgataaatggcatattggtgcaccacttgatgcgcctgatttagcgctttctcgcaatgcttttgaaccaatccgtattcagcgttttggtaataaaaaccactatctcggtatgctaaatgggccggaaattctattgttgttgccgcaagttcggcaggtcggttcggttgccgtctctctattgggaacgaggggcgaactgggtatggtgatatttaacagtcggaatcatcaacattatcaagaaggcatgggaactgacatgcttgagcatctggctaagttattgccggatatattgtctcgttggattaaacgcatatga

SEQ ID NO: 9162 - DNA, 912 bp, Photorhabdus luminescens
atgatgcaggaaattgaccagttactggagccgattgaggcatttttgcgctacctcagggtagagcgtcgattaagtcccgtgactatcacccattatcgtcgccatcttgctacattggctgagatggttttagaaatgggtgtcagccaatggcaagatcttgatcccgcgaaagtgagaatgttggtaacacgtagtcgtcgggctggtttgcaatcagctaacttggcgttgcgtttatcttccttgcgcagttttcttgattggcaggtaattcaaggagaaatttccgttaatccgagtaaaaccgtcagcacgccgggaaccaagcgtcatttgccgaaaaatatcgatgtggatgaagtgaaccaactgctgaatatcaattttaatgatccattatcggtgcgtgaccggacgatgttggaagtgatgtatggtgctggattacgtttgtcggagttggtgggtcttgattgccagcatctggatcttgaaagtggggaagtatgggtttcaggtaaaggcagtaaagagcggaaggtgcctttgggacataccgcggttgaatggcttaatcgttggttggcgatgcgggagctattcgagccggaggataatgctgtttttgtctcaaagcgtgggcggcggatatcaacccgtaatgtacaaaaacgatttgcgcagtggggaatacgccagggaatgagcagtcatattcatcctcataaattgcgtcactcttttgccactcatattctggaatccagtggtgatttgcgcgcagttcaggaattactgggtcatgccagcctatcctccacacaaatctatactcatttagatttccagcatttgacaaaagtgtatgatgtcgcccatcccagagccaaacgggggaaatcgtaa

SEQ ID NO: 9163 - DNA, 717 bp, Photorhabdus luminescens
atgcgtttttaccggcctcttgcgccagtgttagcgatgacatttgatctggatgatacgctgtatgataatcatccagtcatggataaggcagaagaggaagtactgaactttgtacggcagtatgatcctaggttcagccaccttaatcatcaggatctatgtgctttccgtgaattgacacttgagcagcatcctgaaatttatcatgacatgactttatggcgctggtactcctcaaagttgatgttttgccattacggttttagccgtgaagacgctgatcggggggcagatgatgtcatggcgcatttcacactttggcgtaatcgaattgatatccctgaatcaacacataaaactctggcggcacttgctgaacaaatgccactggtagccattactaatggcaatgcagaaccagccgcctgtggtcttgccccttattttaaatttgtgctgcaagctggccctgatggacgcgcaaaaccttgcagcgatatgtactgtttggccgcggatcgtctgggtttagcgcttgggcaaatcttacatattggtgatgacttgaatactgatgtggcaggagcgctgggtagtggtatgcaagcttgctggatgaatactaagaataaaaaattattgcagacgatggaaagccgcctactgcctcacattgagatttacgatttggcttctttgacagcattgatataa

SEQ ID NO: 9164 - DNA, 2163 bp, Photorhabdus luminescens
atggacgtctcctatctgctcgaaagtctgaatgacaaacaacgggaagctgtagctgctccgcggactaatatgttggtattagctggcgcggggagtggtaaaacccgggttctagtacaccgaattgcttggttgctatcggtggagaaggcttcgccattttctgttatggctgtgaccttcaccaataaagcggctgcggagatgcgtcatcggattgaaaacttgatcggtaccagtcaaggtggaatgtggattggtacgtttcacggtttggctcatcgtttattacgagcccatcatctggatgctaatttgccacaggattttcagattcttgacagtgaagatcaaaatcgcctgcttaaacgcattatcaaagcgatgaatctggatgataaacaatggccagctcgtcaaggcatgtggtacatcaatggtaaaaaagatgaaggattgcggccacagcatattgaaagttatggcaatcctgttgaggcgacatggcagaaaatttatcaggcttaccaggaggcttgtgatcgggccgggctagtggattttgctgagcttttactgcgagctcatgagttgtggctgaataaacctcagatcctgcaacattaccgtggccgctttactaatattctagtggatgagtttcaggacactaacagtattcaatatgcttggatccatctgttggcaggagaaacaggcaaagtgatgattgttggggatgatgatcaatctatttatggttggcgtggggctcaagttgagaatattcagcgtttcctgaaagattttcccggtgctgaaactatccgtttggagcagaattaccgttccaccagtaatattctgaaagttgccaatacactgattgccaataacagtgatcgtctgggtaaaaatttgtggactgatggggtagagggtgagcccatctccctttattgtgcatttaatgaactggatgaagcccgttatgtggtcagccggataaaaaactggcttgaaaatggtggtgccctgaaaaactgtgccatactttaccgcagcaacgcgcagtcccgtgtactggaagaggcgctgttacaggcatcaatgccataccgtatttatggtggtcaacgattctttgaacgtcaggaaattaaagatgcactggcttacctgcgtttgattgccaatcgtcatgatgacgcggcgtttgaacgtgtggtgaatacgcctacccgtggtattggtgacagaacgttagatattgtgcgccaggcggcgcgtgaacggcagcaaacgttgtgggattgttgtcagatattgctgcaagagaaagtgttggctgggcgtgccgctgcttccttacagcgttttattgaactaattgacgcattatcgacagaaactgaagatatgccattgcatgttcagactgacaggattatccgtgattctggcctgcgagcaatgtatcagcaggaaaaaggtgaaaaagcgcaggcgcgtattgaaaaccttgaagaacttgtcacggcgactcgccagtttagttatcaggatgaggatgaaaatttcacgccattgcaggcgtttctttcccatgctgcgctggaatcgggagaagggcaggccgatgcctatcaggattcggtgcaactgatgacattacattcggcgaagggactggaattcccacaggtatttattgttggtatggaagaaggcatgttcccaagtcagatgtcgattgaagaaggtggacgtttggaagaggagcgtcgcttggcttatgtgggtctgacacgtgcaatggaaaagctgaccatcacttatgccgaaagtcgtcgtttatatggcaaagaggtttatcatcggccatctcgttttattggggaactgccgtcagaatgtattgaagaagttcggttacgtgcgacagtatctcgtccggttagtcatagtcggttaggtacaccaattagcgccaatgatagcggttatgctcttgggcaacgtgttcgtcatcctaaatttggtgaaggaaccattgtcaatatggagggaagtggtgaacatagccgattgcaaatcgcgtttcaaggagaagggattaagtggctggttgctgcttatgccagacttgaaatggtctga

SEQ ID NO: 9165 - DNA, 951 bp, Photorhabdus luminescens
atgctgagcgcatttaagttagagaataatcgcctgctccgtcttgagtttgaagagggagaaaagttatctgattccttatgggtagatttggttgaaccggcagagcaagacagactgcaagttcaaaatgaattgggccaaattctggcaacccgaccggaactggatgacattgaggcgtcggcgcgtttttttgaagatgaagacgggatacacgtccactcatttttctactttgaagacgcggaagaccatgctggcaacgcaacagttgcatttactattcgtgatggtcgtctctatacgttgcgagagcgggagctccctgcgtttcgattgtatcgtatgcgtgctcgtaatcagacattagttgatggtaatgcttatgaagtgctgatggatctgtttgaaaccaagatcgaacagttggctgatgttatcgaaaatatttacagcgtgttggaatccctgagccgggtcattatggaagggaaacagggtgatgagtttgatattgccttgtccagtcttgctgaacaggaagatattagctggaaggttcgcttatgtcttatggatactcagcgtgcgcttaacttcttggtgcgacgggcccgtttgccgggggctcaactagagcaggcccgtgaaatcttgcgggatattgaatcgctgttgccacataatgaatctctgtttcagaaagttaatttcttgatgcaggcggcaatgggttttatcaatattgagcagagcagaattatcaaaatcttctcggttgtctctgtggtattcctgccgccaacgctggtggcttccagttatggtatgaactttgagtttatgccggagttacactggacatttggttatccgggcgcaattggtttaatgattgctgccggtcttgcaccgtatctctattttaagcggaagaattggctttaa

SEQ ID NO: 9166 - DNA, 150 bp, Photorhabdus luminescens
atgacgggtataaaaggcaaagtctcattgcaggtgctagctaatcctccgcaagcagaagggttttatattgcccttggctttaaacactttggaaaagaatatactcaattaggaacagcgattcgtatgattaagtacatcctgtaa

SEQ ID NO: 9167 - DNA, 381 bp, Photorhabdus luminescens
atgaaaataaccatcagattagccggtacaaccgaacaactcgcccttgaagctctgcaattacgtgcatctcttatgtgggaagaagatagggaattactactagcaaatccccatatgatagaactgccgatagaatatattacagcaggatatgtttatattgcggaacaagctaatgtaatcttgggattttgtgttgtattaccgctatctgatggaaatgcagaacttgatggaatatttattgaaccgggcttttggcatcaaggtattggcaagcaattggtgcaaatcacattgaatgatcttcatatataccctatggatttcaagatgcatcgcggcggcaagggagcgaatccccgggagcataggtaa

SEQ ID NO: 9168 - DNA, 891 bp, Photorhabdus luminescens
atgaacaagccacaaactaccaaaggagtactgtacgccttcggtgcctgttttatctggggaatcgcaccaatttattttaaacatatccagcaagtacctgctgacgaaatcctgacccatcgtattatttggtcatttttctttatgttgctactgctaacattgactcgtcactggtcacaggtagtcaaagtttttcatcaacctaaaaaagtgctattactggcagtgacggccactgtcgttgcctgtaactggctgatttacatctgggcggtaaatcacggccatatgctggaagccagcctgggttatttcattagtccactggttaatgttttgtttggtatgctgtttttgagtgagcgtttccgccgcatgcaatgggcggcggttattctggccttcaccggcgtgttaatccaattatggcaatttggttctataccggttattggattaagtttggctgttactttcgccctgtatgccctgctgcgaaagaagatgaatgttgatgctcaaacaggcatgacgattgaaacactgtggttactgccggttgccgccatttacctatttggttttgccaacagcccaaccagtgatttaactgctaacccaatgacactgaatctatggctgattgctgcgggtattatcactactgtaccattgctgttatacacagaagccgctgctcacctgcgcctatccacactagggttctttcagtatgtcggcccaacgctgatgttcctgctagcaactttggtttatggtgaacaaataggcattgaccgtctgattactttcggctttatctgggctgcattagtgctgtttacattggatgcagtgtatacacagcgtagatcgcagagatag

SEQ ID NO: 9169 - DNA, 471 bp, Photorhabdus luminescens
atgtctacaacgctattaaccttggaagaagcccggcaagtgattggtcatgcttttgttcacaatatgccttttaaccaattattaggacttgaactgattcggtttgaacaagattacgtagaaatacaattccgtaatcaaagtaaattagtaggtaatatcgcacaaaaaattttacatggtggtgtaattgcctcagtgcttgacgtatgtggtggattggtctgtatcggtaacgccttgacccgtctggtacccgcatcattagaagaattagaaaaacgattatccataatgggaacgattgatttacgggtggattatctacgccccggtcgtggtgaattattcaccgccaccagtagcattatccgcaatggcaacaaagtttccgtcgccagagcagaactacataatgagcagagagcccatatcgccagtgtaacggcgacctatctggtaggatga

SEQ ID NO: 9170 - DNA, 2418 bp, Photorhabdus luminescens
atgtccgtctttaatcctacgctgtttgaaaaatccttgcctgaaataggtacctttacattacgtccactggatctagaacgggatattcccatattaactgactgggttaaccgggattacgcccattattggggaatgataaataataccaaacaacaagtatgggaattttatcaggacttagaatcccgccacccgggcagtgtatttattggaatctatcgggagcaacctgcttttctattagagtgttatcgtgcacaagatgatctgattggaaaatattatccagcacacccagatgatatgggaatgcatattctggttgcaccaccgcaagcaaaaataaggcatttcacctggggaattttccaaaccatcatggcctttctgtttagtgatcctactgtggctcgtattgtggttgagcccgatatacgtaatgagaaaattcacaaacttaatctgcgggccggttttgtttatcagaaggcattggtattaccaaataaaacagccaagttagccttttgcaccagagaacagcatcagattgcgttacagcgggaacatcacgcgacaacaccaacccacttaggttcattgatgacaaatgccatgcacttgcaaccagcggtctggcagaaagttaatcgtctgcacttgtgtaaagctattgctgaattttcacacgaatgtttactcgtgcctcaacagttaactgaaaaagcagatagtgatggatatcaccattaccgtttggacagttaccgtttgaatagtgctgaccatctggtcagctatacttttcgggcacggcgtatggcactggatcactggctgattgatgccgattcgttacagaaaaatgccaacggagaagaaaaagcactcgattccttgctattcattattgagttcaaacaacaacttggcatcagcgatgtcgtaatgactacctatctggaagaaattaccagtactctctatagcagtgcttttaagcataacagaatcggtatcagtgcaatggatctcgtgaatactgattttcaggcgctggaaggggagatgatggaaggacacccctccttcgtcgccaacaatggccggattggttttgatattggtgatttccagaactttagtcccgaagcggcctctgctatacatttagtatggctggccgcacataagagcaaggcacactttgcttgcatcgagcaactcaattatcaacagttgctggaacaagaactaggcaccaccacaatggctgaatttgatcagcggttgatcgcgcttaaccttaatccaaaggattacttcctgatgcctgttcacccctggcaatggcagaacaaactggcatcggtgtttgcgcctgatattgctaatcagaaattggtctaccttggtattggtgctgatacctatcaggcacaacagtcaatccgcaccctattcaatcgcagtcaccctcagcgatattatgtaaaaatggcgttgtctattctcaatatgggattcatgcgcggtttatcaccttattacatggcgacgacaccgggcattaacgactggttatttgatttggtaacacaagatcccatcctgcaacgttatcgttttaaaattttacgagaagtcgccagtgttggcttcaaaaacagctattacgagcaagcaatcagtagtgatacgccttataaaaaaatgatggcggcactatggcgagaaaacccactgcaactcattgaacctgggcaacaagtgatgactatggctgcgttactgcacagtgatcagcaagggaatgccctattgcccgcattaatttccgcatccggcctgcctactcaggaatggttacgtcgctatttagagagttatcttgcgccactgttacactgtttgtacgcttatgatctaatgtttatgccacacggcgaaaacatcattctggtattggaaaaccatattccacagcacatcttcatgaaagatttagcggaagagattctggtcatgaatcccgacgccgatttaccggaaaaagcgagtcgagtcaaagtagacatgccagaagatatgaaaacactcactatcttatctgatgtatttgacggtatattccgatatctggctgcaatactggatgaacagggtgactattcacaggatcttttctggcaggctgtagcagagtgtattttaagctatcagcacaaccatcctgaattgagtgagcaatttgtacgttatgagctgtttacaccggagattaaacgctgctgtctaaatcgtctgcaaatagcgaataaccgtcagatgcttgatttagctgatccggctcaaagtttacagtttgctgataacctgattaacccaattgccaaatttggtcattcgtaa

SEQ ID NO: 9171 - DNA, 1302 bp, Photorhabdus luminescens
atgataactcgcccttatgattttattgccattggaataggtccttttaatctcggactggcttgtttaactcagccattaaaagatgttcatagcctgttcattgatcaaaaaccgggctttgattggcatccgggaatgatgctagaaaattccaccatgcagaccccttttatgtcagatctggtgaccttagcatctcccactcatccacttagcttccttaattacatcaagcagaaagggagaatatactctttttatatccgggaaagttttttcctgatgcgtaaggaatataaccaatattgtcagtgggcggcagaacagttatctaatttacgctttaacacacgcgttgacagtatcagctatgatgaagacgcttcgctatatacactacattgttcagatacgttaactgggcagcaacaccaatttgtttgtaaaaaattggtattgggtaccggacctgcaccttatattccaaagtgttgccaaccgttctctgaacggatggtgacatctggtgattatttaaataacaaagcgaccttgcaacaaaaacgatctattactgttctgggtagtggacaaagtgccgcagagattttctacgatttgctcagtgatattgataaattcgattatcaacttaattggctgacccgttcgccacgttttttcccgctggaatataccaagctgacactagaaatgacgtcaccagaatatatagattatttctatagtctcccgggcgacaagcgtgatgcattaaatttgtcccacaagcagctttataaaggtatcaatagttcattaatcaacgatattttcgatttaatgtacaccaaacgattaaatggcaagttaaacgtcaacttatataccaatagtgaattacgacaagttagccatgctaataatggccgcgacctaacattggcgttattccaacacgagcaagagcaatcattttctctcgacaccgaaggagtcgttctggcaaccggctatcagtatcaaatcccgacttttattgaaggcatacatcaccttatccattgggatgaaaaaggacgttatggtgtacagcgtaattacagtatcgatcagaacaataccattttcatacagaacgtagaattacatacccacggtttcgtcacgccggatctgggaatggcctgttatcgcaactcttgtttgatttatgaaattaccggtattgaacattatccgattgagaaaagtatcgctttccagcagttcagcgttgacaccgaaggagcatgctaa

SEQ ID NO: 9172 - DNA, 1545 bp, Photorhabdus luminescens
atgtacggagacgctctgctattagacaattcactcacacaagatagtcatataacggacgaagatttttccagatatttcttaaatatgcatagtgctggagactatcttgatgacgcttataatgtcattaccagaataaagaaaatattacagcaggtggataagcctttcagtgggatattacccaatgagttatccccactattttctaaagtgaatttagatcttccactcacctctttaaaccaagctttagatgagttacagcaactttatattaaagatgctgtttattttcatcatccaaagtatgtggcgcatcttaattgtccattagtattacccgccgttctggctgaaaccattattggagcgattaattcttcactggatacttgggatcaaagcgctggcgggacactaatagagcaaaaagttctcgactggacacgagataaaatggcattaggtacaaatgccgatggtatctttactagtggcggcacccaatcaaatctgatggcaatgctacttgcgcgggatcatttttgtcaccagcgcaatcctgaacataaaaatcagctacatggtctgccagcagattttcataaactgcgtatttttacctcgacagtcagccatttcagtacacaaaaagccgccgctatcctgggtttggggtacaacgctgttgtatctgttcctcacgacagtgagttccgtatggaccctcaagcattggaacaaagcattaaccaatgcatcgaacagggcaacattccttttgccattgttgctacgacgggtaccacagatttcggcagtattgacccacttcatcctatcgcggctatcgccaagcaatatagtatctggctacatgtggatgcggcatacggatgcggtttactggtttcacctcgtcgcgcttatctactggaaggcattaatttagcggattctgtcacggtggattaccataagtcatttttccagccagtcagttgcagtgctttcttcgtcaaaaataagaagcacttatcccatttgacttatcatgccgaatatttaaatccactcagtgcctcacaagagggtacacccaatctggtcaataaaagtatccagacaactcgtcgttttgatgcattgaaaatgtggctgacattacgaattatgggtgcaaaacgactcggacaagcttttgataaagtggtcgatactgctcaggatgcctatcgattaatggcacagaatccctattttgaacttattcattatccagaattaagtactttggttttccgttttattcctaaacaaaaattacctgatgcggatattgatgccatcaatgcggccattcgtaaggcactattccgtgaaggtaataccgttattgcgggtaccaaagtcaatggcagacaatatctgaaattcactttcctcaacccggcaacaagccaacaacatctacaagaaattgtgcatagcatcgtaatgcacggaaacgattttctggcaacacataataacaactaa

SEQ ID NO: 9173 - DNA, 780 bp, Photorhabdus luminescens
atggtgtcaaatacaaacgattcggttacccctttaaccaccgtggtaattgaagatatcatccagttatttgaacaaacgtttagccattttactgccaccatgagagtaaatgcagacaatatccctgctactagcatgagttttcctcaatggtcagatacaagagaatttccggtattaattcaacgctatcaggatgaatactacggtgacaatgatataaaacctaaccaaaaagcgctgtattctttatgggctcaatggtattttggtttggttattcccccgatgatattaatgttgctggaatatccacaagcagtggatactcattacaatctttttcggcttgaattccatgacagtggcagaccagatattgtttactatcatttaacctggctaaatgaatcacctttatcactacttcatcgtcattattctctgttggatcgccatattattcctgtatgtgaaaagatcgaatcatatcaggggataaatggacggcttctatggaataatatcggttatattatgcattggtatcttgctgagttcagcacaagaataaatagcaagtcatatcaagaaattataaatggtctttttatggaaccacaattacctaatggtagagataaccccctttaccgtactgttattttacggcataacaatatgcaacgtcgcagttgttgtcagagaaataaactacctggcgtcggtaattgccatgattgccctttggaatctaaggtagaaagcaaacactaa

SEQ ID NO: 9174 - DNA, 813 bp, Photorhabdus luminescens
atgtcatccgatgtgaattcctcaaccaccacctcacgactaacagcccaagcactttcgctagcatacggcaagaaaacgattgttgagtgtctgaatatttctattcgtgatggtgaattcagcgtcatcattggcccaaatggttgtggaaaatcgacactactacgcgccattagccgaggtataacgccacagcacggtgaaattctgcttgatgggaacaatattcaacattacaaaccgaaaacggtagcacgtgagctatctctgctaacacaaggggcaatcatcaccgaagcgttgaccgtatacgatttggtttcacgtggacgttacgctcatcaatcctttttacgacagtggtcagcagaagatgaacgagcagttaacgacgcgttacatgcggtcgaactccaggagatgtcgcaacagttagtgagtgaactttccggtggtcagcgccaacgcgcctggtttgctatgacattggcacaacaaacacccattgtactgttagatgagccaaccacttatctggacatcactcatcagattgaaatgctcgatctttgccaacgtttacatttacagggaaaaacgttggtgctggtactgcacgatattaacctggcactacgttacgcttcacatttaattatgatgaagaatggcaaaatttacgccgaaggtgtgccagaagagattatcaacgaacagagtatcgccgatgtgtttggtctcccttgccgtattatttgcgatccagaatcaggtaagccattgattattccaaaatataatcccatctga

SEQ ID NO: 9175 - DNA, 1107 bp, Photorhabdus luminescens
gtggaccgttgctctatctggttattaaaacctatcgtggagttaattatgtcgcagattaacctatccagaccggcaaaaattcgaaccttcatgttgggaactgctgtctttcttgtacctccacaacggacccaaagagccatcttattgatattgttactgctctcagtgctgttttatctctctctcgcactgggtaagcaaggtatcgataatccctggctagcaacctcaactccttatcaagaatttattctcatacagctacgtttaccccgcgcattagtggctatcggagcgggcgcaacactggcactctcaggttcactttttcaactgacaacccgtaacgcactcggtagccccgatattatcggcgttaatgccggcgctgctgctggcatagtcgccacactgatcatctggcctggcgtactgccgatccctttaggtgcgctgctaggagccagctttgccgtgctgttggtatacaccggaaacattagtcgctctgggcagatgcagacaaccagaattgtcatctccgggattgctatcgccgccctctgtatggcatttgttaatttcgctatctcgaatgtgcgtcttgagcaagcacagcaactcgcttcgctgctgcacggtagcctcgccagccgaggttggcaagatgttgggttaatttatggaacgtcactgttcatcccctttctactctggttaggacggcaattaaactacgtcaatctgggctatgaagttgctaatacgctcggtgtaccagtacgtatcattcagcttatgagtttgtcactggcggtcatactggcctcaatggcggtactggttgtcgggccagtggcttttatcgcactttctgctccacaaatcgcccgccgcttggtacgggccaaaggcactgcgctgttctgctcagcactggtgggagcattactactgctcgcttccgatttaattactttgctacttcctacttcggcacgtctgccaataggcgttatcaccgcaggggtaggcggtgtctatttgatgtatttgctgtacgctgaattaaggagaacaaagtcatgtcatccgatgtga

SEQ ID NO: 9176 - DNA, 1014 bp, Photorhabdus luminescens
atgacaaatcctaaacggcggtttgtactgctacttggcttaggtctcatgatactgctgaccttcatttgtattattgccagcctgagtctgggcgcaaaaatgttaccattatcaactatatggcatcactattggttaggtgacagtggtagctatagcgatctggtcatcaatgcccgcaaaccacgtacgttaattggcatcatggccggcgcagcactcgcgctttccggtgctgtaactcaaggattgctacgtaatccattagccgaaccgggtttactgggcgttaacgccggcgctgctgcggtggtcgtcagtttctctttcatacccatactgaatgaacttccacgtttctggacagcatttattggcgcaagtctagctacattgctgttctacctgctcagtggaggacaacgtaatagcaatccagcacgcatggtattgaccggcgctgccattaacgcctgcctatttgcttttgtgcaaggcattgtattaatgaatgcccatgtattggatagctaccgcttctggaccattggatcgcttagcgcaatgtctctggcagaagcgagttcgctgataccctatctgttatttgccttaatattgaccctttcactcagctcctccctgaatgtgatggtgtttggtgaagacattgccacctcacttggtgccaatgttgcccgcacccgcgtgttgtcgcttattactgcgaccatgctggcggcagtggctaccgctatggcaggccctattgcctttattggcttagcggccccccacttgatgcgggctttagttggcagcgatttccgctggctactaccctattgcctgttcgccgggccttgcctgttgctcacttccgatatactggcacggttggtgatagcccccggggagatcatggtggggattatcaccgcaggaatcggtggaccgttgctctatctggttattaaaacctatcgtggagttaattatgtcgcagattaa

SEQ ID NO: 9177 - DNA, 1017 bp, Photorhabdus luminescens
atgaaattgaagcgttgcaaagggtttgccgtaccgttgatgctgttggtcagcctgttggctggctgtgataagccagccagcacaaacaatgcaccgtcagataagcccggctatcctaaagaaataactaccgccttgggtaccgcggtgattccacatcaaccccaacgtgttgttgccttgggtgcaggagcggaagatatcgtactggatcttggcatcgtccctgtcggtatcgaatcccaccgttggggcggggatgaacagggctatctaccgtggtttaaacaagcgatacaacagcgtggcgagactttgccaactgtgatagagatgtaccctgaattagacattgagaaggttattagtcttaagcctgatctgattgtggcaacccaatcaggcctcacccaagaaatttatgaccatttatcatatttcgccccagtgatcgcttatccatctgccccttggctcacgacaccacaacagcagattgaattaattgctcgtgcgctagataaacagccgcaaggagagcaactcgctactgaactgaatgtcatattgcgcgaatcaggtaataccatcccgcatatcagtggctacactttcgcctatatcaaagcgggtatcagcagtaacatgctatcggtatacgttagaggtgatcctcgtgtcgatactttaatacacctcggtttgacgctactgccatcagtcagcacattagccgatcccttcggcagtttcgccgctaatataggactggaaaatgccgattatcttaatggcgcggatatcttagtaacttggttcaataatgaacaagaacgtaaggcagtggaagcacaaccactgtttcaatctatccgtgccgtacacctgggaggttatatcccactaactgaccaatcattggtcgttgccatgtcttacggtacaccgctcagcttacgctggggtttatcacaatttatgcccgtgctggcagaggcaattaaatcatcatga

SEQ ID NO: 9178 - DNA, 2244 bp, Photorhabdus luminescens
atgaataataagaaagtgatgtatccgtttttgcaaaaggattccatgattaaaaaaacaactcttgcaatgactatacagttagtattaatgggaaatagctatgcaatcgcggaaagtgcacagaataagagcgataaaaccgctgcccaaaatgacaagatactcgtcaccgcttcacgaccagaacatgaaggggtgaccgaagacaccggcatgtacaataccacgtcgatggtcaccgccaccggtctaaacctctcggcgcgtgaaacgccacagaccgtcagtgtcgtgaccaaacaacggatgcttgacgaaaatctggacagtgttaatcgcgtcatcgatagcacaacgggtatgaacgtacgccagtttgatagtgatcgtttcgggtttacttctcgtggcatgtctatcaataacatcctgcgtgatggggttgcgacctactacgacactcgctttaactatggtgacaatcttttggatgctgacctgcttgatcgtatcgaagtggtacgtggagcagccggtttgatggttggcccaggcaatccttcggcagccgttaacctgattcgtaaacgtccaacccgcgatttccgtggtgaattctctgccggagcaggttcttgggataaatggcgcactggccttgatctctctggcccattaaatgacagcggcaacctacgtggacgtttcgttacagcctatcaagcggctaactcttttattgatcgcaataacaacgaaagatacccgttctatggcgttcttgaagcggatttgacagaaaataccttgctgactataggcgtggattatcaacgtaatcacacccgtggcggtatgtttggtggtttgccgatctactttgcaaacggcagcaaaacagactataaacgcagcgacagctatgcacctgattgggctttttcaaaagttcggaccttctctacctttaccagcctgcaacataactttgacaacggctggagtgtaaaaggcacctttacttatgataatagcgctctggaccaaaaagtcctgtgggcaacaagttttcctaaccgtagcaccaatattggtatggtgccaggtaacatgacactcatcgatggcagccgtcgccagaagaactacgatctacaagtgaacggtgactaccggttgtttaaccgtacacatcatgtcagcttcggcttaaaccatcagcaacaggatttccaaaacgattacttcaacgcaacctgtatgcttacacgtccaaatagctgtccaggaataggtgacttcacctctcctggctggcaatatcctgaaccagagtggagtaatacgcgaacttatggctcgaaaggccgtaatgaacagacctcaggttatgcagtcactcagatttctctggcagatccattgaccttgatccttggtggtcgagtaaccagttggcaaacacgtggtgataatttcaatactccacaaaatgccagctacagtgacgaatttgttccttacggtggacttatctacaacattactcaagacttgtcggtttacaccagttataccgaaatattcaacccggaaaaccaacgtgaccgcaataacaaattacttgccccagtgtctggacaaaactatgaagtgggcctaaaaggtgttgccttcgataacagtctcgattattcactggcagtctttgaaatccgtcaagataacctgccattagtggataacaatgccccgagactaccagatctctccattcctcgttatacagtggatggcaccaaaactcgcgggttcgaagcagaaatcagtggtcaactgacagataactggcgtctttatactggttacacgcaattccgggcaacagatcctaatggtgtgcgaatcaatgccaatacgccaaacaggctgtttaagctgtttaccacctacaccttgccaggtgcgatgagcaatctgaccattggtggtggtgttaactggcaggataaaacctggttgaccgttgatgggcctggaaaaacatcaatgcaagcggaacaaaacagctttgctgtggtgaacctgatgagccgttatcaattcacaccggatctctctttgacggttaacctgaataacgtctttgataagacctactacacccagttcggccaatattctcagtattactatggcgcacctcgcaacattgaagcgatcttgcgttataagttctga

SEQ ID NO: 9179 - DNA, 1824 bp, Photorhabdus luminescens
atgagttcactgcatattaactccgataatcacactctgcatctcaacgcagagaactggctctatgccaatcgccatctggtgacaaaaatattacgtgagctatgtcacgaaaaattaattaaccctacctatcatggacaacagcaatattctctgacaataggtgactaccaataccattttcaagcagaaacttatcagctcgatcatattgatattgatgccgcttccgtaaccaaactcagggataatcaatctcagccacttgatgctattcaactgattattgagttgcatccgctgttggaaatcccggaaaaaatgctgccgatttatctcgacgagatatccagtacgctctacggtcacgcttttaaatatcagtacaaccgacttacagcccaagatttagcttatgccgattatcaagtcgttgaaacgacaatgagtgaaggccatccagtctttattgccaataatggccgaattggttttgatgccgatgattatcagcgttatgcacctgaaagcgctagccccgtgactttaatctggattgcggtacataaggataaagctattttctctgcactatccgatctttcataccaacaattaatagaagaagaattggggaaatatctgccagcccaatttgaacgccaccttaatatgttgggattatgcccgtcagattattatctgatgcctctccacccttggcagtggcagcaccgtattgcgatcagctttgcagcagatattgccaataatcatattgtttatcttggagaagggcatgatcgttaccttgctcagcaatctatccgcactttcttcaacattactcaaccgaagaagaactacgttaagaccgccctatccgtgctcaacatgggctttatgcgtgggctcgatccacacagcatggtcacaaccccatcagtcaatgagtggctcagcaacttagtccataatgacagtttcttccaacagaagggttttaccgtattacgggaacgtgctgctctcggttatttcaataactactttgaatcagccattaagaaggacagcccacataagaaaatgttgtcagcactgtggcgcgaaagcccaatgacgctgttgcaggataaccaacgcttgatgacaatggcttcgttgctgcatgtcgattatcaaggtcattccgtcgtcgcagctttggtaaagagttctggtttagatgcagaagagtggatatcacgttatctcgatgcttacctctcgccattactgcgctctttcttcacctatgatctggtatttatgccacatggcgaaaatctgatgttggtattggataataacagcccaacaaacatgttgatgaaagatattggtgaagaaatcgctattttgaatggtgatctccaattgcctgaagagattaatttcctgcacgtcactatcgaagacgatatgaaaattaactatatcttccttgatattttcgattgtttcttccgctacctgattccgctgttgcaaaaagatcttaatctacccgaagagcgtttctggctactggttgcacgctgtgtccataattaccaatcacaacatctgcatcagattgaaaaattccgccagttcgatctgtttaagcgggaatttattcgtacctgtctgaaccgtctgcaaatggcaaacaatcaacagatgatcgacctcgacgatcgcgaaaagaatctcaaattcgccggaaccttagttaacccgctgtacgctttacgccatgaatactcggttattcttcatcaagccgaacagcaataa

SEQ ID NO: 9180 - DNA, 1827 bp, Photorhabdus luminescens
gtgtctaccgcagaggtcattaatacgatatcactggcagaacaggtattgcggaaaacctttggttacttgcaattccgttctggtcagcaacaagttatcgataccattcttgaagggcgtgactgtctggtcattatgccgactggtggcggtaaatcattatgttaccaaattccggcactggtacaggaaggggtaactttggttgtttccccgttgatctctttaatgaaagatcaggtggatcaactgcgggcaaatggcgttgcggcagattgcttgaattcaactcaggcccgtgaacaacagattgatgtgatccggcgttgccgtcagggcatgattaaattgctgtatatcgcccctgagcgtttgatgatggataacttccttgagcaacttctggaatggcaaccagccatgttggctgtggatgaagcccactgtatttcacaatggggccatgatttccggccggaataccgggcattggggcagctcaggcaacgctttccgacattacctgtcattgcgttgacggccaccgctgatgaaacgactcgcaatgatattgtccgactactgaatcttaataatccacttatccatatcagcagttttgaccgtcccaatatccgttataccttgatagaaaaatacaaaccattagatcaactgtggctatttattcgcggtcagaaaggtaaaagtggcattgtgtactgcaacagccgcagcagagttgaagagatatcagagcgtttacaaaaacgtggcttgagtgttgcgccataccatgccgggttggataacagtcaacgtgcgcgggtgcaggatgcatttcaacgtgatgatttacaggtggtggtggcaaccgtggcatttggtatgggaattaataaacccaatgttcggtttgtggttcattttaatattcctcgtaatatcgaatcctattatcaggagaccgggcgtgccgggcgtgatggtctgccggcggaagcggtgctgttttatgatcccgcggatatggtatggcttcgccgttgtctggaagagaaagaggtgggcacacagcaggatattgagcgacataagctcaatgcaatgggggcttttgccgaagcgcaaacttgccgccgtctggtgttattgaactattttggtgaaagcaaacaaaccccttgcggtaactgtgatatctgccttgatccaccaaaaaattatgatggcttggtggatgcccaaaaagcgctttcttctatttaccgggttgggcagcgctttggtatcggctatattgttgaagtgctcagaggtgcgaataatcagcgtatccgtgatatgagacatgatcatttgccggtttatggtattggtaaagatcaaagtcaggaacactgggtgagtgtattgcggcagcttattcatttaggctttatcagtcaaaacattgccaattattctgcattacaattaacagaagcggcacgtccgatattgcgtggtgaagtttcgctaaaactggctgttccacgaatacagaatctaaaagggcgtagtcagcaaagtaaatcgtatagtggtaattatgatcgcaaactatttgccaagctacgtaaattacggaaatctattgctgacgaagaaaatatcccgccttttgttgtatttaacgatgtcacgctgattgaaatggcagagcaatgcccggttacggagggtgaaatgttattaatcaacggggtagggcaacggaaacttgaacgttttggtaatgtctttatggccttaattcgtgaacatctagaggagtttggatag

SEQ ID NO: 9181 - DNA, 999 bp, Photorhabdus luminescens
atgacgccagaaatgttgaaagaaagttggttcaatcgtgaggtgcagttctctgtttttgccaatgggcctctgttagatttttggcaagctagggaagagtgtgaatttatcggcgtcgataatgtactgatacgttatgttcgtttttgcacaacaataaaaaatgatagagcggttgttatctttcctggccgtagtgaaagttatgtcaaatactcggaagtagcatttgatttttatcaccttggttacgacatttttattattgatcatcgtgggcaggggcgatccagcaggatacttgcagatccacaaaaagggcatgtagaaaaatttgatgattatattgatgacgttgaaatattaatagaaagagaaattcttcctcgtcattattctcattgttatgcgttagctcattcaatgggagcggcaatattagggggatttttattacgtcacagccaggtatttgatgcagcagccctttgtgctcctatgtttggtattaactttcctatgccacgttggttggcaactttcctggtaaatcgggctgaaaagcggccggatatgcgcaaccattatgcggtatttactgggaaatggcgtccgttgccttatttgataaaccttctgacacacagttatgaacgttatagccgttacctccgttattacgcggattatccggaattacatatcgggggaccgacatatcgttgggtgcgggaaagtatctggattggcgatatgctgatagaaaaagccggagaaattgagacgccattgataattttaaaagccagtgaagataaggttgttaataattgccgattacgggctttttgtgaatcacgtaataaagtgagggctttcatcaaagaacgttcacctttgattattcaaggggcgcatcatgagatcctgtttgaaaaagataaattacgtagccaggcactcaacgccatttgtgatttttttgaccagaattga

SEQ ID NO: 9182 - DNA, 801 bp, Photorhabdus luminescens
atgtatcacattgttgcttcagatttagatggcactttgctgtctcctgatcacaaattaacttcttacaccaaggaaactcttaatttactgaccaataaaggcattcattttatttttgctactggtcgtcatcatgtagatgttgcgcaaatccgagatgttcttggtattgatgcctacatgattacttccaatggtgcgcgggtgcacaatgctatgggagaactggttttcagtcacaatgttgatcctgagattgtgcatgacttgtgtctaatggagtttgataacgttgatattctgacgaattattattgccatgatcactggtatatgaatcgtgaatgccctgagcagaaagagttttttcaggaatcggtgtttcattatcaactttttgagcgtgacaactttaaaaccgatgacgtatgtaaagtttattttacctgccaagatcatgatctattggttgcgttggaagagaaaatcaaagcgcgttggggtgatagcgttaatgtaagtttctcgttgcgcaattgtctggaagttatggcgggtggtgtttcgaaaggtcatgcacttgagcaggtagcccaagctatgggttataaactgagtgattgtattgcttttggtgatggcatgaatgactttgaaatgctgacggtagcaggtaagggctgcattatgcaggatgctcaccagcgtttgaaagatatcttgccggatatggaagtgattggctcaaacgctgatgatgcggttccccactatttgtgcgaaatgtatcgggtttaa

SEQ ID NO: 9183 - DNA, 456 bp, Photorhabdus luminescens
atgggaattaaagcacaaagctcagcacatacaaagtggctgtgcaaataccacatcgtcttttcgccgaaatacagacgaaaagtcatttttacccgtatccgttcgaggataggtgagattttacgagacctttgtcagtataaaggagtagaaatcatcgaagggcatctcatgccagatcacgtccatatactggtgagtatcccacctaaaataagtgtttcaagttttatgggatatctaaaaggtaaaagcgcattaatgatatttgataagcacgccaatttaaaatacaagtttggcaataggaagttttggtcagaaggatactacgtgagtacggtagggctaaatgaagccacaatccgaaaatacatcagagagcaagaaaagtcagatttaatgcaggataagttaagtacacgagagcatgaagaccccttcaaggggtaa

SEQ ID NO: 9184 - DNA, 303 bp, Photorhabdus luminescens
atgatgggtgcttttgagactcagcacttcatagcatccatcaccgttcactgtcctcgttgccactccgaccgcgcatatcgccacggtaagacccctgccggtcacgttcgctatcgttgcccagcctgtccccatgtttttcagctcacctacacctatgaagctcgcaaacctggcgtcaaagagaagattgtcgatatagcgttcaacggctcgggtgtccgtgacaccgctcgtgtcctcaagattggcattaacaccgtcctgcacgccttaaaaaaatcgcaccaaggcaagtaa

SEQ ID NO: 9185 - DNA, 1494 bp, Photorhabdus luminescens
atgtcaacaattcaaattaatagtcagcacagaggtagtttagacttcgcggatattcaaaatatcaaaaccaatgcgaaagaaggtgatacggttaagtttggctctgtatttggtaaagaataccgcgttactaaaaacagtgatggtgaagttagcctaaaacaaaaagagaatcgcagcttttttaaccgcttctttagcaatacagattcatcgaaaaacagtgatttaaaactgaatctgatgaaccaacagctgcacaaaaaagagaacagcggcaacgttaaggtcttaacattaacctacaaccaggctaaccaaaagatgccggaagagactaagaactacttccagaatctgatccaaaaaggtgattatgatgtggtcttgtttgctgaacaagagtctaaattgcttgctaacgacctagaactcgatggcatgaacctccttagccaaaacaaaatgaaagtaatgaccaaaggtcttggtgaaggtgttagttatacttctatgtctgtttttgctaaagatggcgtcgatattaacgtgaaaaaagagtctgagtatcgtcacggtatcggtggacgaaacatggcattcttcatgggtatcactggtaacaaaggcggggtgaaaaccgctttagagatcaatggccaagctttaaacgtgatttccgcgcacttggattctaacaaagaagtaaagcgtgaattcgaaggaaacaagttgatggaggggatcaaaccgaatgaagaggttctgatcaccggcgatctcaatgaacgtgagaagcgtgttgctgaaggctctgatgtgctgtacgacccaattgcacacgatgatacgcatttagcaaaacatggctttaagttcaaaccactcgatagccatacttacatgcagcttgataagcacactggcaatattaaacagaaagaaggtcgagatcgccctgatttcggtgagctcgataatactggtttaaccaacaaaacgggtaacttacagaaccatgaaaccagtgtgatcactgatggatttgtgaatgtcagtgaccacaaaccagtgcagtctacgtttgaggtaagaagtttctctcaaaaactcatagaaaacgcgatgactcaaaatgctggtgacttcaaaaatgacgcggcgtacctaaagcctggtactgatccagctaacgcgacgtttgacgatgtcacttccgctaaccaggcacgtctgggtttagaaagcttaagtcccaatgaacaagagttcgtaaaagagaacttttcgagttttattatcggtaaagatgcactcttcagtcagttaactagcggctttatggaagagatgggtcaacttcacgcatctgatcttgttaaaaacccagctcaactacaaacgcagcaaattgcattaagtgaaaagtacgaacttctcagtgataaagtgaatgctgaatttaataaacaattcgttgccaacctctaa

SEQ ID NO: 9186 - DNA, 450 bp, Photorhabdus luminescens
atggatatctatcaggaaagtatcagatttttaggtaacggtgccgatttcgatgaaaatggattatttcaatgtgagttatcattcgatactaatgaccatggtgaggcgcttttcttaaccatatttaagaatgaaacaaccattaatttacacatatctctgaccagtccagttgaattaccaacgcctcttccagaagcgattgcagtcgcgatcggtgaacacgcgctagaaccttttagaggtggctttggtattggcttaatgcctgatagccgtagattaacgatttataagattatttctctatcaaataagcctcaaaattatgtgcaaaacatctttcagcaactgttagaaaaaatggagcaatggcaccattttattgaacaaacgaataacgcagaaacgatcccagaaaaactacctgtcgggatttttatttaa

SEQ ID NO: 9187 - DNA, 75 bp, Photorhabdus luminescens
ttgcctatagtgacgccggatagatttaagcaagctcaaaattcatcaaaattagtgttgcaaaaacgagggtga

SEQ ID NO: 9188 - DNA, 942 bp, Photorhabdus luminescens
atgacaattatctccacaaaacctcagttaatgcaattcttcagtgacacttttcttgaaaaaacggcccgcagatgtggctttatggagcggttcagaaatattgggccacagtctctggttctcagtttgatagccgcgttgagcaaaggaaactgcacttccatcgctgacttgcaccggcagtttaacggcatgtgcctgagtgaaaaacacactgtcgcctataaacccttccataatcagttgcgtaaaagcaccttcgccgattttatgaagaaactggtgacattcgccatggttcaattgattgaaaacgttctgccgcccttacccaaaaaatttgagcagtttgacgatatcctcttgcaggatggcggctcattcaacgttcatcccgatttagcgggggtttttccctgccgcttcagcccattgaaggcagcggttgagtgccatatgaccctgtctttgttcagccaatcacccatcgccatgacggtgaccgcagacacggcatctgagcgggcttatctaccagctccccataccttacgcaataaattgctgctggcggatgccggttatgtggatttcgggtactttgaacaactttccttgtccagtggttcatttatcgtgcggggaagccaatcgcttaatcccctgattgtcagtgcccgcaatggacaggggcgacaattaccgacactggcggcaaaaaactcagggacatcagccgcaaaaataaccgcgatgaggtactggatttcacctgtcggcgtggccgattcgaatttcgggtcatccggcgttggttcgcgcaggaaaagcgcttctgtttttggctcaccaacctgccgccatccgactttaccgcagatgacatcatggcgctctatcgctgtcgctggcaggtcgaactgctgttcaaggaattaa

SEQ ID NO: 9189 - DNA, 255 bp, Photorhabdus luminescens
ctgctggcgttgatagtccggcgcagtctggcgagacggtttttgccttcagtctcctttctcaaggcagccaaaaatgttgatgtctggttgttgccgatattgggcgcgattattcatcatgccgggtcggaaatagaacaccatctggattgggccctgaaatatctctccaaaaacgcgttgaagttgcctcaaagaaaatccaataaagacaatacgttggagggtattgtcgagaggcttaatgcttaa

SEQ ID NO: 9190 - DNA, 735 bp, Photorhabdus luminescens
atgtcaatgatcttttcaagaataaaattattccatgacttaaatgaggctttaactcctgaaaatgcattacttgatttatatcaaattacatgcaagataaataagttaacaactagaaaaagtggttggtatttacctggttatactcaagaagagagattaaaaaataatgcatttgatgaaaatggacctactaaatatgctatagaagattttaaagaaacttatgatgaaaactctggatttattgtgaaatcattatctgatggagtagatgagaacaacaacagtattctatatatgggtgaagataaaatccatgttaatcctgttagattaggtaaaactaatatatctataagcatcaatttagataaagataaatttaattttcaagatattattgagcttttaaaaaattcaatatcgattcgaaactctccatttatgttagtagatacaagaggttactcgttaaaacaaaaacaagtttttccagatagggtttacgccggttggatgctctacttaccaattgaaatagatccgactttagttccaatggcggaagaaataatatctatttctgataaaaataacaaaaaaggctcattgattattacgacaaaagatatttttgatattgaaaatcaagaacatatcaataaagccaatgatattgaaatctgcttgcgggatctacaaatattacctctgataacagagatataa

SEQ ID NO: 9191 - DNA, 264 bp, Photorhabdus luminescens
atgacaaacagagccgtaatccgattaaacgacctaaccgatcatggtggtaaagtcattaccgccattgataattacatgtatcaaggcgtgcctgttgccgctaaaggtgatttagtaaactgccctaagtgcaaagaggttttccctattgtagaaggtagcaatgacttaaagcatcagggaaaacctattgcattggaaggtatgcaaacagcctgtggcgcaaaactgattgccagtcagaaagattttctcgcttaa

SEQ ID NO: 9192 - DNA, 735 bp, Photorhabdus luminescens
atgagtttaatacatccaagaataaaattgtttcacgaccttaatgagccaataacacctgaattggcgttaagggatgcatatcagataatgcagaaaataaataatattagtagtaacccaagttattggcatttaccaggatatagtttagaggaaatagaggaaaataatgtatttactgatgctggttttactgaatatgctataagccagcttacagaaaattatgataaagatgcaaaatatcttatagctactttatttgacatcccaggtgacattgaacttaaaaatagaattttttatcaaagcagtgatgtaatttacaataatagactaggaaaaacaaatatatccattgatcttaacttagtgaaagaaaaatttaagattcaaactattatagagtttgttaaagctttagcatctactcgtaattctccaatcgttatgactgaaacacgaggatatagattgaaaaaaaagcaagtattcccagaccgaataagtgcaggttggatgctctatttaccaatagaaatagatccgactttagttccaatggcagaagaaataatatctatttctgataaaaataacaaaaaaggctcattgattattacgacaaaagatatttttgatattgaaaatcaagatcatatcaataaagccaatgatattgaaatatgtttacgggatttacaaatactaccattgatgacagagttataa

SEQ ID NO: 9193 - DNA, 633 bp, Photorhabdus luminescens
atgccattaccacttcttgcgccagcggctcccgctcttttagctgccgctgaatggacactggctgcttgtgcagcgggattagccgccgttggtgtgatggaaagcaccaaagataaagaaggtgaacaagacaaggcaaaagcggatacacaaacaattgcttcgtcccgtaccgaatgtgagaaatgtccggcaattggcaacgttacgatggtttgggaaaagactacatcgtattcagaaataactattgcttatcaaacaaaaattgccgggacaatatacaaccctgaattaaacctaattgaaacttggttatgcatggatacaaattttgatggttggaaacctgcacaatgcttatttcttgaggccaaagctaaatatgatcagttttttaagaatggtgaaccagattggatttttggtgagtttagaaaaacacctaccagcaaaacaggggcagaaagtacaatttggcaagcagaaagacaaaatagggtatgcataggattgaataatattccaaagtctcattggcattttttgcagcctatatcttatgaatatttttctgaaatgtttgttccttttactaacattaaaacatttcatacgccaatgagttga

SEQ ID NO: 9194 - DNA, 264 bp, Photorhabdus luminescens
atgacaaacagagccgtaatccgattaaacgatctaaccgatcatggtggtaaagtcattaccgccattgataattacgtgtatcaaggcgtacctgttgccgctaaaggtgatttagtaaactgccctaagtgcaaaggggttttccctattgtagaagggagcaatgacttaaagcatcagggaaaacctattgcattggaaggtatgcaaacagcctgtggcgcaaaactgattgccagtcagaaagattttctcgcttaa

SEQ ID NO: 9195 - DNA, 723 bp, Photorhabdus luminescens
atgactacattatcattaaacatgaaattatatacagattggaaagaaccattaactccaacaatagttattaccgatttatataaaatcacacaacaagtagatatattttttagacgccataaaacttggtatttaccaggagatactcgtcaagaatctttacaacatattgcttttgatcagcaaggagcaacaaaagaagcaataaaagagtttgaagaagattatacagaagaaaatcctataattattaaagggatttgggatggtgaagatgatgaccattcatgttcaatttgttatatgaattatcgtcgagatcggttaggacaaacccaaatagattttcatatatctattgaagaaaatgaatttcagctatcacgattaatcaactttattaattttctgatttctactcataatgcaccttacattatggcagaaaacaatacatatagaataaaaagaaaacacgttttcccagatcgtttaagtgctggctggatgctctatttaccaatagaaatagacccggctttagttccaatggcagaagaaataatatctatttctgataaaaataacaaaaaaggctcattaattattacaacaaaagatatctttgatattgaaaaccaggagcatatcaataaaaccaatgatattgaaatatgtttacgggatttacaaatactaccattgatgacagagttataa

SEQ ID NO: 9196 - DNA, 609 bp, Photorhabdus luminescens
atgccattaccacttcttgcgccagcggctcccgctcttttagctgcggctgaatggacactggctgcttgtgcaacaggattagccgccgttggtgtgatggaaagcaccaaagataaagaaggtgaacaagacaaggcaaaagcggatacacaaacaattgcttcgtccagtaccgaatgtgagaaatgtccggcaattggcaacgttacaatggcttgggaaaaaaccacatcgtattcagaaataaccattgcctaccaaacaaaaattgccgggacgatatacaatcctgaattaaacctaattgaaacttggttatgcatggatacaaattttgatggttggaaacctgcacaatgcttatttcttgaagctaaagctaaatatgatcaatttttcaaagatggaatgcctataagttggtggaaaataagtaaaagcggggatagatccatgacgactcaagtagaaaaacagcaagaagtatgcactacattaaatggaaccccaaattctcactggcattttatgcaacctataagctatgcctattatttagagaaattttctatttatcccaacattaaagtatttcacactatttaa

SEQ ID NO: 9197 - DNA, 345 bp, Photorhabdus luminescens
atgataaaactcagcaaggaacaggtcgctaaatttattgatgcggaagatgaggcttatgtgacccagatccgacaacgtattctggctgagcacagtggattagtcgaaaatgaaagcgaacatagcctgcacgaacgattaaagaaggcttatctggacttggttgagatggggttcaaggatgaagcattgatccgctcttacttatatttcgttgcgtttaaccgtgattttcacggctcgccagcaatccaaaatatgttgaacgccggagataacccggaacaacaataccgtgattatttgcgggttatggataatttattgaaaaggagaaattaa

SEQ ID NO: 9198 - DNA, 492 bp, Photorhabdus luminescens
atgacaccggaattacagaaaaaatggagtgaatacagagaaatgcatcccgaaatgaaatggtatgccttagtcagcggcctacagtatgaacgtcattttgctgaggagattaagtatatcgtcggcacgaataatcccctgttccggcaatacccggatgccaaaattgcgttcgcggggccgtggttgtttgatatggcttatgcgaaatcatgggaagaaaagttatctgcgctggaaaaggttgcaccttcggtgtcctggctacacaccacgctatctttggacaaactaacccgtcaccttgaaaactacctgaatgttgagctggaaacgggggaaacggcattgctgcgtttttacgatccccgcatcttgcatcaaatccgggatattttcagcccagagcaattgtcagcattcactgacggtattcatgagtgggtgtattcttttgataataatgatcatttcgtaaaaggggcctaa

SEQ ID NO: 9199 - DNA, 1977 bp, Photorhabdus luminescens
atgaaaaccggactccgcttttcctgcaccatcggcaatctgccgcccatgacttttgcggtagttaattttacattagatgaagcgctttcatcgttatttaccctgtctctaacactagcggcacaccgttcagatattgatacagacaccctgctgctccaaaccgggctgttcaccgttacccgtgacgatattctgcaacgtgaagtgaaaggattagttgaaagtgcggtagttggcaccacaaaccggcatcaaactcaatatcacctgacaatcagaccagaaatgtggctgctgacactcgatcaggacagccgtatttatcaccagctcagtgtccccgatattttacacagcatactgaaacagaagaaactccgggccaatatgcatttgaataacccacactcaacgcgggaatacgtcaccatgaaaagggaatcatcctacgatttctttacccgcctggcggctgaggaggggattttcttctggttcgccgatgacgggctctatctgagtgatagctacctgaacatgagagcgccggatacgttgatttataacccggacgtcaccagcgctgtagaagaaaatgttatctacaaatggtctcttggctcctacatgcgcccggaatctaccgaccaaaaagacagaaattatcacaaccccaattacgctttacagcataacgccacggattttgaagcggagaacggcacgccatttcatattttcgaaagttacggccgttttcagaaagacaaagagggcattccgttgacccaatatcggctggaagctttgcgtgttgacagcaaatcagggcaagcggacagtaattgtattcgattaatgcccggcagaatctttacactaaccaaccacccgattgacgccatgaatgaccgctggcaagtcgtctcttcccaacacatagggtatgtccccgccgttttaggcgataacggaaccggcaccactctgaattcacacacccagttcattccaggccgcaacgattggcgtccgccataccgctataaaccattggccgacggcgatgaaattgcaacggttgtcgggcccggcactgaagaaatttacgttaataaagatggcgcggttcgcgttcactttcactggaaccgttatgatgcgcctgatgatcaggcttcttgctgggtacgggttgcacaagggtggaatggcaacggatttggttttctggcaacaccgcgagtgggtcaggaagtgattatctcctatctcaacggcgatattgaccggcctattattaccggatgtacttacaacggccttaaccgcccgccgctgaatttacccgcggaaaagacgcgcaccacgttcagaaccaaaacgcataaaggtaacggctttaacgaattacgttttgaggacgcaaacggcagtgaagaagtgtttattcatgctcaacgggatatgaatacgcaggttctgaatgatgaaacccataatattgggcataaccggacagatcatattaaacatgatgcccatttacgcattgataatgagtaccgcgtacagacgggaaatgacatttccctatctacggggcaaaaactccatatcaaagcagatgacgccctgttaactcaaagtggcaatgaaattcacctaagttccggtgctaaagtcgtgattgatgccagcagtgaactgaccctacaggccgccgggcacttccttaaaatcgatgctggcggtattaccagcagtgcgagtattaactttggcagtggagcacccggcagcggctcaggttggggtggcaagctaccggataggctggataaactgaaacagacgagtgtcgtacaggtagaaaaagccctgacgacaccgttgaaagaaatctgtctgacctgtctgctgaaagcagaacagaatggcacagcaatggttatcagggggcagtcatga

SEQ ID NO: 9200 - DNA, 1761 bp, Photorhabdus luminescens
ttgatcataaagagagcaaaggtaaatatgaaaaattttgaagatttctatcgggaagcactttcacaaataaagcatgatctgagcaacgcagcgcaagagcatccacaccttgctccatttacctccgaatccggtgaccctgatgttctccgattactggaaggttttgcgcttacaactgccggtattaagcagaaaattgatgatggcttcccagaagtcattaaccctcttctacgaaaagtatggccgatacctttacatccgatcccttcaaccagcattgtccagctagatatgcaaccgggcagcatgactgaaaccacaagcattgccaaaggcagtgaaatttccgccatacagcagaatcaatccattacattcagaaccactcaagatatcagtattgagcctattaccttgatccataaaacgctgacacacagcggagacaaaagcctgatatcactgacctttcaatatcatggcccaactacccactggaagacaggaccagtcacgctttttctcggagaagatcaaaaactggcgtctttattgaccaaatacatagatcagtcgctgaacaacacttatctgaaaacatccctgaaagagcaagaaatgtggctatctattgagatcgctccacgcctgaaagaaaatttggtcctgccgagaccacatgactatttctggccgttgcaggtgttatacgaatacctctatctgccacatgttaatgactttatgtcatttgatttatcggaagaaatcgctgagctccctttgggagaagataagcaatttaccattattctagaatttgactgtaatattcccatcgaggacattacacccgcatttattccccattgcatacccgttattaacctggctccggcaagaacaaaaccgataacatttgaaaagggcaaatcgcgttatgtattagaagcgaatgaaatctttagtattgataacattaaactccaatccgatcctgatggaacatctgaaggatctgctcacagtgttcctcttatcaatagcgcgcaactggccgcctgccattttgccgaacccggtgacaacatattactttttaaccatatacgggaagaatcgccatttggtggcaatcaaattaatctcacgttttatgatcatcaggcaaaacccgtaacagaacaccactatcgcgaattttactgccaatatcacagatatcatacgcaggcacggacattgggcatcggacaaatctgtatacccagcgagcagatacccagccatattcaggccaggaatatcgtggcggcgtcaaaagatcttcctgccgtcgtaaacagtcaccagcattggccgatactatctttgttgtcgattgggccattttttctcagtcatattgaatcagtcagatctctggtcaaacaacttgataccttcgcgcatctggacgccccgcgtagccggcatattcagcgcatggccgatggcctcagcgctatctaccttgagccatactaccattttgacaaaggcattcctgtgagaggccaagccatcacactgcgcatgacaccagaaaattatgaacatgaaggagaaatgtatgcttttgccaaaacactacacaccgctttttccctctgttttgttgaaaccagctttcacagattaaccgttatcaataacggcaccaatgaatgctgggaattttacaatatgcctgggcatcagaagatcatgtaa

SEQ ID NO: 9201 - DNA, 273 bp, Photorhabdus luminescens
atgtcacgtcccattattttggtcggtgattcgacttcgcatggcggcaaggtgttagccggtgatggaagctttgatgtgttagggaagaaagcggctcgggttggggatgctgtatcctgtccaaaatatggtggtaatcaaaccattgtggaagggacgcctagaataatcagctctaatggacaaatatgcactggagggaatgaaaacctcttgtggcgcgacattgattgcttcgcaaaacctatttcaagcataggatggcggtaa

SEQ ID NO: 9202 - DNA, 3336 bp, Photorhabdus luminescens
gtgcgcctgattatcagcttattgcttagcctgctcattattactccggtttctgctgcgattccacttgatgaaaatcagctcaaacaagaactgaaacaaattgaatccagcaaaaacccgcaggatgcagaagttgctcaggcgctgcaaggtgcactcaattggattgccgatactaaatcagctaacgacagaacacaaaagtatcagaccgccattgatgattttcctaaaataactaaagaacttcgtcaaaaattacttactgaaagtgatactccccgcccaattcctgctaaccaacccatagcaagcgttgagcaacagatcattcaggtcagcagtcggttgctagaacaaggggggcaattacagcaagagcaggacaaaggacgggaaatcagtgactctctagtactattaccgcaacaacaatcagaagcacgacgcttgctaactgaagcatcttctcgcctgcaatcattaggaacaccatccaccccattagcagaggctcaatttgccttagctcaagccgaagtcaatgcccacaaagcgacagtcaatgaactcgaaatagctcaactttctgcgaataatcgacaggaaatttcccgtatgcgggttgaactgttcaaaaagcgatatcatcgacttgatcttgaactgcaacaactccgtagccaacttaatgcacaacgccagcaaaaagcagaattagccctggaacataccgagatgctggcggagcaaagtgatcaactaccaaaatttctgcttgatgaattgcaactgaaccggaatttatctcaggaattaaatcagcaagcacaacgaatgaacgtcatcggctcaaagcaacgccaagccgccagtgatattattcaggtccggcaagcattgaataccattcgtgaacaggcacaatggctcggaggctctacaacgctcggagaagcgctccaaactcaacttgcccgtttgcctgacatgtctaaaccacagcaacttgatcggaatattgtcaaattcagggtcgatcgtctgaaatacgaagacatgctggatcagttacaaaaagacacaaaacccgtacagaaaagcaacgttgcgttaactgctgaacaagagcggatttatgattctcttacccgcacccgcaaagaattactcaattcattattatctggttacgacagtgaaatccttgaattgaccaaattgaaagtcgctaccagccagctaaatgatgcactaacagaagtcaaagaggccacacaccgttaccttttctgggtcgcggatgttaaccctgtttcgctcaattacccgatcaatgttgtgcaggatctgactcgtctattatcgctggatactttctctcaattaagcggtgccctgatagtcatgctgaccactcaggatacgcttctatatctgtttggcacgctattcctggttatattcagcatcggttctcttcgccattatcatgcattccttgaacgcgcgagtaaccgtattggcaaagttacccatgatcacttttccctcactttacgtaccgtattctggtcggttgttgtcgcgttacctttgcccatgctctggtcggcaattggctatgggctacaaagcgcttggcagtaccctatggcaacggctatcggttatggcgtcagtgctacgacgcccgttctatggatattcatgctgagtgccactttcgcccatccaaacggattattcattgcccacttccgttggccggaagagcgtgttaaacgggccttacgattctaccagctatctatctttgccattgtaccgttggtcatggcattgataacgtttgaacattacagtgatcgagaatttgcttccacactcggcaggctctgcttcctcatcctgtgcgtctccttaagcctgatcactaacagcttgaaacgggcaaaagtcccgctctatctggataaaaatggctacggtgaaaatgttatcaataccgctctctggtggattttactctctgcaccgatagtcgcagcgctagcttccatactcgggtacttcagcacatcacaagcattgctagggcgtttagaaacttccgttgctatctggttcttcctgctggttatttaccatattatccgtcgttggatgctaattcagcgacgccgtattgcctttgaccgggcaaaacaacggcgggcagaaattctggctcaacgagccaaaggcgaagatgactcgacgggttcaagcagtatcgaaggtgccatcgaagttgaggaacccattattgatctagatgcgatcagcgctcagtcattgggattggtccgttcaattctaactctgcttgccttggtttcactcatttggctctggtcagaacttcattccgctttctcatttctagaaaatatccgactgtgggatgtcaccaccacaataaacaatgtagaaactgttcaacccatcaccgtaggttctgtcttgattgctatcttggtgattattatcaccgctcaactggtacgtaacctacccgcattacttgagttagccttactacagcatttagaacttacacccggtaccggcttcgccattaccacactcaccaaatacaccattactttgattggtggtttagtaggtttctccctgattggtcttgaatggtcaaaattgcaatggcttgtcgctgcgttaggggttggattaggttttggcttacaggaaatcttcgccaacatcgtttctggcctgatgatattgtttgaaaaacccattcgtatcggtgataccgtgactatccgcaacctgaccggtagcatcaccaagatcaatacacgagcaacaaccctgtcagactgggacagaaaagagatcattgttcctaacaaagcctttattaccgagcagtttattaactggtcattatctgacaccatcactcgtgttgtactgacaatccctgcaccggcagaagctagctgtgaagaggttacccaaatcctgttaaccgcggctaaacgcagcactcttatccttgataacccggcacctgaagcctatctggttgatcttcaacatggtattcagatatttgaattacgtatttatgccgcggaaatggggcatcgcatgcctgttcgtcacgaagtccaccagcttattttgcaaggattccgcgaacacggcattactctgccattcccaccatttcaagcgagtatcgatgttattggtcgggatattcgcagtgcgacaacaaatagatcaggccgtaatccaccacgtcaaccgggtagtttgtaa

SEQ ID NO: 9203 - DNA, 894 bp, Photorhabdus luminescens
gtgctggataacattaaaatcaggttgcactatttactgcctaaacagggaataactcatctggcaggctggtttgctaacaaaaaagctggctggttgactcaactggcaatcaaggcgtttgcccgtgtttataaagtggatatgaatgaagcgaaatcacctgagttttcagcatacatcacattcaatgagttctttatccgctcattaaaagatgatattcgcccagtcgtcagtaatgaacaccaattagcgctacctgctgatggtactatcagccagttaggcaatatccggacagaccagctccttcaagccaaagggcaccactacacgcttgaagctctactcgccggcaatcatcaattggcagagatattccgtgatgggcagtttgtaacgacttacttatcacctaaagattatcaccgtgtacatatgccttgcgatggattactgaaagagatgatctatgtcccaggtgatctattctctgtcaatccattgactgccgccaatgtgccaaatctgttcgctcgtaatgaaagagtcatctgtctgtttgagactcaatttggtcccatgatacagattctggttggtgcaactatcgtcggcagtatcgaaatggcttggtgtggtatggttacaccaccacgggaaggtattatcaaacgctggacttacccggaagccggtacaactggcgcgatttctttcaagaaaggtgaagaaatggggcgtttcaaactgggttctaccgtcattaacctgtttgcaccaaatcagatacagttagccgggcacttgagcagtggctcaacaacccgcatgggtgaactgttagcccaagctatcatgcttgaagaacccactgacaacataagctaa

SEQ ID NO: 9204 - DNA, 1056 bp, Photorhabdus luminescens
gtggctaagcataaactatccaaaggccagcaacggcgggtacgggaaaatcatcagcgcaggctgaaaaaacaggataataagcctgaaatggatgataatcagttaggagaacctcaggaagggctagttatcagccgtttcggccaacatgctgatgtcgaggcagaagacggttctacacaacgttgtaatattcgcagaacaattcgttcattggtaacgggtgatcgggtggtatggcgtccttcgctgcaaacccaagcagatgtaaaagtaaatggtattgttgaagccgttcacgaacggacttccgtacttacgcggcctgactattatgatggtattaaacctatcgccgccaatattgatcagatagtgattgtgtcagccattcttcctgaactgtcactcaatattatcgatcgctacctcgttgcctgtgaaacattgggcattgagcccttgattgtattgaataaaattgatctgttggacgaagaaagccgtgcatgggtcaacgaaatcatgtccacgtaccacaacattggttacagagtattgaaactatcaagccacactggcgaaggtatggaagaattaacgaagatgctcgcaggtcgaatcactatttttgccggtcagtctggtgtgggtaaatcaagtttactcaatacactcttgccagaagatgaggaagagattctggtcaaccaggtttcagatgtttccggtttaggccagcacaccacaacggcatcccgtctttatcatttcccacatggcggtgatgttattgattctcctggtgttcgggagtttggcctatggcatttaacatcggaacaagtcactcagggttttgtcgaattccgtgattatctaggaggttgtaaattccgtgattgtaaacatcgggatgatccagcatgtgcgttacgaaaagcagtggaagataatgaaataaatcaagaacgttttgagaattatcaccgtattctcgatagcatggatcaaattaagccacgcaagacttttacagataacgatagctaa

SEQ ID NO: 9205 - DNA, 546 bp, Photorhabdus luminescens
atgtcaaaaagtgagcacaatcttatctggatagatctagaaatgacgggcttagatccagagcgggatcgcattattgaaattgcgacaattgtcaccgatgcaaatttgaatatcctggatgaagggcctgtcattgcggttcatcagtctgatgaacaacttgctctgatggataaatggaatgtacgcacccatacgggcagtgggctggttgaacgcgttaaagcaagtaaaattgatgatcgtgaggcagagaaggcgacgattgaatttttggaaaaatgggttccggcaggtgcttctcccatttgtggtaacagtgtgagtcaggatcggcgtttcttgttccgctatatgccagaattggaagcttactttcattaccgctatctggatgtcagtacacttaaagaattagctcgtcgctggaagccggaaatccttgctgggcttaagaaacagaatactcatcaggcgctggatgatatccgtgaatcagttgctgaattagcctattatcgggaacattttattcaactgtaa

SEQ ID NO: 9206 - DNA, 147 bp, Photorhabdus luminescens
gtgctctaccaactgagctattcccgcgtcactgactggctaacaataaccatgaataacatactgattccaaaccaaaatttggagcgggaaacgagactcgaactcgcgaccccgaccttggcaaggtcgtgctctaccaactga

SEQ ID NO: 9207 - DNA, 333 bp, Photorhabdus luminescens
atgccatatcatgtaatgctgactaaaaatgccgaagcagatttagaggacatttacgattacattgtcgaaaatgacagttcagagaaagctgattatgtattggatcagttactgaaaacagcagacagtctggctaactttcctgaaaaaggcaattatcccaaggagttgcaggcgttagggatccgcgacttccgccaaacattttttaaaccttaccgggttatttaccaaatcacaggtaaacaggtggtaatttttgtgattgccgatggtcggcgggatatgcaaaccctgcttacgcaccggttgttaagtgtatctgcatga

SEQ ID NO: 9208 - DNA, 276 bp, Photorhabdus luminescens
atgcgttattcagaacagatcaaacccattagctacctaaaagccaatgcagctacggtgatgacgacactcgctgagtcccgttcaccgatgattattacacaaaatggcgaggcaaaagcggtgattcaagatattgcctcttatgagcagactcaggaaactatagcgttgttaaagattttagctttaggacaacaacaagttaaagcaggtgaagtcacaccagtaaaggatgtggttcaacgcttaaaaaataaagggaagtccacctga

SEQ ID NO: 9209 - DNA, 357 bp, Photorhabdus luminescens
ttggggaatagcacttccgaggatgcctataatgacgctttggcaatggtggattaccttatcgaacacgatgatgaaaacccgctgattgactttctgtccgctaaaattgctgactatgaaaacagcaatgagcgctttgccgcatttaataaagctgtagatgatatgcctaccggtgttgcggcgctgcgggtgttgatggatcaacacggcctctcttactcagacctgaaagaggaaatcggttctaagtcgcttatcagccagattttctctggtacacgctcattgacgattgcgcacattaaagcactttctgagcgtttcaacgtaaggccagatctgtttctctaa

SEQ ID NO: 9210 - DNA, 996 bp, Photorhabdus luminescens
atgaaaagcaaccacgcatcaacgcagtcggtcaacaactactcaacctatatcaagctgtctcttgtggctatcatctggggcggaacatttgttgcaggtcgatatatttctgtcgagacaccacctttattatcagcaagtctcagattcattcttgcgggcatgacgctaattatcttcctcgttttatcaggaaaaatgttcgtcaagattaatctatcccaactattgaaaatcattggacttggcctcagcggaatatacacctacaacctgttcttcttttatggtctacatcatacaaccgcatccagagcttcacttatcgtggcgctgaatccagcagtaatggcgattttttcatatctcttttataaagaaaggcaatcaccattgaaaatactgggaattattctttgtctgcttggtgcaatgatcgtgattttcagcaaaacaccacaactgacggtgggagcagagggtaactggttgggtgatacgttgatctttggctgtgttttaagctgggttgcttatagcgtcttctgcaagaatattgtgaaccaaatcggcccgctacataccgttacatactccatcctggcaggcgctatcatgctgacagcaacggccattttcacagggcaaatgagtttatctgcaatacatacattgcccataactgatctctacagcttactttatctcggtgcagtaggctcagcggtagcctacatctggtattacgacggaatccaaagaattggttccactcgctctggcgtatttattgcgcttaaccctttgactgcggtattgctcggcgcagtactattagatgagagattaacattcccaatgttcatcggcggtgctctcgtcatcggaggcatcctgatctgcaataagagatcaaccgataaaaaacttattccaccagaacctaaatctgggatcaatcatatagcaaaagcaaagaattacaggagataa

SEQ ID NO: 9211 - DNA, 1191 bp, Photorhabdus luminescens
atgagttaccaatggccttcagatggctcatcttccatatggccggagataaacagcacgttcttatccctccgtggattttcagacgaatttattcccatgaatgacactcagcgaacctacaaaaaactcctgatgggatttgatgcaatcacctcttgcgaaatgaaagagctttataaattcaaaatcacattaactcaaatgaacgagcacgatctctctctccctgagctttgtcttatccataaggcattcagcgcatgggtaaaatttgattacgaaaacgcgagatcgcttctgacccaacatattcgagcatacccatcggatattgtcgcgctcttcttcattcacatgcttgatttctgcactggcaaaacaaccaacctgagatctcttctgctttattgtgacgaacacattccgggcactcactatctctacccatattatctttccataaaatcattcgtcctttgtgaagctcaatgttttgatgatgccttagaggttggttttaaatctgttaagttaatgccggacaacatctatggcattcatgctgtcgcacatgccttgcatgagctaggccgctggaaagaactttgccatttcctgaccaactgcaaagaacattggataaccaacactggaatgggaatgcatgtatactggcatctcgccattgcgtatgagcgatccgatgagatcacgctggcattgcaagcttttgatgaattatatgcactaaaagacaatccatttgctaaacaggatttggacgccgtagaattcttatggcaactcaggctcaaatctgccgacgctaagttccaaccaatatgggagcgtcttgccgtcctttggacaggcagcatcagctcatccacctcttacttccacaaaatacatgcagcactcgctttttctgcaataaatcagtcttttcttatcgagaagctaatcgcggaaagcgatggatttggcatcgaaccagacacacattccacagggatagacgtccttaaagcgatcttactattcacatcgagacactacgaagagtgtttaagcaaactccgtctcagctatgagaaatggccattattgggaggtagccgtgctcaacgtgaaatattagaacagacgatggaatacgccgccttgaaagcctcttccaccctataa

SEQ ID NO: 9212 - DNA, 918 bp, Photorhabdus luminescens
atgactttaacccagctcgaaatttttgctgttgttgctgaacggaagggctttaccttagctgcggcccagctcaagatctctcagtctggggtttcccatgctatcagagtccttgagcaggagcttggcgtagagcttctgcatcggcatcagggagttgttgaactgacagatataggagaaggcttgctacaaaaagctcaggccattcttggtctggctgaaactatgaggcaagaagcagcggatgcacgagggatgaaacgaggtacgctgcgaatcggatcgtttggcccgacttcatccttgtggctgttaccaacggtactggccgattatcgcaggctttaccccggcattgaggtccatattgatgaggggccagatagacaggttgtgcaatggcttatggataggcgagtagatgtgggatttgtgaccttgccggaagagcaattcgacacttatccgattcttgaagaccaaatggtggctttgttaccggtagatcatcctttagtattgcaggatacagtgacgttgaaggatctgtgtgttggaccattcgcgttgacagaagcgggatcggctgaactggtttccaggctttttttatcggcaaggttgcaacctaatattcgttatcgaacatctcaattgttaagtaccttggctgcggttgaacgtggggatgcggtaacgattgttgctgagtcatccctgccgctgactcatgaagttcactatgtcaagaaaacgctgaatccaaaagtgaaacgacatgttgggttggctgtgtttgatgaacgtcaatcgtcaccggccgctaaagcatttatcgcattggcgactaaaaaatttcgcatggtgagttcggcaatctctccggtttccaaggagcttgttagtgaatga

SEQ ID NO: 9213 - DNA, 432 bp, Photorhabdus luminescens
atgaaaagatttaccaaaattgcagtaggttttctagtattaaccacggctcagctctcctttgccgctaccagcatgtggtcacaaacgagccgtgccccaaatgtttatgctgccggctacactaactcaagtttctttaccacgccctcttcggtaccgacaagagcaactattacgacagtatcttggaatatcggtttatatagtaatggtgcgacaactcagactttcagcgtttgttacaccccacgatattcatccaccccatcgctatgcctggatgtctccggtaacctaaatggctctacaaatgcctttatcggccatgatgccaaaggttcctttagaattagcgggattctcgacggaggtacttaccccgtttacccgtcccattacaatatgatcaaagttgattatcagtattaa

SEQ ID NO: 9214 - DNA, 195 bp, Photorhabdus luminescens
atgtctgaatctgtgcgctggcttgatcgatgttgtgtgatgtttatgcctaaaggggtattgtttggttgtagattctttgtctttttcgacatcggtagccaactttgtattccgattgtactgagttcagtgggtggtatttataggggggaagaaagtattatccttataattgcaaaaatatttttttaa

SEQ ID NO: 9215 - DNA, 1182 bp, Photorhabdus luminescens
ttgcagtataagccgatttccaccatgacaacgcctctcaatcttaacctcttggccgccaagatcaaacaatggggtcattcccttggcttccagcaagttggcatttgcgataccgatttatccgtggaagaaccaaaacttcaggaatggctggataaacagtatcacggggagatggcatggatgaagcgccacggcatgatgcgtgcccgcccaaacgaacttttgccagggacattgagggttattagcgtaagaatgaattacctccctgcaaaagcttcttttgccagcacgctaaatgacgccgaactcggttatatcagccgttatgccttgggaagagattatcacaaactgctgcgccaacgtcttaagaaactcggggagcaaatccaaaattattgccatgacttcgaatatcagggagtccttaattttcgaccttttgttgattcagcccccgtaatggaacgcccactcgccgctaaggctggattaggctgggtcggtaaacactcacttatccttaatagagaagctggttcatggtttttcctcggtgagttgctgattaatcttcctctgcctatagatcctccacaagaagagcaatgtggacgctgtgtcgcctgcatgacaacctgcccaaccggtgcaattatcgccccttatactattgatgcccgccgttgtatttcctacctcacaattgaattggatggcattattcctgaggaatttcgtccactgatgggaaaccgtatttacggttgtgatgattgccagattatctgtccctggaatcgcttttcccaattgacagatgaagatgatttcagccctcgtgtaacattacatacaccaaagttattggatttattcaattggagtgaagagaagttcctacggataacggaaggttctgcaattcgtcgcatcggctatttacgctggttacgcaatattattgttgctttaggaaatgcaccctatcaatacgatatcattctggctctgcaacagagactaggattaaacacaatgctagacgaacatattcattgggctattgaacagcaaatcattcgccgtaaaacgaatactgttagtgtacaaacagcacaacagaaacgacttattagagcgataaccaagggcttgcccagagatgcttaa

SEQ ID NO: 9216 - DNA, 465 bp, Photorhabdus luminescens
atgaaagaacttgttttatcacttaaagatgaagatgcgacagtttctcttggaagcgcggttgctgctgcctgtaatagtggtagtgtaatttatttatatggtgatttgggtgccggtaagactacgtttagccgtggttttttgcagtccctgggtcataaagggcatgtaaaaagcccaacttatactttggttgagccttatgctttaacaccgaggtcggtttaccatttcgatctttaccgattggcagatccggaagagctggaatttatgggaatacgtgattatttccatcaagatgccatttgtttggtggaatggcctcagcaaggagaaggtgtattaccggatgcagatattgaattacatttgagttaccagccgaaagggagacaggcacattttattgctttgtctaaatatggtgagagcctgttagataaattgaaatatttataa

SEQ ID NO: 9217 - DNA, 1260 bp, Photorhabdus luminescens
atgataaagaaatggcagatcagttttatgataatgtgctggttgtttattatgatgagcagtttagtggtaacaaccgcagccgcggcgactttatccaatattcacgtcagtaacagcataaatgagtctaaagtgacgatggttttttccggtggtcgccctaattacagttttttcccattgcattcgccagagcgtttagtggtagatatccatcaatcagaaaaaattgttggtttacctatgaatttaccggagcaggatttagtaaggaaaatccgttccagccaggcacctgatcgacaaaaaaaacgcattgtatttgaactaaataataaagttaaagtcaactctatagtgcagcagttggatagtgaatatcgggtgatttttaccctacgggcttctggggtacctactggcaagtctgtttttagagagagttcacaagccgatacaggtaagctatcacttactaacagtaaattgcggacgacaaaacaggctgttttgcaaacaacttctaagggcggtcagcgggtagttgtcgctattgatgcaggacatggtggtcaggaccccggtgcgattgggcaacgtggattgaaagagaaaaatgtgactatcagtgtggcgcgtaagcttgaagtgttgttacgcaatgatcctatgttcaaacccgtactgacccgtaacggagactattttatttctgttgctggtcgttctgaggttgcacgtaaacatagcgcaaatatgctgatttctattcatgcggatgccgctcctaatcgtagtgcgcgtggtgcttctgtttgggtgctgtcaaacaagcgtgcaaacagtgaattgggtaattggcttgaacagcatgagaaacagtcggagttactgggtggtgcaggtaatgctctggcaaatggggctgatccttatctaagccaggcggtgctggatttgcaattcggccactcccaacgggtgggctataacgttgcagtacaggttttgagtgagttgcgcaaggtcggtttattacataaacgctcgccagaacatgccagcttaggtgtgttacgttcaccggatattccttcaattttggtggaaacaggatttatcagtaactcggcggaagaagcattactgggttctaatgattttcaggataagctagcaagtgctattcatcggggattgcgtaactattttctggcaaatccattgcaggctgcacctaaagcagccaagaagtaa

SEQ ID NO: 9218 - DNA, 1896 bp, Photorhabdus luminescens
atggctatcaagatcttacctcctcaattagcaaaccaaattgcggctggcgaagtcgtagaacgccctgcatcagtagtaaaagagttggtggagaatagccttgatgctggtgctaaccgtattgatattgaaattgagcggggtggagtaaaacttattcgtgtccgtgataatggctgtggcatcaaccatcaggagcttgcgctagcgttggctcgtcatgctaccagtaagattgctacccttgatgatttggaagccattatcagtatgggattccgtggagaggcgctggcgagtatcagttcagtttcacgtctgacattaacttcccgtaccgaagaacagcacgaagcctggcaagcttacgcggaagggcgagatatggcagtgaccgtgaagccggcagcacatccagtaggcagtactgttgaagtattggatctcttttataatactcctgcgcggcgcaagtttctgcgaacagaaaaaacggaatttggtcatattgatgaagtcgttagacgcattgcgttggcgcgtttggatgtattaatcaatttgcaccataacggtaaattggtgcgccaataccggccggcaaaagatgaatcacagtatgagcggcggttggtctccatttgtggtaccgcttttatgcaacgggcactttctctttcctggcagcacgacgatttatcgattaaaggatgggttgttgacccgatgaatactgaggcgagcggtgatattcaatattgttatgtaaacgggcgtatgatgcgtgatcgtttaattaatcatgctatccgtcaagcttatcaagatttgctccggggagaacaacagcctgcttatgttttatatttgggggttgatccacatcaagtggatgtgaatgtgcatcctgcgaagcatgaagttcgcttccatcaagctcgtttggtacatgattttatctatcagggtgtaatagccgtattaaaacagcgcggaagcggtgccgaactggatatcgcttgctgtgaacctgcgccagcctgggagccggaaaatcggccatcagcagggggaaatcatttttctcggcaaagcaatgcgacatctgtggcagcatcatcaccaaaagaggttttgtcaagtaaagggaatatggggggctctcgcggtggtgagaatcgccaatatcatggcgatcattatcagaaacgtcagggtgaggtatatcagaaactgatgcagtctgaacctgaagaaaaaagagagctgtttccggcaagaaccgctccggttatggcagaaaaggccacttctgctcctgttcaggttaaaaatagcaatcatagttttggtaaggtattgagcatatattcaccatgttatgctctgattgaatctccattgggacttgggttgttatctttgccggtagctgaacgctggttaagacaagcacagttagcaccaacagagcaagggctgaaatcacagccattgttgataccgctgaaactatctcttagtaaagaggaagctggtgctttaaaccgttatagtgacttattgggctcttttggtattgaagcatctgtatctcatggaaaagcgacactatgtgcggtatcgttaccattacgtcaacaaaatctgcctaaattaattcctgagttgctaggttatttggcacaacagccatcagcatcggcagaacaggttgtaacttggcttgctcgtcatattggcagtgagtatgaaacgtggaacgttgctcaggcggtacaattattagctgatgttgagcgtctttgcccacaactggtaaaatctccaccagatgggttattacaattaattgatttacaagcagtggtggcatctcttactcatgagtga

SEQ ID NO: 9219 - DNA, 942 bp, Photorhabdus luminescens
atgagtgatcagaaaactcaacatctaccaacggcaatttttgttatgggtccgacggcttcaggcaaaacagctttatctgtcgctttacgccagcatcttcctgtggaactgatcagcgttgattctgcgctaatttatcgtggaatggatattggtaccgccaaaccaacaaccgaagagcaagcgttggcacctcatcgtttaatcaatatcttggacccttctcaaccttattctgctgctgatttttgtcacgatgctttgaaggagatggcagaaattactgcttctggccgtattcctctgctggtgggaggaacgatgctctatttcaaggcgttacttgaaggtttgtcgcctttaccttctgctaatccggttattcgggcacaaatagaacagcaggcggcagagcaaggatgggatgcattgcatcagcaactacagaagattgatcctgcggcggcgttaagaattcatcctaatgatccacagagactttctcgggcactggaagtttttcttatttcaggtaaaactctcactgaactgactacattgtcaggagagtcgctgccttatcgtgttcatcaatttgctattgcaccggcaaaacgtgagctccttcatcaacgcattgaagcgcgttttcatcaaatgcttgaatcagggtttgaagaggaagttaaagcactttatgctcgtcatgatttgcatgtggatttaccttctattcgttgcgtcggttatcgtcagatgtggtcttatctttccggcgaaattgattacgatgaaatgatttatcgcggtatttgtgcgacgcgccagttggcaaagcgtcagataacttggctcagaggttggaagtcggttcattggttggatagttctcaaccagagcaagctttaagcacagttatgcaggttgttagtgcatag

SEQ ID NO: 9220 - DNA, 309 bp, Photorhabdus luminescens
atggctaaggggcaatctttgcaagatccgttcctgaacgcattgcggcgtgaaagggtcccggtttctatttatttggtcaacggcatcaaattgcagggtcagattgaatcttttgaccagtttgtcattttactgaaaaatacggttagccagatggtttataaacatgccatctctactgttgtaccttcccgcccagtttctcatcacagtagcaatacgagtgtaggggcgagcgtaggtaattatcattctggtggcgtttctgctccggcagcacaacaggaaagtgatggcactgaataa

SEQ ID NO: 9221 - DNA, 1281 bp, Photorhabdus luminescens
ttgtttgaacgttatgaaggcggcgaacaagccgttgtggtgcatgtttttttctcgcaggataaagacacagataatctcagtgagtttgaatcactggtaacttctgctggtgtagttcctgtgcaaattgtcacggggagcaggaaagcccctcatccgaaatattttgttggagaaggtaaggcggaagagattgctgaggcggtgcaggctagtggtgctgatgttgtgttatttaatcatgcactcagtcctgcacaggaacgcaatcttgagcggctctgtcagtgtcgagttatcgaccgcaccggcgtgattctggatatttttgcccaacgggcacggactcacgaggggaagttacaggtagagttggcgcagttacgtcatctttctacccgtcttgtccggggatggactcaccttgaacgtcagaaaggtgggattggtttgagagggccgggggaaacgcagcttgagacagaccggcgtttattgcgggataaaatccgtcagatattgaatcgtctgagccgggttgagaaacagcgtgaacaggggcgtcaagcgcgaaataaagcggatataccgacggtttcactggtgggatataccaacgccggtaaatcgagtttgtttaaccgtatgacggctgctgaggtttatgcggctgatcaattgtttgctacgctggacccaacgttgcgacggattgacgttaatgatgttggtacggtggtattggctgatacggttggttttatccgtcatttgcctcatgatctggtggcggcatttaaagcgacattgcaggaaacccggcaagcaacattgttgctgcatattgttgatgctgcggatagccgcatcgacgaaaatattgccgctgttgacagcgtactggaagaaattgaagcgcatgaaattccggtactgttggtgatgaataagattgatatgctggacagcttcacgccgcgtattgatcgcaacgaagataacttaccggttagagtttggctgtctgcgcaaactggtgaaggtatcccgttattgttacaagcgttaacggagcgtctttcgggtgaaattgcacactacgaattgcgtttgccaccggaagcaggtcgtttacgcagccgcttctatcaactgcaagcaatagagaaagagtggatagaagaggacggtaaagttggtatcgaagtgagaatgccgattgttgactggcaccgtctatgcaaacaagaacaggatttgtttgattatgttgtctga

SEQ ID NO: 9222 - DNA, 1221 bp, Photorhabdus luminescens
atggcgtggaatcagcccgggaacaacggacaagaccgcgacccgtggggaagcagcaataaaagcggcaattccggcgggaacaaaagtggtcgaaaccgtggggcatctgatctcgacgatctgttccgtaagctgagcagtaaactcgggggttttggtgggaacaagggcggtaatggttctgaccaaggggcaaaatttggcgggcgtattgttagccttgtcgctgctgctgtcgtcgtgatctgggccgctagcggtttttatacgattaaagagacagaacgtggtgttgttacccgtttgggtaaacttagccatattgtgcagccaggtctgaactggaaacctacattcattgatgaagttgttccagttaacgtggaatctgttcgtgaattggcaacctctggcgtgatgctgacatcagatgaaagcgttgttcgcgtggagatgaacgtgcagtatcgtgtaactgatcctgccgcttatctttatagcgtgacaagtcctgataacagcctgcgtcaggcgacagatagcgcggtacgtggtgttgttggtaaatattcgatggataaaatcttgacggcaaaccgtatgattgtccgtgatgatactcagcgtgagttggaaaagacgattcttccgtaccgcatgggaataactttgttggatgttaacttccaggctgctcgtccgccagaagaagtcaaggctgcttttgacgatgttattgctgctcgtgagaatgaacagcagtctattcgtgaagcggaggcttattcgaacgaagtcttgccacgcgcgaaaggtgatgcgcaacgtatcattgaagaggcgaaagcttataaggctcgtgtagtattggaagcgcagggggaagtggcgggctttgccaaaatgttgcctaggtataaagaggcgcctgagattacccgtgaacgtctgtacattgaaacgatggaaaaagtattgagccgtactcgcaaagttattgttaatgatcacaataacaatttgctggtattgccattagaacaaatgttacgtggcgatgtttctggtgttaaaaaagagggaacagtgcaatcagataatacggtagcttctgacctgcgggttacccgcccaactgtgccttcaaattcaggccggggagcgaattataaccgaacagataatctgcgtaatgacattatcagggtagggagataa

SEQ ID NO: 9223 - DNA, 1299 bp, Photorhabdus luminescens
atgggtaagaacgttgtcgtattgggcacccaatggggtgacgagggcaagggcaagatcgtcgacttgctgactgaacgagctaagtatgttgttcgttatcaagggggccataatgctggtcatacactggttatcaacggtgaaaaaaccgttctccacttaatcccatcagggatcctgcgtgaaaacgttatcagtattattgcaaatggcgtcgtattagcgcctgatgcgctgatgaaagagatgaacgcattagaatcccgtggtattcctgttcgcgagcgtctgctcatttcagaagcctgtccacttattcttccataccatgttgcattagataatgcccgcgagaaagcgcgtggtgcaaaagcaattggtacaaccggtcgtggtattggtcctgcgtatgaagataaagttgctcgtcgtggtctgcgggttggtgatttatttgataaggaagcattcgccgttaagctgaaagaaattatcgaatatcacaatttccaactggttaactactacaaagaaccggcggttgattaccagaagaccctagatgaaatcatggctgttgccgatattttgacggatatggtcgtcgacgtttctgatttgttgtataaagcaactcagaaaggtgaattggtcatgtttgaaggtgcacagggcacattgttggatattgaccacggtacttacccatatgtgacctcttccaacactaccgcgggtggcgttgcaacaggttccggtttaggtccgtgctatgttgattatgttttggggatcatcaaagcatactctactcgtgtcggtgctggtccattcccaactgaactgtttgatgaaactggcggttacttgcgcgaaaaaggccaagagtttggcgcgactacggggcgtagccgccgtactggttggctggatatcattgctatccgtcgtgcagtacagatcaactcactgtcaggtttctgtatgaccaagctggacgtgttggatggcttgaaagaagtaaaaatctgtactggctaccgtatgcctgatggcagtgtaattgaaacgacacctttagcagcggatgactgggaaggtattgaacctgtttatgagaccatgcctggctggaatgaaagcactttcggtgtgaaagagcatagaaaattgcctcaggcagcattgaactatatcaaacgtgtagaagagctgaccggtgttccggttgatattatttctacaggcccggatcgttcagaaactatcattctgcgtgatccgtttgatgcctga

SEQ ID NO: 9224 - DNA, 426 bp, Photorhabdus luminescens
gtgcagttaacgagttttacagattatggcttgcgcgcgctaatttatatggcttctttaccgcaaagccggatgaccagtatttctgaagtcactgatatttatggtgtttctcgtaaccacatggtaaaaatcattaaccaattgagtcatttaggattagtggatgctgttcgtggtaaaaacggcggtatccgtttaggtaagccagcgaaggatatcagaattggcgatgtcgttcgcgctcttgagccattatcattggttaactgtagtcaggaatcttgccatatcacttctgcgtgtcgtctgaaggtcgtattaaatcaggcaatagaaaggtttttagaagaactggataagcatactttagctgatatgattgaagataatattcccctttataagctgcttctgaccgaatga

SEQ ID NO: 9225 - DNA, 2442 bp, Photorhabdus luminescens
atgtcacaagatccttttttggggcgcgaagcagaaaaatacgaatcacctattccaagccgcgagtatatcttagacattattgctaaacatactgtaccggtaagtcgccaggaactggcacaagagctgaatctgattaacgatgaggatattgaagcgttacgtcgtcgtttacgggctatggaacgtgatggtcaattggttttcactcgtcgccaatgctatgccttgccggaaagattggatttactgaaaggtactgttattgggcatagagatggttatggtttcctacgagtagaaggtcacaaagacgatttttatctctctgccgagcagttaaaaatggctattcatggtgatgttgtgctggcacaaccattatccctgaatcgcaaagggcgtaatgaagcacgtatcgttcgtgtattagtgcctaagaccagtcagattgttggccgctattttcttgattctggtatgggatttgttgtgccggatgatagccgtttaagctttgatatcttgatcccgaaagatgaaagcggtggtgctcgcatggggaatgtggtggtagtcgagttaattacacgcccggcgcgccgcacaaaggctatcggtaagattgttgaagtgttgggtgaaaaaatgggaacgaacatggcagtggaaattgccctacgtactcatgaaattcctcacagttggccgccacaggtggaaaaccaggttgcttccttgaatgagcaggtaccagaatcggcgaaaaaagaccgtgttgatctgcgtactctgccgttggtgacaatcgatggtgaagatgcccgtgattttgatgatgccgtttattgtgaaagaaagcgaagcggtggttggcgtttatgggttgccattgctgatgtcagttactatgtgcgtccacaaacggcgttagataccgaagcacgtaaccggagtaactcggtttacttcccatctcaggttgtccccatgttgccggaggtgctttctaatggactctgttctctgaacccgcaggttgatcgcctttgtatggtgtgtgagatgacgatttcagcgcaggggcgattatcatcctataaattttacgaagccatcatgaattctcacgcccgtctgacatataccaaagtatggcgtatgttgcagggtgatgaagagctgcgtgagcactacaagccactggttcagcatattgagcatttacatgaattgtatcaggcactagaaaatgcccgtgagcaacgtggtgcaatctcgtttgagtcagaagaggcgaagtttatctttaatgctgaacgtcgtatcgagcgaattgaaccgattgttcgcaatgatgctcataagttgattgaagagtgcatgattctggcgaatattgctgcggcgcgcttcgtggaaaaaaatggggagccggtgctttaccgtattcatgatcggccaagagaagaaagtattgttaacttgcgctcggttttcggcgaattgggattgacgctgcccggtggcatgcaaccaacaccaaaggattatgcgcaactgatgcatcaagtggctgaacgcccggatcatgagctactgcaaaccctattactgcgttcaatgaaacaggcagtttatgatccggaaaaccggggtcacttcggtctgtcattaaattcttatgcgcattttacctcacctatccgccgttacccggatctggtgttgcatcgggcgattaaatatctgctagcgaaacagcaaggcattgttgagcaatgtggaacaccgaccgggggatggcacagtgatatggaacagatgttgcaactgggccaacactgctccatgacagagcgccgcgcagatgaagcgacgagagacgttgctgattggcttaagtgtgattttatgcaggatcaagtgggcaatacttttactgggatcatcacgagtgtgacaggttttggtttctttgttcgcttgaatgagctgtttattgacggtctggtacatgtttccacgttgagtaatgattattatcatttcgataatatcggtcagcgtttagtgggtgaatactcgggtaaaactttccggttaggggatgaagttgaaattcgtgtggaagcggttcatatggatgagcgtaatattgactttaagctgctttctaccgcccgcaaagcccggaatgtaggtaaaacagtgcgcgatagagagagaaaagtagaacttggccgcgaaagcagtaagaaaaaagggcgtggttatcgcaaagaagctcattttgagcctgatggtgctgttcgtaaagagcgatctgcggataagcctaaaggggataagaaaaagggtaagacgctttctaccaaaactcagaaaattgtcgctaaattcaaagccaaacgggctaagaaaagcgcagataaataa

SEQ ID NO: 9226 - DNA, 735 bp, Photorhabdus luminescens
atgagtgaaattatctacggtattcatgccgttaaagctttactggagcgtgatcctcagcgttttatcgaagtttatgtcctgaaaggacgtgaagatcgccgcctgacaccattgattcatgcgctggaaagcatcgggatgactatccaactggcaaatcgtcagtggctggataatcaaacggaaggtgcggtgcatcagggaattattgccaaagtgaagccagggcgtcagtaccaagaaaatgacctaccagatttactggcacaagtagaaaccccgttcttgttggtgcttgatggcgtgacagatccccataatctgggcgcttgcttgcgtagtgctgatgcagcaggtgtacatgctgttattattccacgtgatcgttctgctcagcttaatgccacggcgaagaaagtggcatgtggtgctgcggaaagcgtaccacttattcgtgtcaccaaccttgcgcgtaccttacgtttattgcaagagtacaatatttgggtggtgggtacagcaggagaagctgaccatacgctgtatcagagcaaactgactggtcctatggcactggtgatgggagcggagggggaaggtatgcgtcgtctgactcgtgaacactgtgatgaattgattagcatcccaatggtgggctctgtctcgtcgttgaatgtgtctgttgccacgggagtttgcctgtttgaggcggtgcgtcagcgtagctcgtga

SEQ ID NO: 9227 - DNA, 396 bp, Photorhabdus luminescens
atgcgtcattacgaaatcgtttttatggtccatcctgaccaaagcgaacaggttccgggcatgattgagcgttacagtgcgactatcactaacgcgcaaggtcagattcaccgtctggaagactggggccgccgtcaactggcttacccaattaacaaactgcacaaagctcactatgttctgatgaacgttgaagcaccgcaggaagtgattgatgagctggaaactaacttccgcttcaacgatgccgttatccgcagcatgattatgcgcgttaagcacgcggtaactgaagcatctccaatggttaaagccaaagatgaacgtcgcagccgtgactactctctggaagacgccaatatggatgctgaagaagctggggattctgaagagtaa

SEQ ID NO: 9228 - DNA, 318 bp, Photorhabdus luminescens
gtgacaactaatcgtttggtgctttctggcacagtgtgcaaggtccccattcgaaaagtcagtcctgccggcattcctcattgtcaatttgtgcttgagcaccgttcacagcaacaggaagccggtttgagcaggcaagcatggtgcagaatgcccgttattgccagcggacaattgttacaagttttaactcacagtataacggtcggcagtcgattaaccgtttcaggattcattagttgccatcaaggtcgcaatggtcttaacaaactggttcttcatgccgagcagattgaattgatagattctggagactag

SEQ ID NO: 9229 - DNA, 228 bp, Photorhabdus luminescens
atggcacgttatttccgtcgtcgcaagttctgccgtttcacagcggaaggcgttcaagagattgattataaagacatcgctacgctgaaaaactacatcaccgagagcggtaaaattgtaccaagccgtatcactggcacccgtgcaaaataccagcgtcagctcgctcgtgctatcaagcgcgcgcgctacctgtctttgttgccttacactgatcgtcatcagtaa

SEQ ID NO: 9230 - DNA, 453 bp, Photorhabdus luminescens
atgcaaattattctgcttgataaagtagcaaacctgggtagcctgggtgatcaagttaacgttaaaccgggttatgcccgtaattacttagtaccgcagggcaaagctgttcctgcgactaagaaaaacatcgaatttttcgaagctcgccgtgctgaactggaagctaacttggctaacgttctggcaacagcagaagctcgcgctgagaaaatcaatgcactgggttccgttactatcgcttctaaagcaggtgacgaaggtaaactgttcggttctgtcggtactcgtgatatcgctgatgcagttaccgccgcaggcgttgaagtctctaagagcgaagtgcgtctgcctaatggcgttctgcgtactattggtgaacacgaagttaacttccaggtacacagcgatgtattcgctaaattgaacgttaacattgttgctgaagcttaa

SEQ ID NO: 9231 - DNA, 885 bp, Photorhabdus luminescens; identical to SEQ ID NO: 7045

SEQ ID NO: 9232 - DNA, 1029 bp, Photorhabdus luminescens
atgaatcttagtaaaaacatattacaaactataggtaatactccagtagttatgttgaatggtagatatactaaaggtattaatgtctttctcaaaatggagaatattaaccccggtgggagtattaaagatcgtattgcagttgctatgttggaaagggctgaggctcagggagaattaagaccgggaatggtggtgattgaaccatcatcggggaatacggcaattggtctggcaatggcgtgtgctgttaaaggttatcgatttattgcggttttagatcgcatggtgccggcagcaaaacgcgataaaataaaagcatttggtgcggaaattattttcctaccagaatttgaagcgggaaaagatactgtcaaatatcgcattgatttaactaaagagattataaaagtctatccgaatgcgtttagccctatgcaatttgaaaatcaggttaatcctgatgagcattatcgttccacggggcgtgagttgtatgaaatctttggcaataatttgacagcttgttttgcgacagcaggaagttgtggaacactgactggaatttcccgttatttgaaagagaaagatccacaggtgcgaatttatggtgttgaacccgtggggtcaattattttcggtggtgaaccaggaaaatatctggtacaaggtgcaggattagcgtttataccttctattttggatcgtaccaatatcgatattaccttgaaagttgcagatattgatgcattccgagtagcaagaaagttagccagaaatgaaggtattttaattggtggaacgggaggttgtgcggtaagcgcagcattaaatcgcctggatgattttaaacctggcgataatattgttgtcattattcctgatagtggagaacgttatatcgacacaatttataatgatgcttggttatttgaaaataatttctcagaattaattgaggaaagtaaaacagaacctcaattagaagaaattattacaaacatggggtgcgtattaaatgagttctga

SEQ ID NO: 9233 - DNA, 1191 bp, Photorhabdus luminescens
atgagttctgatcgcgttttggtgatttactataatcgcctctataatcctcttatcataagaagtcttaaatctgaatatagagaggtaattgctctttatattgatgaagggcaggtaagagatattgaagatattgaattagaatgcatggttgcaggtgctgataaatttatctataaagattatcgagcgcaatatgctgaacacttccttacaaaagcgataaaagcgaatgctatttatcaaaatggttattttctcagtgctgcactttcccggcctgcgattgctgaggcagcagttgaagttgccaatgagctcaatattgattatattgctcatcaattcagaggtaatgatcaagtcagaatggatatgaatatagaaattctgaataaaatacctattgcttcgttgagagattttaaatacgacgaaaatattgtaaatagttatgcgatgaaatatggtattcctcaagaatttggttgtaataacccttattctactagtgaaaatatatggggattaagtgtcgaatgtggaccgttggcagaaccggaagcattaattccggaagatgccagagagaaattatttgaacatgcactatcagctactgagccaatatttttgtcattaggttttgagaatggtataccgatatcgattgacggcgaaaagaaatcattatatgaaattattgaaatattaaatgagattggtaaaaaattatcaattggtatttttgatattgttgaagatggcattgtcggtttgaaaacacgcgcaatttatcaatcacctgccgcacatatcttaattaccgcacatcgtgatttagaatgttattgtagtaatcgtcacgaaaattggtttaaagagatagttgataaaaaatgggttgaattagtttattctgggctttggtatgatcccttattaactcatttaaaccactttattgatagcatgaatcaacatgtcaatggtgagattaagcttgaattaggttataaatatgccaatgtttgttcccgtatttcaaagacaactatctatgatgataatttagcaatatataattgtgggcatttatatagtcaaaacgatgcagagggatttgcaaaaatatttaatattcatactaagcaaagtgctaaatctaagatgaggcaaaagttatga

SEQ ID NO: 9234 - DNA, 804 bp, Photorhabdus luminescens
atgattaaagagttattaatgtgtaaaccggatttttataatattgaatacgttattaatgattggatggaccctaataatagcgtcaataaagaattggcacagcaacaatgggattttctttatgaacggttgactgaacgtggtatcactattcgcactatcgagcctgttaatggtttgcctgatatgactttctcaggtgattgtggcatggtgcataataataaattccttgcgagtaatttccgacacgctgaacgccagggggaaagccagcactatatcgattatctggaaaatctaggttatgagatacatcgtgttgatgaagatatctattttgaagggcttggagatgttatctattgggataatgacatcatatttggttatggtcctcgctcagataaagaagcaataaatacaattcagaaagtttatccagaacttgaagttaaaggtgaactgcatattcaggataagactttctttcatgtggctctggcattctcgtttattgacaaagatacagttatttactacccagaagcatttactaaagagagccagaattatattgctgaaacatttgaacgccgaatctcaatatcagaacatgatgctaaggaattatttgtctgtaataatatcccaataggtaaagatattctcatgcatgattgttctatagaggttgaacgtcaattaaataattatggttataatgtcattaaatgcgatatgagtgaattcttaaagagtggtggtagtctgcgttgcttagtattaaaagttaaataa

SEQ ID NO: 9235 - DNA, 1698 bp, Photorhabdus luminescens
atgtatattttaggtataaattcagtttaccatgaatcagcagtttgcttattaaaagatggagaaactatttttgccattgaagaagagcgtctcaatagaagaaaacacggaaaaccagcaaatgttgataatcctgatgaactgccattggcttccattgaagttgcattagactttgcgggtattcgcttggaagatgtgagtcatattgggttttctattgatccgatagagcgaagaaaatcagtctttattgatgaagtcaccagtgaaggcaattggggaagtgtatcgggtgagtccattttttatcgtaaaaccacttcagtaccagaaattttacaatcaatgggattccgtggtcaatttcattgggttcctcatcacacagctcatgcggcatctgcttattttgtttcgccatttgataaagcgttaactttatcacttgatggtgtgggagaggataataccgcaggggtatatctgggcgatggcaatagtctgaaaaaaattaaaactattgaataccctaattcaatcggttttatgtgggagaaattggcagaattcctgggcttctctgtatacgatgcctgtaaggtgatgggaatgtctgcttatggtaagcctgaaggttttatgccggcgttccaacaacttgtcaaaatttatgagaaaggtgagtttactatcgataacaccattctcaatttccgcagccaagacttttctaaattagaatctttgtttggtattgagaaaagagttcccggtggagaggtagcgcaggaatattatgatattgctgcttctctccagcaaataactgatgaaatagtgttaaatatggctcatcattatttgcaggaaacagcaacgaataaactctgccttgcaggtggtgttgcattgaattgcataacgaataaacgattatatgaagagttggatatcgaagatatctttgttcagcctgctgcacatgatgccgggactgccacaggtgccgccctatttatttggcatcatattcttgaaaataatcagcgctatcctctgactcatacctattggggtctggaatatagtgaagatgattaccagcgtagtttgaaggcccacggtttggactggacatatgaagagaatattcatgaagttgtcgcaggcttgctggctgaaaataatgtcgttggctggttccaggggaggatggaatttgggccgcgggcattaggtaatcgtagtttgttggctgatccaagaaataaagatattcgcgatttaatgaatcgtaaagttaaacatcgtgaaatgtttaggccatttgcgcctagtgtattgcgtcaacatgttgctgattggttccatgttcggaaggaattaccggaagctgcaaaatatatgttgttagcgatggatgctaaagtggataaagcatcgaaaattccggcagtggttcacgaagatggtactgccagagttcaggtggtagatagtgcatcaaatccagattatgcccagttgattgaggcattttatcggaaaaccggtgtgcctttgttgctgaacacctcttataatgatagcgaaccgattgtttgttcaccggaagatgctattaaaacttttatgaaaactaatattgattatttagttttggggaattatttgattaaatcgattcattaa

SEQ ID NO: 9236 - DNA, 1227 bp, Photorhabdus luminescens
ttgaaagataacgggtataataaggttgaggtaatattaatgatacataagatcatactggctcgatttttttctgttttttcagaggcatttgttatgttcgctgtgcctgtattagtatatacctcaactaatagtgcttcactttcatcttttgcttttgggcttgaacggctattcagagtgatttctctccctatttctggttggatgggggacaggatgcatactttggttatgttattcctgagtgatattcttcgatcattagtttgcttatttctttttatcctttcatttatatattctgataatagcatcgtatatatcattatttctctctcatgtgttttatccttttttagcggggcgggatatgtcaaccttgaaggttttgtctctaaaaacatgagtgcaatagaattaccttcggttaactctcgtttacaatttgttgaacagtttacctatattgcagccccggcggttgtcggcgtgctggtttataaattcagtgtttatgcggtatttgcatttgcattttttcctttcctgattagtagcttgatatggtttcagctacaaaggaaaaacaggattgaagaacgcgctaatagagaagggtataatctgccggccatttttaagttcttgatggaaaatccacccttgttacgcgtcattagcctgacattcctgatgaatgtgatgcaaggtgctattttgtcaacggcagtttatgttatcaccagtgttttttcacagccgaaagggagttatgctcagcttttggcttatgcggggctggtgaattgttgtgttttttttattgcgccaaaattgtgccggatttttgatgtacgtatcgttggtgtaacggcttttctgattgcgttatgtggtctgacactgtttgctactgggccgttatttgtggtttacacattaggtttcttactggttattggttcggaaggttgttttaatcttttttcccgctcttatcgagcaagtcttattccgaagcagcgtttttctcagtatcttggtgtggtgctggttttgaatcagttagcgacacctttaaccagttttatttgtgctaatttactgaactatttttcctacaatagtatttatctgatattctctgcatttgttttattgatgtttattattattaacccttatcgttcgcttaaatttaatctgcataatagtcaataa

SEQ ID NO: 9237 - DNA, 1311 bp, Photorhabdus luminescens
atgagttcgaaaaaatatttgttagtgcttgattatcttccggcaaggctgaatgaaatcgtcaatattcgtgactatattcgatataattactcccttgagttggtgattattagcgatatgttgtccggtgaggaaaaaaatgttacaccatttgtctatcatattcctgtacgaacagaaaattatgttgatgacaattatgttgatcgtgtgatgaccgttcttgctgaacttaatatgacatgtgctggtattcttccttttatggatgcggtatctgggtatgcggctgttatcgcgaagaaattaaacgtttatggtgatgatcccaaattaagtttcgcaggtattgagaaatatcaatttcgccaacaagaaactcgaatattaccgttgcttgcggcacaacatattaaaacgcctcgatatactttcattaatgagattaaagagctagaagagttttatgattctgttccgtatggtgtgattattaagcctaattgtggtcgggcaaatgtaggcgtggtagcggttaaagatagaagtaaaatcccaacggcttttgctcaatctgttgagcaatctggtggtaatcaaattcttgcagaagaacttattattttcgatacagaatattcgtacgatggtattggttgtatggcatttttaacgcaaaaagtttcccagaaaggggaatttcctgttgaaatagggcaaatagttccggcgcaatgtgatggcagaaatacgattgcattacataaagcagggcaggcaatgaatctgatttcagggcagacttttggcgcattccataatgagattaagcaagatagtaaaacgggagaaacttttctggttgaaactaatcgtagacccgcgggtatgcgtatttgggatatggctaaccgggtatatggtataagcttgcaggaaatttgggttgaccatttagtcaaaggatttagtgatcgaatgatattgccagaagcaaagggaagagcatttttgattaatttactggcaggtaaagacggcaaaattaatgataaattcgatcaaacagaaattaatgaagtgttattagcatctgttgataatattttgagtaaattatattacgaaattattgcaataaaaattaatttagataagaattcaccggtttatgaaacaccaaaaagcaataatgatttctgtggttatgtttgtgtgcatattaatgatgagcacgtcaaatgtgaatccctgatgaatgaaattaatgatgcatggagggatatattgtctaattatattttataa

SEQ ID NO: 9238 - DNA, 717 bp, Photorhabdus luminescens
atgaacacatcatttaatgaaattttatcagaaattaaaaagtccaaaaccatgcctgaattagaaaagaggctattaaacgcgataaactatctgggttttgaattctactcaatttatcaggaagaaaaatatccattcacgacaaaaaaatatgttctaataaccaacctaaatatagaaactgcaagtaattataatcaagataataatcatgacagcgaccaattaatgaatggtgattacactttctctattccgtcagtttgtaatgataaaatatcaaaaaacactgattttacgattgaaaaatcaaattcaaataaaaatgaagtcaaaaatagtctttcaatcaaaattaaaggttatcatggagaaaggtcgattttttcagttgccagaaaagaaggcactatttctcataatgaaatacttaataaagcaggagtattaggcatattggcaaatgaatgcataaaaacatttaataacctaaaaaataaaaaggataaaatcattattccaacactctctaccagagaagttgaagtcataagatggacttgtgagggaaaaacttctgctgaaatagccgatatactggatatttcaacaagaacagttaatttccacattaacaatgttatggagaaattagtggttcccaataaagttgcagcagttgctaaagcaatagcatataatctaatcatataa

SEQ ID NO: 9239 - DNA, 639 bp, Photorhabdus luminescens
ttgatcacaggtattttcatggcaaaactttcttttgactctatcgaagcacaagcaagttatggggttggcttgcaagttggtcagcaattactggagtctggcctgcaaggtctggaacctgaagcgttgttagcggggttatgcgatgcgctggaaaatcattctccagcggtgccggtcgatatattgcatcgtgccttacgtgaaatgcatgaacgtgcagatggtgtgcgtcgtgaacgtcagcaagttatggcagaagagggacagaaatttctggcagaaaatgctcagcgtgacggtataagcacgacagaatctggtttacagttctctgtactaaagcagggtgatggtgcaattcctgcccatactgaccacgtgcgtgtccattacacggggcgtctgattgatggcaccgtgtttgacagctcagtacagcgtggtgaacctgctgaatttcctgtgaatggggtgattgctggatggattgaagcattgacgttgatgcctgtcggttctaaatgggaactttatatcccttataatttggcttatggcgagcgtggtgccggtgcatcgattcccccatatagcactctgattttcgaggtggaattgttggatattctgtaa

SEQ ID NO: 9240 - DNA, 1026 bp, Photorhabdus luminescens
atgaaaatattcattaccgatgaacaaaaagccgaacttgaacatctccatcacacctgccgtgataagagggagtgtgatcgcatcaaagcggtcctgctggcctctgaaggctggagttcagtgatgatcgctcaggccctgcgtcttcatgaaatgaccgttaaccgtcatatcagcgattaccttaatcaaggtaaacttaaatctgataatggggggtctgatagtttgctttctcaagaacaaactgattttttaatcaatcacttatctcaacatcttttccatcacacccatgaaatcgtggcctatgttgctcagctctggaatattacctttagcattcccggcatgaataaatggctacaccgtcagggtttttcttataaaaaaccttgtggcgtccctcataaattcgacgcagaaaaacagcgacaatttattgaatattatgagaatcttaaagtcacagcgaaagacgaacccatcctttttcttgatgctgttcacccgactcaaggcaccaaactcggttatggctggatgcgaaaaggcgagaaaaaaacagtcaaaacaacaggaagccggactcgcctgaatatattgggcgcgctcaacctgaatgccattggtcgtacggtgttccaggaatatcaaaccatcaatgactacaatatttgctgttttttcaatgaaataagaaagtcttatcctgactatcatcaaaaaattcatcttattgtggatggggcgggttacaacaaagctcatcttgttaaggagtgggcttatgttagcaatattgagttacattaccttcctccctatagcccaaatttaaacccaatagagcgattatggaaggtcatgaatgaacaggttcgaaataaccgttattttgcggataaacatgaatttcgagacaacgtcttcaaatttttcaccacaacgctaccggatatagcggactcgctgatgtctagaattaacgaccattttcaggtgctaaaaactgcatcttga

SEQ ID NO: 9241 - DNA, 744 bp, Photorhabdus luminescens
atgctagaacaaatctgccaactggctcaggaagctggtgcggctattatgacaatttatcaggatgaacatcccctgaaagttgatcataagcaagatgattcaccggttactatggctgatattgtggctcataaaataattaaagccggattatcccgtatcgccccagaaattccactgttgtcggaagaagagcttcctacttgggaagagaggcgtgattggaagcgctattggttagttgatcctctggatggtaccaaggaatttattaatcgtaacggtgaatttacggttaatatcgccttgattgatgagggcgttcctgtgatgggcgttatatatgctcctgtgcaggatacgctttattccgggcaagggcggcaggcatggaaaaaagcctgtggaggtcaatgtttgccgattaagattcgtgatgctaatccaccaatggtcgttgttagccgctctcatatggatacagaattagaagattatctcaatcaattaggtgaacatcagacggtttctgtagggtcttcactaaagttctgtttggtggcggaaggaaaagcgcaactttatcctcgctttgggcccactcatatctgggatactgcggcgggtcacgctatagccattgctgctggtgctcacgtgacgaactggaaaggtcagacgctagattatacgcctcgtgaatcattcctgaatccgggatttagagtaacgattttttaa

SEQ ID NO: 9242 - DNA, 555 bp, Photorhabdus luminescens
atgataaagaactttatgctatatgctgcgctactttgttctcctgctttagcattcgcccacaacatcactctggaacaacaggttcctgcgatcagtgtttctgataaaggtgagttgttactcaacaataacaagtttagctaccaaaattgggatagtggaaaactgattggtaaagtgagagtcatacaacatattgcaggtcgtagtgcagctaaagagatgaatgctccactgatagaagaaataaaacgcgctgatttttcaaaagaaaaataccaaacaaccaccatcatcaatatcaatgatgccatattcggtactggaccctttgtccgcagcagtattgaagatagcaaaagagagtttccgtggtctcagtttatcgctgacagcaacggtgtggccaaaaaagcttggcagttggaagctaaaagttctgccattattgtcctggacaaaaatggcgcagcgaagtttaccaaagaaggtgcattaaacagtagtgaaatcaaacaggtcattgaattagttcgtaaggaactacagtaa

SEQ ID NO: 9243 - DNA, 207 bp, Photorhabdus luminescens
atgaaaatttttcaccgatataacccactgaaaattgctctctacgttaaaactttattccgtggacgtttatacattaaagacatgggggcttttgaatttgactgcggcaaaattttaccgccgaaggtgagagataagcgccattttagtgtaatgagcgaagtcaatcagcaagtgctacgtttgcaggccgaaataggatag

SEQ ID NO: 9244 - DNA, 1332 bp, Photorhabdus luminescens
atgctaaatagtctcttaatagtatttctattgtgcgcgataagcgcctttttttcgttatctgaaatctctcttgctgcctctaggagaatcaaactaaaactgatggcagatgaaggtaatatcaacgcagctcatgtcctcaaattacaagaaacgccgggaatgttttttaccgtggtgcaaatcggcctaaatgcagtagcaattttggcaggtgttgtcggtgaatccgcattctctccttcattgaaaacgtttttcatgaaatttatgcgccccgaatgggcagaccagttgggctttatctgctcatttatcattgtgaccagtatatttattttgctcgctgacttgacaccaaaacgtatcggcatgattaagcctgaagcagtcgccgtgaaaatcgttaacccaatgcgtttctgtctgaccgtttttcgtccactagtttggctatttaatggcctgtctgatcttatctttaagctctttaaaattccgacagcacgtaatgaagatatcacatccgatgatatttttgcggttgtggaagcaggggctgttgcgggtgtgctgcgtaaacaagagcatgaactgattgaaaacgtgttcgagctcgaatcccgcacagtgccttctgccatgacctcaagggaaagtatcatttacttcgataaggatgaaagtgaggaaagtatcaagcagcgggtttctagccagccacattccaagtacctgatatgtgatagagatattgatcacgttatcggttatgtggattccaaagatctgcttaaccgtgtcctaagtggtcaaagcctaagcttcaataaaggtgtccagatccgcaacgcgctgatcattccagataccttgacactttcagatgcactggaaagttttaaagcggcaggtgaagatttcgctattattctgaatgaatatgcattggtaatgggtgtgattacccttaatgatgttatgaccacactgatgggtgatttagtcgaccaaggacaagaagagcagatcatcatccgtgacgaaaattcatggttagtagaaggaggaacacctattgatgatgtacagcgtgtactggatattgatgattttcctgattcaagtaactatgaaaccattgcaggtttcatgatgtttcggttgcgtaaaattccaaagcgtactgattcagttaagtttgctggttacaaatttgaagttgtcgatattgataactacaaaatcgatcagctattagtcacaaaaattactgatactctcaccacggcacccacgcaaaaccagcctatcagtgatgataaataa

SEQ ID NO: 9245 - DNA, 648 bp, Photorhabdus luminescens
gtgccaacttcagctaataaaagcctatctattgatcctcatagtgcattaccaggcagaactgagccacttaaggtttcacctaaccatgctgttactgatcatacgatagaacctgttccagaaaatatggaagtggcctattttggtatgggatgcttctggggcgtagaacgcctattctggcaacaacctgatatttacaccacctccgcaggttatagcggcggtacaacagccaatccaacttacgaagaaatttgtagcggcctgaccggacatgctgaggttgttagaattgtttacgatccagcaaaaaacagctacgaaaacttattaaaactcttctgggaaaaccacgatcctgctcaagggatgcgccagggcggggatattggttctcaatatcgctccgcgatttataccgtgtcacctcagcaacatgaactggcattagccagccgtgaacatttccaaaaagcaatgcaacaacaaagcgacaatcgccctattacaacggagatcacagaagcggggccattctattttgctgaagactatcaccaacagtatctatttaagaatcctgaggggtattgcgggctaggcggtattggtgtttgcctacccaaaatgaacgaaaactag

SEQ ID NO: 9246 - DNA, 1743 bp, Photorhabdus luminescens
gtgtcgagataccccgttttatgctttctttgtgtgtctatcgtaactcccattgctcatagtgctaatcttcgtctgaaaatagaaggattaacaggtaagttggaaaaaaatgcccgaattcatctctccactattagtactgatgaagttgcgccagatggccgttttcgatctcgtgtagataaagcgattcgtgaaggcttgcgcccgcttggttattatgaacccattatcgaatttacctatcaggaaaatagaccgccagctcgctcggtattaacggcaaaagttactgtaggcgaaccggtgagaattgccgatgttaatgttgttttggaaggtggggctaagacagatggagattatgccaaacttgttaaaagcaaaagcccaaagaaaggaacgattcttaatcatgatgaatatgaaaaccttaaaggttctttgaccgggctcgctattaggaaaggttattttgacgcggttatgaaaaagagccaattaggtgttgccaaagaacgacatgaggcattctgggactttgtttttaatagcggtgagcgttatcactttggtcaggtgcgttatcgtggttcacagatccgcgaagattatttgaatcatctagttccattcagcgaaggggatttttatacctctgaacaattagccgaattgaatcggcggttagcagaaactggctggtttaattcagcagtagtctcaccggattttaattccgctagaaaaaatggtgacggaatgcttcctcttgaagcggtattaacgccacgttccaaaaactatgttgaactgggtgggggttatggatctgatgtagggccacgggtaaaggcgaaatggacaaaaccgtggcttaattcccgtggacacagccttagcgccagtatcaacctttctgcacctgaacaggttattgatgctacctataaaatgccgctgaaggtgaatccgttagagcaatattacgcattgcagacgggttataagcgtaaagatatcaacgataccgtatcagataccgcgacagtaaatttttcccgtaattgggatctttcaacgggttggcagtatgggatcaatatgcgttggagtctcagccactttactcaggctaatgttaccaatacggcaatgttattgtacccaggggcgaacgtcagccgtatccgccagcgtggaggaacgatgccttattggggcgatagccagcgctattctattgatatctctgataccctttggggctctgatgttgatttcttggtgttacaggcgcaaaacgtttggatcagaacttattgggataatcaccgttttgttgctcggggtaatttgggttggatagaaaccaatgcattcgagaaggttccacccgacctacgttttttcgctggtggtgatcacagtgttcgtggttacagatatcagaaaatctcgcctaaagataataaaggaaaattgaccggtgcatccgcattggttgtgggttcgcttgagtatcaatataacgtaacaggtaattggtggagtgctgtttttgttgataccggtgaagccattaatgacgttagaaagagcaattttaaaaccggcgtaggtattggtgtgcgttgggcttctccggtcggacctattaagtttgaccttgccagaccaataggggattcagaatcccgtaacatccagttttacatcgggttaggatctgaattatga

SEQ ID NO: 9247 - DNA, 3774 bp, Photorhabdus luminescens
atgagatggatgaaaaaggtcagcattgcttttctgctgatagtgactttgttggttattgctgttgctggattggtaggaacgcaatctggcctgcattttatgattaacagtgctgcccgttgggtaccggggctggatataaccagcgtcagcggcggttggcgtgatttgaccctgaaaggcgttaagtaccaaatgcccggtgttaatgtcaatgtggatcaactccacctttcattgcgtctttcctgtctgaaaaagagtcaattatgtgtgaatgcattgacaacggaaggcgtaaaagttgcgattaatactaaacaattgcctcctgcgggagaaccgtcgccaaagtcagaacctttcaccgaactgaggacaccgtatccagtctcacttgatttgctatccgttaaaaatgtcactgtcaccgtaaatgatacgatatttgcccttgatgaatttaggaccgctgctcactggcagcaaaaagcattaacgcttaaaccaacgaaaattaatggattgctggtggaactgccaaaaacgccgcctgaacggctgaaaatagcggaagcagaggggaaagcgaaacgagggagtgaaccggaaaaatcgttggcagaaattctgaaaaaattattctctcaaccgctattggcaacattaccagaagtgcctattccactggatatcactgttgcagggataagtggtaagcaattacggctgacgggtgataccaatatcacaatcaatcagtttttattgcaacttagcaatcaggggcagcagattcagctcaataaattgaatgttaaaatgccggaaggttctctcgccattaatggttccgcaactctggcacagcaatggccgataaaactggtaataaaaggtgagctaaatcgacaagagatccaaggacaaaaggttaatgtaaagcttaatggcgctttacaggagcaactcagcttagggctaaatttgtctggtcctgtcagtgctaaacttgatgctcaagcggaactggctaaggtaggtttacccgtgcgggtgacgcttgaaagccaacaactaagttggcctttaacggggaagccagaatatcagctagatggcgtaaaaatgcgccttaatggtaaggccagtggttatgatttgtcattgcgttccggtattaacggtagtgaaatcccgccagcattacttgtattagatgccaaaggtaatgaagaacagtttaagttgacccgtttacgcctgtctgctttgcagggaaagagtgaactggtaggtgtggcagattggagtaaggcggtaagttggaatgcggtgctgacactctccgggatcaataccgctaaacagtggccggaatggcctgctaaaatcgatgggaaaatagtgactcgggggagtttacacggtggtagttggcagcttcagatcccggaaattacgctggacggtaacgtaaaacagaacttaataaaagccaaaggtaagatttctggtaacgcggcgggtcagtggaatattcctcaattcgagctggctttagggcgcaataaaatgaatctccagggacaattgtccaaacagtggaaactggatggcgatatccgtgcaccgaagttggatggtatatttccggggcttggcggtgtcgtgaatgggacgctgaaactgcgcggtaatatacaagcgcctcagcttttggttgatctcaatgctaacgggttgaaatggcaggatttgcgtgttgatcgagtgaatgtgaaaggggatgtacgttctgctgaacagatccaagggaatcttgctgctaaagtcagtgagttgaaacaagcggatttgattgtccgtaattttacgttggatgctaagggcaatgagaaacagcacgacttgcaattgaagattgacggcaaaccgattgcgggtcaacttgcattgcatggtagttttgatcgtaagcaacagcgatggaaaggtagcattaacaatacccgttttgacaccccggttggagaatggcgcttaactaaagcgataactcttgattatcttaatcagcagcagaaagttactgtgggccctcactgttggctaaatccacatgcgcagttctgcgtacctaaatccattgaagctggtgtcagcggtagtgcatccatcgttcttgaacgtttggatcttgctttgattcagccattactggcacctgaaacacatttgaaaggtatattcagtggcaatgccgacgttaaatggagtgcggaaagcggattgcctcaggccaacgttaatttgcgtggtgatggggtgcatgttaagcagatggttgatggcactgcattaccggtagatttccagaccctgacactcaatgcaggcttgaagaatggcacagcagagttgaattggttatttaagattatgggaaatggccgattcaacggtggcgtacaagttgctgatcttgctgggagccgtaagctgtcgggtaatgtagatattcaggatatttcactggcgttaatcaagccgattcttgggaaaggtgataaagctgaaggtcatttgaatgctaacctgcgtctgggaggcaatgtcagaaatccattattgtttggccggttagacttgagtgcactgcaagcttcgggccattggatcccatttgatattgttcaagggcaaatgggtgtgaattttgatggaatacgttccgttcttgatggtgttattaaaacgccgaaggggcagcttaacctaaatggtgacgcggactggcgtaatgtggatgcatggcatgcacgagtaacggctaacggtgacaagttaagagtcgtttttccaccaatggtgaaaattgatgttagccctgctctggtgtttgaggcttctcctcagttgctgaaattggatggtagcgttggcattccttgggcgcgtattaccgtgaaggagctaccagaatcgacagttgagacttcatcggatgaagtcatattgaatgaaaatcttcagccattacaacagaaaaaagcatctatcccgattcaaagtaacttgacgattcatataggagatgatgttcgtcttagtgctttcggtcttaaagcacaacttaaaggcgatctgatggttgttcaagataaacaaggcatgggtttgaatggtcaagttgatattcttgatggccgtttccgtacttatgggcaggatctgatcgttcgtaaagggctgattatgttctcaggtccacctgatcagccattactcaacattgaggctatccgtaatccagattctaccgatgggcaggttattgcaggggtaagggtgactggtttggcggatcagccaaaagtagaaattttttcagagcctgttagatcacaattggaagcactttcttatctgttgcgtggtgagggtttagagaatagtaactcggacaactcacagatgacggcaatattaataggtttgggggttgcacagagtggtcagttggtgggtaagatcggtgaaatatttggtgtttccgacttagcactggatactcagggggttggtgataaatcacaggtagttgttagcgggaaaattacaaaagatctgcaagttaagtatggtgttggtatatttgattcactggcaacattaaccttacgctatagattaatgcctagattgtatctggaagcggtatctggtattgatcagacattggatttgctctatcagtttgagttttaa

SEQ ID NO: 9248 - DNA, 348 bp, Photorhabdus luminescens
atgcgaattattgtttatggcagcttacggcgcaaacagggcaatcatcattggatgaccgatgctcaatggttaggtgatcatcggctggaaggctatgagctatatgaccttgggcattatcctgcggttatccgtggtgacggaagtattgaatgtgaggtatatcgaatcaattctactatactgacagaattagatgatttgaaagataattcgcgggagtatgtaagggaattgattcagacaccgtatggcaatgcatggatatatctttatcagtttccaataaccggtttacggcggataaaaagcggtgattggttgaagcgccatgtggaagagtaa

SEQ ID NO: 9249 - DNA, 531 bp, Photorhabdus luminescens
atgagcctgaacttagtaccagcaggaaaagaactgcctgaagatatctatgtcattattgagatccctgcaaatgcagatccgattaaatatgaaattgataaagaatccggtgcactgtttgtagaccgttttatgtctaccacgatgttctatccatgcaactatggttacatcaacaacaccttatctctggatggtgacccggttgatgttctggttcccacaccatacccactacaacccggctctgtgatccgttgccgtccagttggcgttctgaaaatgactgatgaatcaggtgaagacgcgaaactggttgcagttccacatagcaaactaaccaaagagtatgatcacattaaagatgtgaatgatctaccagaactactacgcgctcagatcactcacttctttgagcactataaagatctggaaaaaggtaaatgggttaaagttgatggttgggataatgtcgaagctgctaaagcagaaattatctcctctttcgaacgtgctgctaagaaataa

SEQ ID NO: 9250 - DNA, 1005 bp, Photorhabdus luminescens
atgaaaacattaggcgaattcatcgtcgaaaagcagcaagatttttctcacgctacaggtgaactcactgcattgctttctgctattaagctcggagcaaaaatcattcaccgtgatatcaacaaagccggtttagtggatattttaggaaccagcggtgtgtccaatgtccaaggcgaagtacagatgaaactggatctgtatgctaatgaaaaactcaaagcagcactgaaagcacgcggtgaagttgcaggaatcgcttctgaagaagaagatgatatcgttattttcgaaggcgaccgcgctgaaaacgcaaaatatgttgttttgatggacccattagatggctcttcaaatattgatgtaaacgtttccgtcggtactatcttctctatctaccgccgtattacccccattggtcagccagtaactgaaaaagatttcctgcaaccaggtcatcgtcaagtcgccgccggctatgttgtttatggttcttcaactatgctggtctacaccaccggctgtggggtacacgcctttacttacgatccttctttgggagtattttgtctttcccatgagaaagttcagttcccacccaatggcaatatgtattccatcaacgaagggaattacatcaaattccctatgggggtaaagaaatacatcaaatattgccaggaacaagatgaagcaactcagcgcccttataccacccgttatattggttcgctggttgctgatttccaccgcaatttactgaaaggtggtatctacatttacccaagtaccgccagccacccatcaggaaaattacgcctactgtatgaatgtaacccaatggcattcctggccgaacaagcgggtggtaaagccagtgatggtgccaaccgcattctggatatcactccatccaaactgcaccaacgcgtacctttctttgtgggtagtaaatcgatggtggaaaaggcagagagttttatggctgagttccctgatgagtaa

SEQ ID NO: 9251 - DNA, 1371 bp, Photorhabdus luminescens
atgcgtattcatattcttggtatctgcggcacttttatgggaggactggcaattttggctcgttctcttggtcatgaagtgactggttctgatgccaatgtttatccaccaatgagtaccttactggaaaaacatgggattaatctgattcagggatatgacccggcacagttggattctgtgccagatatggtcatcatcggtaatattatgagccgtgggaatccttgtgtagaagctgtgttggagcgtgggctcccttatacttctggcccacaatggctgcatgattatgttttgccagaacgttgggtgctggcggttgcagggacgcatggcaagacaacaactgcgggtatgttagcttggattttggaagcctgtggttataaaccaggtttcttaatcggtggtgttccggggaattttgaaacatcagctcagatcggggaaagcccgtttttcgtaatagaagctgatgaatatgacagtgctttttttgataaacgatctaagtttgtgcattacagtccacgtacgctgatcatgaacaatctggaattcgatcatggcgatatttttggcgatctggctgctattcagagacagttccaccatcttgtcaggatcgttccgggtagtggtaagatctgtgtcccggataacgatgttaacctgaaacaggttttgtctatgggctgttggagtgagttggaactagtgggtgaaacgggtaactggcaggcaaaaaagatcagtacagacagtcgtcattatcaggtgttttatggtggtaaagttgtcggagaagtgaacgggtcgctggtgggtgaacataatatgcgcaatgggttgattgcaattgctgctgcacatcatgttggtgtccagcccgcagatgcctgttgtgctttaagtgaatttattaatgcccgtcgtcgtcttgaactacgtggtgaggaaaacggcgttactgtttatgatgattttgctcatcacccgacagcaattctggcaacactcgaagccctgcgtagtaaggttggaggaacagcccgtattattaccgtactggaaccgcgttcaaatacgatgaaaatgggtgtgagtaagaatgagatcgcaccagcattggggcgtgctgatgaagtatttttattccagccagctaatattaaatggcacgtatcagaaattgcagatcactgtgttcagcctgcgtattggagcgctgatatagattcactggtgcatatgattgttgataaagcacagcagggggatcatattctggttatgagtaatggaggatttggtgatattcatgaaaaattactctctaagttgaataaaaaagcttatcaatcctga

SEQ ID NO: 9252 - DNA, 471 bp, Photorhabdus luminescens
atgcgcactccctctaaacaggaagacttagtaaaagctttcaaagcgttattgaaagaagaaaaatttagctctcaaggtgaaattgttactgctttactggaagaaggttttgagaacattaaccaatccaaagtctctagaatgctgactaaatttggtgctgttcgcacccgtaatgctaaaatggagatggtttactgcctgcctgctgagcttggtgttcctactgccactagcccactaaaaaatctagtattagacgttgattacaaccatcctatagttgtgattcgcacaagccctggtgctgctcaacttattgctcgtctgctagattctcttggtaaatcagaaggtatactcggcagtatcgcaggtgatgacaccattttcgttacactcaccagagattccacaacagaacagctgcgtggagccatccttgggttgttcgaacaagagctttaa

SEQ ID NO: 9253 - DNA, 939 bp, Photorhabdus luminescens
atgaaagttgcagttctcggtgcagccggtggtattggtcaggctcttgctcttctactcaaaacccagcttccttcaggttcagaactttctttatatgatatcgctccagtaacacctggggtggctgttgatctgagccacattccaacggaagtgaaaattaaaggctttgctggtgaagatgcaactccagcgttggaaggagcaaatgttgtattgatttctgctggggttgcccgtaaaccaggcatggatcgttcagatctgtttaatattaatgcggggatcgttcgtaacctggtagaacaagtggctaaaacttgcccgaaatcactgattgggattattactaacccagtcaacacaacggtggctattgcagccgaagtgctgaaaaaagcgggtgtatatgacaaaaaccgcctgtttggtgttacaacgttggatgttattcgttctaatacttttgttgctgaattgaaaggtaaaaaaccacaggaaatcgaagtacccgttatcggtggtcattctggtgtgacaatcttacctctgttgtctcagatccctggtgtgaactttactgatggagagttggctgctttaactaagcgtattcagaatgctggtactgaagttgttgaggctaaggcaggtggaggatctgcaactctgtctatggggcaagctgcggctcgtctgggcctctctttggtccgtggcttacaaggcgaaagtgatgttgtagaatgcgcttatgttgaaggtgatggtaaatatgctcgcttcttcgctcagccagttcgtttgggtaaaaatggcgtagaagagcgtttgaacattggtgagttgagtgattttgaacagaaagcactggaaggcatgctagatgtattgagaaaagatatagaattaggcgaaaaatttattaataactaa

SEQ ID NO: 9254 - DNA, 267 bp, Photorhabdus luminescens
atgatttcaaggaaatctgattggcatcctgccgatataattgcagctttacgcaagcggggaacaaccttagctgaggtatcacgcagggcagggctcagctcatcaaccctggcgaatgcactatctcgtccgtggccaaagggagaatggataattgcgaattatctggaaatacacccttcagaaatttggccaagtcgttattttgatccaaatactggagaattattagaaaggaaagtacgcgaacaaacaaataattag

SEQ ID NO: 9255 - DNA, 309 bp, Photorhabdus luminescens
gtgggtgagttacctggatcaccacaaggagttaatgccagagcaaaacgagaggagtggttacgtcagaaaagacaaggtgtacaaggtaaagcagtcgagtatcactactcctgtttcccggaaacgaccattgtagcattggagcttcatgaatcatcttctgagtatcaggtacagaagcaagatcctttgtcgatttgggttggtgcttttcatcagttatcagaatctgagaaacaggctgtgatagccatgattttacgggatggtatcagaagttttttagaaaaactttctgttatttaa

SEQ ID NO: 9256 - DNA, 402 bp, Photorhabdus luminescens
gtgcaaagtgagaagaaaagtatgaaaaaagaatggtactcagctaaagagctggttggtattgccggacttccttcttcgccacagggaataaatctgatggcaaggcgggaaggatgggaatatagacgtaaacggggtgttcagggcaaggctcttgaatatcatataaatagtttgcctgaagatgtacttaatgtgctatccgtaggggaaagcactattgattatacaaacaaacgacaagacccattcttaatttggattgaggcttactatcaattaactaaagttgagcgggaaaaaattgtgaaatttattcttcgggaggggctcgcaaaacttattggttatattgatgtaggtgttgaagacgcagagaaaaacctggagtcagattaa

SEQ ID NO: 9257 - DNA, 972 bp, Photorhabdus luminescens
atgaatttagaaaccattatcaagctaaccgctgatgatatggcagcggtaaatgaaaccattcttagtcagttgaattctgacgttactcttatcaatcagttgggctactacataatcagtggtggtggaaaacgcattcgcccaatcattgccatcctggctagcagagtattgggttatcagggtgataagcatattactgttgctgcattaattgaatttatccacacagcgactctgttacatgatgatgtagtagatgaatcagacatgcgacgtggcaaagcgactgccaatgccatgtttggtaatgcagcaagcgtgctggttggtgactttatatacacacgctctttccagatgatgacagcgcttaactccatgcgagtgcttaaattaatgtcagaggcaaccaatgttatcgctgaaggcgaagttttacagttgatgaactgcaatgatccaaatatttctgaagatgattatatgcgggtgatttacagtaaaacagcccggctgtttgaagtcgccgcgcactcttccgcaattctttctaacgccaccccagagcaagaaatggctttacaaaattacggacgttatttaggcactgcattccagttaattgatgatttgctggattataatgctgatagcgatacattaggcaaaaacactggtgatgatcttaacgaaggtaaaccgacattgcccttgctacacgctatgaatcatggcactccagaacaatcagcacttatccgtgaagcaattgaaaagggtaatggccgtcatttactcgaaaccgtactgacaaccatgaaacagtgcggttcactggaatatacccgtaaacgagcagaggaagaagcagataaagcaatagctgctttgcaggcgctggaaaactccccatacaagcaagcactcgtggggttagcccatatcgccgtacaacgcctttcttaa

SEQ ID NO: 9258 - DNA, 309 bp, Photorhabdus luminescens
atgtacgcggttttccaaagtggtggtaaacaacaccgagtcagcgaaggtcaaacaattcgcctggaaaagctggacatcgcaacgggtgaaactgttgagtttgaccaggttctgatggtcgctaatggtgatgacatcaaaatcggcgctcctgtcgttgaaggcgttaaaatcaaagctgaagtggttgcccacggtcgtggcgagaaaattaaaatcgttaagtttcgtcgtcgtaaacacagccgtaagcagcaaggccaccgtcagtggttcaccgatgttaaaatcactggcatcgcttaa

SEQ ID NO: 9259 - DNA, 258 bp, Photorhabdus luminescens
atggcacacaaaaaggctggcggctcaactcgtaatggccgcgattctgaaagcaaacgtctgggtgtaaaacgttttggtggcgagtctgtattagcaggcagcatcattgttcgtcaacgtggcactaaattccatgctggcaataacgttggttgtggtcgtgaccacaccctgttcgcattagctgacgggaaagttaaattcgaagttaaaggcccgaaaaaccgcaaatttatcagcatcgaagctgaataa

SEQ ID NO: 9260 - DNA, 1176 bp, Photorhabdus luminescens
atgaaatttgtagatgaagccaggatactggttgttgcgggggatggtggcaatggttgtgtcagcttccgccgtgaaaaatatattccgaaaggtgggccagacggtggggatggtggggatggtggggatgtttatctgctagcagatgaaaatctcaatacactgattgactatcgttttgaaaaatcctttcgggcagaacgtggacaaaatggtcaaagccgtgattgtacaggcaggcgtggtcaggataccacgattaaagtccctgttgggacgcgtgtccgtgatgcagtaaccggtgaggttctaggcgatatgattcgtcatgaacagcgtttaatggtagcgaaaggtggattccacgggcttggtaatactcgttttaaatcttcggtcaaccgggctcctcgccaaagaacgatggggacctcaggtgaaacccgtgaattgatgctggaactgatgctgttggcggatgttggtatgctagggatgccaaatgcgggcaaatccacctttatccgtgctgtttctgccgctaaaccaaaagttgcagattatccatttaccactctggtaccaagcttgggtgtagtaaggatggataacgaacaaagtttcgttgttgctgatatcccagggctcattaaaggtgcttccgatggtgctggcttgggtattcgcttcttgaaacatttggaacgttgtcgggtattgctgcacttaatcgatatttgtcctgttgatggatcagatcctgttgaaaatgcccggattattgtcaacgagctacagcaatacagtgaaaaattggcagaaaaaccacgcaggttggtgttcaataaagttgatctgttggagccagaagaagctagacagcgtgcccaagctattgctgatgaattgggttgggaaggcgacttttatatgatctcagcgataaatcgtcagggtgttaaagcgctttgctgggatattatggagtttatgaaaactcagcctcgtaatatgagcagaacagaaggtgaaactcagcctgagaaagttgaattcatgtgggatgactaccataagaagcaattggaacaggtttcggaagtagacgatgactgggatgacgattgggacgaagatgacgatgaaggcattgaagttatttacaaacgctga

SEQ ID NO: 9261 - DNA, 1527 bp, Photorhabdus luminescens
ttggtgatgggtcatcgtttacttttccccactttgcgccttagtattgtggtatgtctacatccatatgcgaaatttatgtccttctttaaaattgccggcagattaatttgcgttaccgctctgtatttaactatacccaacgcaaacgccacacctgttgaggaatatacgcaatatctgcctgatggtactaatctggcgttaatcgctcaaaaagcgggcagcagtaccccgttaattgattatcacgggcagcaaatggctctaccagccagtacgctgaaagttgtcacagctcttgcagcattgttacaactgggtaaagattatcgctttatcaccacactggaaagtcacggaaaaatttcaaacggcatcctgagagggaatttgattgctcgttttgtcggagatccgacactgacccgtcaacaacttcgcaatatggtcacagttctgaaacaatctggcgtggaaaaaattgacggtgatcttttgatagatgtttccgcctttgccagccacgataaagctcccggttgggtatggaatgacatgacccaatgtttcagcgctccccctgctgctgcaattgtagatcgaaattgtttttcagtttcgctatatagtgctgaacaccccggtgatactgcatttatccgcgtagcatccttttatcccgtaaatatgttcagcgaagttaaaacgttggcaaaaggctctcctgaaagccagtactgcgaactggacgtcgttcccggagagctgaaccgttttactcttaccggatgccttactcaacgcagtgaaccgttgccactggctttcgcgattcaaaatggtaccagctatgcgggtgcaattctcaaaaatgaattgcaaattgcaggaattgaaatcacaggtaatcttaaacgccaaagtttaccaactgaaccgggaaaagttctggctcaaaatcaatcagcaccattacatgatctgctaaaagtcatgctaaaaaaatctgacaatatgattgctgataccgtatttcggacaataggccgacaacactttgatataccaggaacctggcgttcaggttctgatgcggtaaggcaagtattaaaacaaaaagcaggtatcgatctaggaaataccgtgatggtagatggctcaggattatcccgccataatctaattactccagcaaccatgatggaagtattacagtttattgctcagcatgatcaagaattagattttatttccatgctgccattagcgggtcatgatggcacattaagataccggggagggctggatgaagcaggagtaaacggaaaagtttcggctaaaaccggtgccctgcaaggagtttataacctagctggctttataaccactgctagcggtcaacaagttgctttcgtgcaatttatttctgcttacgccgtaccgccaaaagagcatcgcaaccgtcgggcccctttgattcgattcgaaagcaggctatacaaagatttataccaacacaactga

SEQ ID NO: 9262 - DNA, 477 bp, Photorhabdus luminescens
atgaaacagattccaatgacggtacgtggcgcggataagttgcgcgaagagctagattatctaaagaacgtacgtcgtccaaaaattatttcagacattgctgaagcgcgtgaacatggtgatctgaaagaaaacgctgagtatcatgctgctcgtgaacaacaaggtttctgcgaaggccgtattcaggaaatcgaagctaagctttctaatgcacaagtgattgatgtcacaaaaatgcccaagggtggacgtgttatttttgggactacagttacggttttgaatgttaatactgatgaagagcagacttaccggattgtgggtgatgatgaggctgatattaaagaaaatttaatctcagtgaattcaccaattgcccgcggtttgataggtaaagaagttgatgacgttgttattatcaaaacaccaggcggtgaagttgaatatgagatcctgaaagttgaatatatttaa

SEQ ID NO: 9263 - DNA, 294 bp, Photorhabdus luminescens
atggcccttaacaaaaaacaagtacaacacctgaaaagtctcgctcacccgctaaaacctgttgtcatgattggtaataacggcctgaccgagggtgtgttggccgaaattgaacaaacgctgtcacaccatgagcttatcaaagtcaaaatcgcaggcgaagatcgtgaaaccaaaaatttgatcgccgatgcaattgtccgcgagaccggtgcatataatgtgcaagttatcggtaaaactctagttctttaccgccaatcggaagaacgcaaaattattttacctaaataa

SEQ ID NO: 9264 - DNA, 135 bp, Photorhabdus luminescens
ctggagcttgccgaacgttttttattggccattgtcctttccaactatacaacgaataaagagccagatatctattgctccgtacatcaaaaccacaacacactatttatggtgatagagatgagatggcggtag

SEQ ID NO: 9265 - DNA, 630 bp, Photorhabdus luminescens
atggccaataaaaaacgttcggcaagctccagtcgctggttacaagaacactttagtgataaatatgttctacaagcacagaaaaaagggcttcgttctcgcgcttggtttaaacttgatgaaattcaacaaagtgacaaaatttttaagcctggcatgaccgttgtcgatttaggcgcagctcctggtggatggtctcagtacgcagtgagtcaaattagtgataatgggcgagtgattgcctgtgatcttttaccgatggatcccattgttggcgtcgatttccttcagggtgattttcgtgatgaacttgtattgaaaacattgcttgagcgagttggtgataacaaagtccaggtcgtcatgtcggatatggcacccaatatgagcggaacacctgcggtcgatattcctcgatccatgtatctggttgaattggcgttagatatgtgtcgtgatgtgctggcccccgaggggagttttattgtcaaagtgtttcagggagagggctttgatgaatacctgagggaaattcgctccctatttacgaacgtgaaaattcgtaagccagacgcttcgcgggcccgatcgcgtgaagtatacattgtagcgacagggcggaaactatag

SEQ ID NO: 9266 - DNA, 1962 bp, Photorhabdus luminescens
ttgagtgacatggcgaaaaacctgattctctggttagttatcgcagttgtgctgatgtcgttattccagagttttggtcccagcgattccaatagtcgtagggtggattattctaccttcatcaatgaattagcccaggatcaggtgcgcgaagttcgtatcacaggtcgtgaaattaacgttagtaggaaagataacagcagatacaccacttacctaccagtacaggatgaaaaactgctagatacgttactgaataaaaacgtaaaagtggttggtgaacccccagaggaaccaagtctgctaacttctattttcatttcctggttcccgatgttgctgcttattggggtctggattttctttatgcgtcagatgcagggtggtggcggtaaaggggcaatgtcttttggtaaaagcaaggcccgtatgctgacagaagatcagattaaaaccacttttgctgatgttgctggttgcgacgaagcgaaagaagaagttggtgaactggtggaatatctgcgcgagccaggccgcttccagaagttgggtggaaaaattccgaaaggtattctgatggttgggcctccgggtacgggtaagactttactggcaaaagcaattgctggtgaagcgaaagtgccgttctttactatctctggttctgattttgttgaaatgtttgttggtgttggtgcatcccgtgttcgtgatatgttcgagcaggcgaagaaagcagcaccttgtatcatctttattgatgaaattgatgcggtgggccgtcagcgtggcgctggtttgggtggcggtcacgatgaacgtgagcagactctaaaccagatgttggttgagatggatggttttgaaggcaacgaaggtattatcgttattgccgcgactaaccgtcccgacgtacttgatcctgcgttgttgcgtccaggtcgttttgaccgtcaggttgttgttggtttgccagacgtacgtggccgcgagcagattctgaaagttcatatgcgccgggttcctctggatacagatgttgatgcttctgtcattgctcgcggtactccgggattctctggtgctgatttggctaacttggtgaatgaagctgctttgtttgctgcccgtggtaacagacgcgtagtttctatggttgaattcgaaaaagcgaaagacaaaatcatgatgggcgctgaacgccgctctatggtgatgacggaagagcagaaagaatcaactgcttatcatgaagcaggccatgctattattggccgtctggttcctgagcatgatcctgttcataaagttaccattattccgcgtggtcgcgctttgggggtgacttttttcctaccggaaggcgatcagatcagcgctagtcgccagaagttggaaagccagatttcaaccttatatggaggtcgtctggcggaagagattatttatggcccagacagtgtttctactggtgcatctaatgatatcaaagtggcgacatcaattgcccgtaacatggtaacgcagtggggtttctcggaaaaacttggcccattactctatgcagaggaagaaggggaagtgttccttggccgttcagttgctaaagctaagcacatgtctgatgaaactgctcgtcttattgatcaggaagttaaggcaattatcgatcataactatcaacgtgctcgtcagattctgatggacaaccttgatgttctgcattcgatgaaagatgcattgatgaagtacgaaactattgatgctccccagattgatgacttaatgaatcgtacaaatgttcgtccaccagcaggatgggaaagtgataacggcagcagtaataacagtcgcccaacaggtaatacacctcctccacaagctgcaaaaccaactgatgatatcaatacattggcgcaaggtggtgagcaagtagggcagtcaggaaataaagatcagtaa

SEQ ID NO: 9267 - DNA, 846 bp, Photorhabdus luminescens
atgaaactcagagccagagacaatgttctcgatctttcccgtccacaagtaatgggtattttgaatgtgactccagattcattttctgatggtggggctcataataccctgaatatggccttacaacatgctgagaagatgattaatgaaggcgctgcgatcattgatatcggtggggaatctacccgtccgggagctgatgaagttagtgagcaggaagaagtggatcgtgttgttccggttgttgaggctttagctcaacgatttaatatctggatttctgttgatacttcgaaagcattggtgatgagtgagtcagcaaaagctggtgcccatttgattaacgatattcgtgcattacaagagcctggtgctttggaaagcgtagctaaatctggcttatccgtttgcttgatgcatatgaaaggccaaccacgtactatgcaggatgctccacattatgaaaatttgttaatagaagtgaaccaattttttactgagcaaattgaacgttgtgcgatggcagggataacaaaagataaacttgttcttgatcctggcttcggttttggcaagaacttgaagcataactatcagttactggcgcatttaaatcaatttcatcaatttggtttacctgtgctagcaggaatgtcacgtaaatctatgataggtcagttgcttcatgtgccgccacaagaaagggttatcggtagtgtagcttgcgcagttatcgctgctatgcaaggagcgcaaattattcgggtacatgatgtcaaagaaaccgtgcaggcaatgcacattgtcggagcaacactttcagcaaaggaagaaaagaaattatga

SEQ ID NO: 9268 - DNA, 1338 bp, Photorhabdus luminescens
atgagtaaccgcaaatactttggtaccgatggtatccgtggcaaagtgggagatagcccaattacgccagattttgtgttaaagcttggttgggctgcgggtaaggtactggctcgtcatggttctcgtaagatcattatcggtaaagatacccgtatttctggctatatgctggaatcttctttagaagcaggtttagctgcggctggtttatctgcttcgttcactggtcctatgccaacacctgctgttgcttatctgacccgaactttccgtgctgaagctggaattgttatctctgcttctcataatccttattatgataacggtattaaatttttctctattgatggtacgaaactgccggatgatgtggaagaagcgattgaagctgaaatggaaaagccactgacttgtgtggaatccgcagagttggggcgtgcaaatcgtattgttgatgctgctggtcgttatatcgaattctgtaaaggtacatttccaagtgagcaaagtcttaatggattgaaaattgtacttgattgcgctaacggtgcgacttaccacattgctccaaatgtactcagagaactaggggctgatgttgtgacgattggctgtgaaccaaacggtatcaatattaatgaaaagtgtggtgctaccgatgttcgtttgttgcagcaacgtgttgtagaagagaaagcagatgttggtttggcatttgatggtgatggtgatcgcgttattatggttgaccatttgggacagaaagttgatggcgaccagatcctttatattattgcccgtgaagcattgagacaaggacaactgcgtggtggcgttgttggtacgctgatgagtaatatgggattggagttagcattgaagcagcttggtatcccatttttgcgtgctaaagtgggtgaccgttatgtgctggaaaaattgcaggaagaaggctggcgtttaggggccgaaaactctggtcatgttatcttactggataaaacaactacaggtgacggcattgttgctggccttcagattctgagtgctatggtacgtaaccatatgagtttgcacgatctgtgtagtggtatgaaacttttgccacaggtactggtaaatgttcgtttctccggttcacacgatccacttaaatcggaaaatgtaattaatattactaaatctgttgaaactgaattaaatggtcgtggacgggtattattacgtaaatctggtactgagccattgattcgtgtcatggtagaaggtgaagatgatgtgcaagtcacggccttggctcatcgtattgctgatgcggtgaaacatgcgggctaa

SEQ ID NO: 9269 - DNA, 339 bp, Photorhabdus luminescens
atgtatggagctcttttagttgttttcttgctagttgctatcgggctaattgccttggttatgctacagcagggtaaaggtgctgatatgggtgcttcctttggtgcgggtgcctctgcgacgctgtttggttcatcgggctctggtaactttatgactcgtatgaccgcacttttcgccactctgtttttcattattagtttggtgcttggcaatatgaccagtaaccagactggtgcaagcagtaagtgggaaaacattggcgagcctgctaaagtcgagaagtcaacggagattccgacggcaccagcagcaccaaatagtgatattcctcagtag

SEQ ID NO: 9270 - DNA, 189 bp, Photorhabdus luminescens
gtgcccacactagggcttacgggttcaagtcccgtcctcggtaccattattcggatagcttgcgtttttgcagctatcggcgtaatatttgccacgttttcgaacgcgggatggagcagcatggtagctcgtcgggctcataacccgaaggtcgtcggttcaaatccggctcccgcaaccacttcttaa

SEQ ID NO: 9271 - DNA, 465 bp, Photorhabdus luminescens
ttgggggtgggcttgtccacattagagcaaaaattaacagcgatgatttcagcaccagttgaagctttaggctttgagttagtcggcttggagtttattcgtgcacgtgtttctacactgcggatttatattgatagtgagaatggtatcactgttgatgattgtgctgatgttagccaccaggtcagtgcggtattggatgtcgaagatcctatctcagtgctttataacctggaaatttcttcacctggcttagaacgcccattgttcacgactgaacattaccagcgttttattggtgaggaagtcagtctggttttacgtatagcaatgcaaaaccgtcggaaatggctgggcattattaaaactgtcgacggcgaaatgatcacggttacggtggatggaaaagatgaagtgttcgcactgagcaacatccagaaagcgaacctggtaccccacttttaa

SEQ ID NO: 9272 - DNA, 1509 bp, Photorhabdus luminescens
atgaataaagaaattctggctgttgtggaagcggtttccaacgaaaaatcccttccacgcgaaaagatcttcgaggcgctggaaacagcattggccacagccaccaagaaaaaatatgaacaagatatcgatgttcgtgtcagcattgaccgtaaatctggtgattttgacactttccgtcgttggttagttgttgaagaagtgactcagccgactcgtgaaattacgctagaagcggctagatttgaagagcctgaaatcgatttgggtagctataccgaagatcaaattgaatcagtaacgtttgatcgtattacaacgcaaaccgctaaacaggttattgtacaaaaagtacgtgaggctgagcgcgctatggttgttgatcagttccgcgaacagcaaggtgagatcatcaccagtgtggttaagaaagtcaatcgtgagaatatcactcttgatttaggcaataatgctgaggccgttatccttcgcgaagatatgttaccaagggaaaattttcgcccaggtgaccgcgtgcgtggtgtactgtatgatgttcgccctgaagcacgaggtgcgcaactgtttgtcagtcgttcccgcccggaaatgctggttgaactgttccgtattgaggttccggaaattggtgaggagctgattgaaattaaagctgctgcccgcgatccgggatctcgcgctaagattgcagtaaaaacgaatgacaagcgtatcgatccggtaggtgcttgcgttggcatgcgtggcgcgcgagtacaggctgtttccagtgaactgggcggcgaacgaatcgatatcgtactgtgggatgataatcctgctcagtttgtcattaatgctatggctccggctgatgttgcatctattgttgtcgacgaagacaagtgtacgatggatgttgccgttgaaagcaacaacttagcgcaggctatcggccgtaatggtcaaaatgtgcgcctggctgcgcagttgttgaaaaaacatcgtggtgatgacaaatgggaattaaatgtcatgactgctgaagagttacaagcaaaacatcaggcagaagctcatgcttctattgatacattcactaagcatctcgatattgatgaagaatttgctactgttctagtcgaagaagggttctcaactctggaagaattggcctatgtaccaattaaggaacttctagaaattgaaggccttgatgaggaaactatcgaagtcctgcgtgaacgtgcgaaagctgctttaactactctggaactggctcagaaagaaagcctcagtgataaacaaccaactgaagagttgttaaatctgactggtatgaatcgtactctggcatttgacctagctgcccgtggcatctgtacgctggaagatcttgccgagcagggtatcgacgacctatctgatattgaaggtttgaatgatgagaaaacaggcgagctcatcatggctgcccgaaatatctgttggtttggcgatgatgcgtaa

SEQ ID NO: 9273 - DNA, 2730 bp, Photorhabdus luminescens
atgacagatgtaaccgtaaaatcactggcagaagagatacagacttcggttgatcgcttggtacagcaatttgctgatgcagggattaaaaaaaccgaaactgattttgtctcccagaaagaaaaagaagctttactggcgcatttgaaccgcgagcaaggtggttcagctggtaaacccgataaattgacattgcagcgtaagacacgtagtacgctgaatgtttcaggcaccgatggtaaaagcaaaccggtagccgttgaggtccgcaaaaagcgtacatatgtgaaccgtgatgcagttgaacaggctaaagcggaagagcaggcgaagcgtgaagcggaagagcaagcacggcgcgaagcagaagaaaaagcgcaacgcgaagccgaagcagcagcgaagaaactcgttgaagagcaggctaaacgtgaggcagaagaaaaggccaaacgtgaagcagctgaaaaagctaagcgccaggcagcggaaagtgaaaaagtgaccaatcaacataccgaacataaacagaaaccagcacagactgataaaacaattcaaagtgaaaaagcacgccgtgaagcagaagctgccgatcttaagcgtaaagcagaagaagagatgcgtcgtaaggtagaggaagaagctaaacgcgttgctgaggaagctcgtcgtatggctgaagagaatcaggataagtggtcaagtgattcagattccattgatagcgacgattatcatgtcactacctcccgtcatgcccgtgcagcagaagacgaaaatgatgctaaagttgaaggtgatcgtcgtgcccgcggtcgtagtggtaaggctactcgccagaagaaaaataataaacattctgaatctaaagcagatcgtgaagaagcccgtgcagttggtcgtacaaaaggcaagcaacgtaaaaccagtacattgcaacaaagtttcaataagcctgtagctgctgttaaccgtgatgttgtgataggtgaaactattactgttgctgaattggcgaataaaatggctgtcaaaggttctcaggtcatcaaagccatgatgaaaatgggtgcaatggcaaccattaatcaggtgatcgatcaggaaactgcacagctggttgctgaagaaatgggccataaagttatcctgcgtcgtgagaatgagctggaagaagcgctgatgagcgaccgcgatacaggtgaagctgttgctgaaccgcgtgcgccggttgtgaccatcatgggtcacgttgaccacggtaaaacttctctgctggattatattcgttctacgaaagttgcttctggtgaggcgggtggtattacccagcatatcggtgcttaccatgttgaaactgacagtggcatgattactttcttggataccccagggcatgcggcatttacttcaatgcgtgcacgcggtgcaaaagctaccgacatcgtagtcctggttgttgctgctgatgatggtgtgatgcctcagactatcgaagctattcagcatgcaaaagcagcgagtgtgcctgtagttgttgcggttaacaagatcgacaaaccagaagctgatccggatcgcgtgaagagtgagctttctcagcacggtgttcagcctgaagagtggggtggtgaaactcagtttatcaatgtatccgctaaagcgggtattggtattgatgaattgctggacgcaatcttacttcaagctgaagttcttgaactaaaagcagtccgttctggtatggcaagcggcgttgttatcgaatcattcttggataaaggccgtggcccggttgcgacagtgctggttcaggaaggtactttgaacaaaggtgatatagtactttgtggctttgaatatggacgagttcgtgcaatgcgtgacgagctaggtcgtgaagtgttctccgcggggccatctattccagtggaaatccttggcctatccaacgtacctgcggctggtgatgaagcaactgttgtacgtgatgagaagaaagctcgtgaagttgctctgtatcgtcagggtaaattccgtgaggtcaaactggctcgccagcagaaatctaaactggaaaacatgtttgctaacatggaagaaggtgaagtttctgaattgaatattgttctgaaatctgacgttcagggatcatgtgaagcgatccgcgaagcattggaacaattgtctactgatgaagtgaaagtgaaaatcatcggctctggcgtaggtggtattactgaaactgatgcaacactggctgctgcttctaatgcaattattctgggcttcaatgttcgcgccgatgcttctgcacgccgggttgttgaaaatgaaagtttggatctgcgttattactctgttatctatagcctgattgatgaggttaaacaggcaatgagtggtatgctggcacctgaatataaacagcagatcatgggactagcagaagttcgcgatgtgtttaaatcaccgaaatttggtgcgattgcgggttgtatggtgaccgaaggtactattaaacgtaataatccaattcgcgtgttgcgtgataacgtagtgatttatgaaggtgaattggaatcccttcgccgctttaaagatgacgttaacgaagtccgtaatggcatggaatgtggtatcggtgttaagaactacaacgatgttcgtgttggtgacatgatcgaagtatttgaaattattgaagttaaacgatctatcgcttaa

SEQ ID NO: 9274 - DNA, 411 bp, Photorhabdus luminescens
atggcaagagaattcagccgtactcagcgcgttgcacaggaaatgcaaaaagagattgccatcattttacagcgagaagtgaaagatccccgaattggtatggcaactgtttctggcgttgaagtttctcgtgatttggcttatgccaaagtattcgtcacctttctgaatgtgttgactgaagaacatgattctgatgtggtaaagaatggtattaaggcattgaatgaagcttctggttttattcgctctctgctaggtaaagcaatgcgtttgcgtgtcgtaccggaactgactttctcctacgataattccttggtagaggggatgaggatgtccaatctggttactaatgttgtaaagaatgatgaacagcgccgggcttctacggatcacaaagaggagaagtaa

SEQ ID NO: 9275 - DNA, 948 bp, Photorhabdus luminescens
atggggcgtcatcgtcgcggtcgtgatatacatggtgtgttgttactggataagccgcaggatatttcttctaatgatgcgttacaaaaagtaaaacgtattttcaacgctagcaaagctggtcacactggcgcgttggatccactggcaaccggtatgctaccggtttgccttggtgaagcgacgaagttttcccagttcttacttgattctgacaagcgttatcgagtgatagctcgtcttggtcagcgaactgacacatcagattcacacgggcaaatcatcagtgaaagggcaatccagctaagtcaggttcaacttgatgcagctttggataaattccgtggtgataccatgcaaattccttccatgtattctgcactgaaatatcagggaaaaccattgtatgagtatgctcgtcagggtattgaggtagaacgcgaagcacgaccaattacagtctatgaattacagtttatccgttgggaaaatgatgaactggaattggaaatacactgttcgaaaggcacttatattcgcactattattgatgacttaggtgaattattaggctgtggtgctcacgttatttatttaagacgtttacaggtagcgaattatccaaatgatcgcatggtgacacttgagcaattatatgaattacaaaagcaggccaaagatcaagaaatacctgtgggcgaattaattgattcattactattaccaatggatagtgcaattgctcatttcccagaggttaatttgattccagtagttgcggcttattttaaacaaggtcaggcggtgcgcagtgccaaatccccagctttagttgaaagtatggtacgtgtgactgaaggtgatgaacggaaattcattggcattgctgttatcaatgatgatgggcttgttgctccccgccgtttagttgtcgaaagccgggattag

SEQ ID NO: 9276 - DNA, 270 bp, Photorhabdus luminescens
atgtctctaagtactgaagcaaaagcgcaaattattgctgaatttggtcgtgatgtgaatgacagtggctctagtgaagtacagattgctttgctaactgcacagattaaccacttgcaaggccatttttcagagcacaaaaaagatcaccacagccgtcgtggtctgctgcgcatggtttctcagcgtcgtaaacttctggactatctgaagcgtaaaaatgtaacaagttacactgcgctgattgggcgtcttggcctgcgtcgctaa

SEQ ID NO: 9277 - DNA, 2130 bp, Photorhabdus luminescens
ttgcttaatccgattgttcgtaaatttcaatatggccaacataccgttgctatcgaaacaggtatgatggcacgccaggccacagctgctgtcatggtcaatatggatgacacggctgtatttgtcactgttgttggtcaaaagaaagtaaaagaaggtcaggatttctttcctctgactgttaactatcaggagcgtacttatgctgctggtcgtgttcctggcagtttctttcgtcgtgaaggtcgtccaggtgaaggagaaacgttagtcgctcgtttgattgatcgtcctctgcgtcctctgttcccggacggtttcctgaacgaggtgcagattgtagcaacagttgtttctgttaacccgcaagttaatccagatattgttgcaatgatcggtgcttctgctgtgctggcactatctggtatcccgttcaatggtccaattggtgctgctcgcgttggttatattaatgatcagtatgtgctgaacccaaccagtgatgagctaaaaaatagccgtttagatctggtggtttcaggtactgctggtgctgttctgatggttgagtctgaagcagacattctaactgaagagcaaatgttaggtgcggtagtattcggtcatgaacaacaacaggtggttattgataacattaatgcgttggctgcggaagcaggcaaagaaaaatggaattgggtgccagaatctgttaatcaagcgttgcatgaccgtgtagctggattggcagaagaccgtttgggtgatgcttatcgtatcactgaaaaacaggagcgttatgctcaggttgatgctatcaaagaggaagttacggcagcactgctggaacaggatgaagctttagaggaagctgaaatccatgaaattctgggtagcttagagaaaaaagttgttcgtagccgcgtcttgcgtggtgaaccacgtattgatggtcgtgaaaaagatatggtgcgtgcattggatgtacgtactggtgttctgcctcgaactcatggctctgcgctgtttacccgtggtgaaactcaggctttggttactgcgactttgggtacagaacgtgatgcacagatcattgacgagttgatgggagagcgcacagatcgtttcctactgcactacaacttcccgccatattctgttggtgaaacaggtatgatgggttcaccaaaacgtcgtgaaattggtcatggtcgtttggccaaacgtggtgtggcggcagttatgccaaaagctaacgaattcccatataccgttcgggtcgtttctgaaatcacggaatcaaacggctcgtcttcaatggcatctgtttgtggtgcatctcttgcgttgatggatgcaggtgtgccgattaaagctgctgttgctggtattgcaatgggattagtgaaagaagacgataattttgttgttctgtctgacatcttgggtgatgaagatcatttgggagacatggactttaaagtagcgggtagctgtgaaggtatcagcgcgctgcaaatggacatcaaaattgaaggcattacccgtgaaattatgcaaattgctctgaatcaggcaaaaggtgcgcgtttgcatatcctgagtgtaatggaacaggcaattaatagcccacgtaatgatatttctgaatttgcaccacgtattcacactattaagatcaatcctgataagatcaaagatgttatcggtaaaggtggttcagttatccgtgcactgacagaagaaaccggtaccaccattgaaattgaagatgatggcacagtgaaaattgctgcaactgatggtgaaaaagcaaaacatgccatcagtcgcattgaagaaataactgctgagatcgaagtagctcgcatttacactggtaaagtaacccgtatcgttgattttggcgcgtttgttgctatcggtggtggtaaagaaggtctggtacatatttctcagattgctgataagcgtgttgagaaagtggctgactatttgcaggttggtcaggaagtctcagttaaagttctggaaattgatcgccagggtcgtgttcgtctgagtattaaagaagcgacagtcggagtaattgtcgaggatacaccagtggcaccacaatcagcagaataa

SEQ ID NO: 9278 - DNA, 885 bp, Photorhabdus luminescens
atgaatctttttctgcgctggtgttatgctgtagcaatacttcttttggcaggatgcagcagcaaggattggcgtaaaaacgaagtttttgctattccgttacaaccttcattgcaacaagaagtcattctggctcgcatggaacagattcttgcgagtcggtcattgacagaagatgagtacgcgcagcttttatatgagagaggtgtgctgtatgatagtctcgggctgagggctttggcacggaatgatttttctgttgccttatctattcggcctaatattccagagatttttaattatctgggaatttacttcacacaggctagcaattttgatgctgcctatgaagcgtttgattctgtattagagcttgatccaacttacaattacgcgcgtcttaaccgtggcatcgcgttgtattacggtggtcggtataagttagcgcaggatgatctgcaggcgttttatcaagacgatccaaatgatcctttccgttcgttgtggttgtacctggtggaaaaagaattttatcctaaaggagcgatgttgaacttgtcgcaacactacgaaaaagcgaaccgggggcaatggggctggaatatagttgaattctatttaggcaaaattagtgaatatacattgatgaatcgcttgaaagagaatgcaacggataacacttcgctcgctgagcatctcagtgaaactgacttctatttaggtaaacattacctaagtctgggggacaaggatagcgcatctgcgttattcaagctgacggtagctaacaacgcacataactttgttgagcaccgctatgcattgttggaattggcgctgttaggccaggaacaagatgacctatcagaatcggaccagcaatag

SEQ ID NO: 9279 - DNA, 1935 bp, Photorhabdus luminescens
atgaggcaccattacatgaccactgagactgaaatctcttttgctgatctgggtttatcagcacctatcctttctgcgctggaagatcttggctatgaaaagccatctccaattcagcaacaatgtattccccatttattaaatggccgtgacgtactgggtatggcacagacggggagtggtaaaacagcggcattcagtctgcctttactacataatatcaatgctgagttgaaagctccgcagatccttgtgttggcaccgacccgtgaactggcggtacaggtagccgaagcgtgcgcagatttttctaaacatatgcgtaacgtgaatgttgttgcactgtatggtgggcaacgttatgacgttcagttacgcgctttacgtcaagggccacaaattgttgtgggtacaccagggcgtcttctggaccatctgaagcgtggtacgttggatctgtctaacctgagcggtttagttttggatgaagcagacgaaatgctgcgtatgggctttatcgaagatgttgaaaacatcatgagccagattcctgctgaacatcagactgcactgttctctgcaactatgccagaagctatccgtcgcattactcgtcgttttatgaacgatccgcaagaagtgcgtatccaagcgagtgtaacgactcgtcctgacatcagccagagctactggtctgtttacggtatgcgtaaaaatgaagctttggtgcgtttccttgaagctgaggattttgatgctgcgattatttttgtgcgtaccaaaaatgcaacgttggaagtagcagaagcactggagcgtaatggctacaacagtgcggcgctaaacggtgatatgaaccaggcactgcgtgagcagacattggaacgtctgaaagatggccgtttggatattttgattgcaactgatgttgcagcgcgtggcttggatgttgagcgcatcagtctggttgttaactatgacattccaatggatgcggaatcttatgttcaccgtattggccgtactggccgtgcaggtcgtgcaggtcgtgcattgttgtttgtagaaaaccgtgaacgtcgcttgttacgtaacgttgaacgtacaatgaagctgactatcccggaagttgaactgccaaatgctgaattattgagtcagcgtcgtctggaaagatttgccgctaatgtacagcagcaattggaaagtagcgatctagatcagtaccgtactctgttgtctaaactgcaacctgcggaagatctggatatagaaacgctggcggctgcattattgaaaatggcacagggtgagcgcccgttgattctgcctccggacccggttcgtcgtcctcgccgcgaattcaacgaacgtgatgatcgtcgtcgtaatggttttgatgatcgtggcgaacgtagtgatcgtcctcgtcgtgaacgccgtgatgttggtgaaatggagttgtaccgtattgaagtgggccgcgatgatggtgttgaagttcgtcatatcgttggtgcgattgctaatgaaggtgatatcagcagccgttatattggcaacatcaaattgtttgcaacgcattccacgattgaattgccaaaaggcatgccaggtgatttgttatcccactttacccgtacccgcattctgaataagccaatgaatatgcagttaatgggtgatgcacagccatttgagcgccgtgaacgtcgtggtggtgggcgtaacggcaatggtaacggtaatagtagtggtagtggccctcgccgtgatcgtgagaatttcaatggtggtggccgtcgcttcaatggtgaacgccgcggtggagaaggtcgtggtgaaggtcagagccgtagcaatttccgtggtcgtggtgatgatcatggttcatctgctccacgccgtcgttataacaatagtaacgcacagtaa

SEQ ID NO: 9280 - DNA, 1803 bp, Photorhabdus luminescens
atgcaacacgctctcacatttgtcattgcaacgttgtgtattctggttatctgctaccgcttgtacggcgtattctttgttaaaaaggtactgaaagcagatgacagcgaggttacaccttcccatttattggaagacggtaaagattatgtacccacgaaaaaatgggtcaattttggtagccacttcgccgcaatcgcagccgcaggaccgctggttggccctgtgttagcagcccaatacggttatttgccaagtatgttatggttattaatcggctgtgttatcggcggggccgtgcatgatacggttgttttattcgcctcaatgaaacatagcggtaagtccctgtcagaagttgccaaaacagaacttggcccaattgctggttggtgcaccggccttgcaatgctgttcatcattactattactatggcaggtctgtccatggtggttgttcacgcgctagagcgtaacccttgggggacatttgcagtatttatgaccattccagtcgcaatcggtgtcggtctatgggagcgcttcacaggtaatatgcgcggagcaacatgggtaggtattattaccattatggcttgtgtgattgtcggcccttacattcaagcatccgccttcggtgaatggctgagcctgcgtacatcaactgtcagcttggcactgccaatctatgcattttttgcaaccgctctgccagtatggatgctactgactccccgtggttatctttctagttttatgaaaatcggcgtattcggcgcgctagttgtgggagtcatctttattaacccggagatccagttcccggcagtcactgaatttattcatggcaatggccctgtactggctggtccggtgtggccttttatctccatcaccattgcgtgtggtgctatttctggttttcatgcatttatcggctctggcacaacaccaaaacagatcgataagtggagtgatattctgccagtgggtttcggtgcaatgctggcagaatgtgtcgttggtgtcatggcgttgatcgctgccacttccctatatcctgctgactatttcgctattaactcctccccagaggtctttgctacattgggtatggatgttatccatctaccaaaactgagtcaggaaattggtttggatctgtatggccgtaccggtggtgcagtcacattggcggttggtatggcagatatcttcacccgcatcccttggttcagccagctagcatcctactttttccagttcgtcgtcatgtttgaagccgtatttatcctgacagcagttgattccggtacgcgtgttgcccgctacctactgcaagatttcctgggcgatatatgggcacctctgaaacgtatcgactggttaccgggttccattggttgcagtatcgttgcctgtttactgtggggctacctactgaattccggcgatatcaattcagtctgggcactattcggggtatccaatcaactgatggcctccatcggcctgatgattggtgcaacaattatcctacgtctgtctgaaaaacgctggtatatgctgacctgcctgataccactcgcttacctgtacgttactgtgaactacgcagcttactggatggtgaagaatgtttacttcaactccgcaacaaaaggtttcaatatcttcaacggaacaatctccattgtgatggttatcctcggcattgtgattatggtctcttccattattcaatggctgaaactgtggcgtgtccgcagtacaagtaattcagttgaagtactaactaactga

SEQ ID NO: 9281 - DNA, 723 bp, Photorhabdus luminescens
gtgaatatgaatatattaattgttgatgacgaaccgctcgcacgagaaaacctacgttgtttgctagaagaagaacatgatattcaaattattggcgaatgcgccaatgccgttgaagccattggtgccatatatcatctaaaacccgatgttgtatttttggatatccaaatgccacgtatcactggattagaaatggttggtatgctcgatccagaacatcgtccctacattgtttttctgaccgcatttgatgaatatgcaatacaagcgtttgaagaacacgcatttgactatttattaaaaccactagaaaaaaatcgtctaaccaaaacgttacaacgattacggcaagggcatcaaaaacaagatatttctatcctgaaaacagaagaaccactgaaatatatcccatgcaccggccacagccgaatctggcttgtgcaactggatgaaatactttatgtcacctcccgtccaagtggagtttatgttatgtgtaccaatgggcaggaaggatttactgaactgacactccgtacactggaaacccgcacaccattgatgagaaatcatcgtcaatatttggtcaatatgacccatctgcgcgaaattctatttggtgatcacggacaggccgaactgatcctacgtaatggtgaaactattcctgtcagccgccgttatttgaaaccattgaaagaagcattaggattgaagtaa

SEQ ID NO: 9282 - DNA, 1032 bp, Photorhabdus luminescens
ctgcgaaaaggatttaatgaaaataacagtatgcgagtagcaaaagttatttatcaacaactggaaatcggcgcagttgctattacagacagagaaaaactcttggcatttattggtatcggttcagatcatcaccttcctggaacacctatttcttcggaacaatcccgtcgagcaattgaaaataatgaagtggtttatgctgatggcaatgaaataccttaccgttgttcaatcaacccaatctgcaaattgggttccaccttagttattccgctacagggagaaaatcagcaagttattggcgcaatcaaactttatgaagccaaaaaccgtctgttcagctcaatcaaccgccccctaggggaaggtattgccagcctgttatctgcccaaatcctcacaggacaatatgaacgtaacaaacaatcactgctccaatcagagattaagctgcttcatgcgcaagtgaatcctcactttttatttaatgccttaaataccctgcaagcagtgatccgacaggacagcgatcaagcaagtcaattagtacaatatctctcaacctttttccgtaaaaacttgaaacggtcagaagagattgtcacgctgtctgatgaaatagagcatgtgaatgcttacttacaaattgagaaggcgcgtttccgtgagcatctgcaaataaacattgaactaccggaatctctgcttcacaccaaattacccgctttttctctccaaccagtagtagaaaatgcgatcaaacacggcacatcacagttattagaaaccggtagggttactattcgtgctcatcagcagaatcaattgttaatactggaagtggaagataatgccggtctttataaatcggcctctatgggggatggattaggaatgagtctggtagataaacgactacgacttcgctatggtgaaaattatggtgtgcaaatagattgccagccagaaaaatttacccgcgtaattttacacttgccactcattaaagaggctaataaaactgtgtga

SEQ ID NO: 9283 - DNA, 447 bp, Photorhabdus luminescens; identical to SEQ ID NO: 6329

SEQ ID NO: 9284 - DNA, 396 bp, Photorhabdus luminescens; identical to SEQ ID NO: 6330

SEQ ID NO: 9285 - DNA, 648 bp, Photorhabdus luminescens
atgtacgaatttaatcttgtgttgttattactacaacagatgtgtgtttatttggttatcgcctggctactaagtaaaacaccactatttattccgctgttacaagtcactgtgcgtttacctcataagctgctgtgttatgtcgctttttccattttctgtattatgggaacctattttggtctgcatgtaggtgattccattgccaatactcgtgctattggagcggtccttggcggccttctaggtgggccaggtgtcggtgcgctggtgggattaaccggtggactgcaccgctactcccttggtgggatgaccgcttttagttgcatgatatcgaccattattgaaggtttaatcggtggcattatccacagctatctgacaaaacgtggtcagataaaccgactgattaatccctggacagccgctatcgtcacgttttgcgctgaaataatacagatgggcattttactactgctcgcccgtccatacagtgaagcattagcattggtcaaaaatattgcagcccctatgatcgtcaccaatagtatcggctcagcaatgtttatacgtatcctacttgatcggcgagcgatatttgaaaaatatactaggttatgtccctcaattaaattatggccttaa

SEQ ID NO: 9286 - DNA, 972 bp, Photorhabdus luminescens
atgaaaaaaagaacactttttacgattttactggtgattttgcttacagcaatggctgtgttatttcgttcccataaccaatatttgttgttgcaaggtgaagttgatgcaccggaagtgattgtggcatctaaagctaagggacgagtgatcaaacgtcatgttgaacggggagatgatgttaaggcaggacagttgctgattacactcgaaagcccggaattgctggcccaggttgcttcactagaagctgctcgtgatcaagccaaagcgcagttggagcaatctctgcatggaacacgcgaagaaagtattcggaatctggaagcgggtttggcacaagctcaggccgaatatgataatgcggtacgtgaatatgatcgtattcagagcgtagcgtctaaaggttatgtttcacgcaacgatctagataatgcccatagaagtagggatgttgcctatcagaaaatgcagagtgcaaaagcggcattggatgaaggtatgcatggtgacaggattgagcttcgccagaaatatgcagcagctttgcgtcaggctgaacagcaactgattgagttacaaactcagagtcatgatttgcaggtcaaagcacctgtcgcgggggaagttgggccgattccggcagaagttggtgagttatttaatgctaatagtcctttggtgacattaatccgtgtaccagaagcttattttatttataacctgcgggaagacattctggcaaaggtgcaaaaaggggataaagtcaaacttcgtcttcctgcgctaggtgacaaagagatcgaagccgaaattcgttatatctctccgatgggtaattatgcgactaaacgtgcaactcgtgccaccggtgatttcgatttaagaacctttgaagtgcgcttgtatcctttacaggctattgaaggtttacgtcctggtatgagtgccttgtggcgttgggatgagtag

SEQ ID NO: 9287 - DNA, 1146 bp, Photorhabdus luminescens
atgcggagcaaggttgcatggcgtggtttcgaacgcgcttttagccaagaaatccgggctgtgattcgtagtccggtttttcactggttaggctggttatttcctttgatgctatttgtgctgatcagcgctaatttttcagaagggacattactcaatctgccagtatcggtggttgataatgatcagagcccgctgtcacgtcatctaatacgtaacttggacgcggcttctcatgcgcagattaaatcttatgatggcggattgcaggaatctcttgaacggcttggcagtgctaaggattactccttactttatatcccgcatgattttgaagctaatgcactcaaaggagaccagccaaccgtgcgtatgtattacaacgcgttattttatggtgccggaagttattctattcaagatctcagtggattaatggcagagattaatgcgaagtaccgttctatattggcgacagaaatgggtcatcagttacctccattagccaatgttacgctcgtttatgacagcctttttaatgccagcggtagttatatctattatcagcagtttgcggccacaatccatttgttacagctttttgttgtaacctgcacgatttatagcatggcacgcagcaagacactgatgacaatgaaaccgtttactttcgctctgttgggaaaattggcaccttataccctgttttttactctgttgttgattgtcgaattggctgctctgattggtgtatttgatgcaaaagtgaatggtaacccaatatatatggtgatagtgggtttcttctacgtcattgccgctcaaagtattggcctgttgctgtttactttcactaatagtgcactgacggcttacagtttaatcggagtgctagtcagtattgcgacgactttttcaggtatgtcggtgccagaattatcaatgatattgccagcgcggataattgccaatattgagcctttaacacatgctttaaatgcgatgtttgatatttttttgcgtgaggtttctttactgggtattttatctgtttgtgctttattacttatttatccagtcgtttgctttctgttagtacgaaaccggttatttaaacggcttggcttgccacagggtaatgaataa

SEQ ID NO: 9288 - DNA, 1149 bp, Photorhabdus luminescens
atgcagatgtattggcaaacttttcgccgggtattaatgggaatgttggaaaagcccatgtggatgttgatgctggtttccttgtgtatgatgagtttggtatatgtccggccaacagtatgggatctaccggttgctgtgatcgaccaggatcacagctctgctagtcgagctttgatacgccagcttaattctacggctaaaattgctgtccatagctatgataatttggctgatgctcgtcacgatctactgctacgtgaaatctttgcgattattattatccctgcggacttggagaaaaatatccttaatggaaaaaatatcaccttgccgatttatggcgatgcaaccagtcgtcttgccaatggacaaattcagcaagagttgacctctgctcaccggcaattgctaaacgaatataacagcaaattattattaaaatatggttttagccctgagcagacagaattattactgatgccgattcgtagtgaaactattggattatttaaccctggtgtcagttttgccgcaattgtttttcccggtttgttggtgatgttattacaacactcgttattgatatcttgtgtacgggtcagtattacaatacgtggtacaccgaaaggtaaacccccattacctgtctatttgggagcgttgtcggcgttattaccgatttggctttttctctccatcatcttttttgtactttggccgtgggtattgggataccggcaggaggcgtctattccgttgttattaatgctgacgttcctatttatgttggcagtactcggattagggaaattggtaacggaatgtatgcgaagtgtagaaatgatctatttaacgatcgccttgcttaccacgcctgtgttctatatttccggcacagtctggccggtgcaggcaatgcctgattgggtgagagcaatttcttctgctttaccgtctacttggggcaccaaaagcgattgcccggtgttaaccagatgggattgcccgtacagattgtatttgggagatatcgctatgatgctggttcttggtgtgatttatactctgctaggaattttgataggtatggtgcgtaatggtgaattcaggaaaataacctattatttgcgtagggtgtttaagtga

SEQ ID NO: 9289 - DNA, 288 bp, Photorhabdus luminescens
atggctaaagtaactcctatctcacattcagaagtgagaaagcgacttcttaatacaccggaagctatacaagcctatgttgaggctacagaagaatatgagctgctggaacaactcactgagtggcgggaaaaggcgggtctaaagaaaatagatatagctaaacggatgggaattaatccgtctgcggttacccgtattgagaagaatgtaacgaaagctagttggcacacacttaaacgttatgctgctgcatgtggtgttgagttatctttaactgcgaagtaa

SEQ ID NO: 9290 - DNA, 543 bp, Photorhabdus luminescens
atgctcaatagtttttatcacggatggattttaatgatccccgtcatccttggtggttgtttacatatggtgattgtgacgaaaaactatttttcccgctgggctattccagtacatcaacgttattttggtcgcaacaagacctggcgcggttttattgttgtacccattattaccgcgctattttcactattatggttagttcccagcaccggaacacaggacacggttattccgcagacgatttcctcctgcttatttgccggttttctggcgggcttaggctatgtccttttcgaattaccaaactcttggctaaaaaggagactcggcgcaccaccggggcaacacccggaacaaaataagcgactgtttattttattcgatcaacttgattccgctattggcgtcacaatagcctattttatttatcttaatctgacttacatcgatgcatttttcgttttcctctgttttttaatcagcgccttcgttgttaaaaatatattgtttttattttcgctgaaaaaaacgagattttaa

SEQ ID NO: 9291 - DNA, 624 bp, Photorhabdus luminescens
atgaataataatcatttcatcattcatctaaacagagcagactatattactatcgttggggcggtatttagcgctcttgccgtggctgccgcgttacaacattggcattacttagcgattgcatttttgtatcttgccatgcttggcgacgcacttgatggtattctagccagaaatttaaatattgtccgcccgtttggccgctatcttgatggatttatggatcaacttatttacttgatctctccggccattatcctctacctttccggttatcaatcttggtattccctgtttatcattttaatgatcattagcggctgtctgcgattatccgtatttaatgaagttgggaatattcagaatgaaaaccagctctcctatcttggtatgcccgtattctggagcttatttattatcagtggttacgctttggtaagcttggtagccgagccgtggttaagccatctcttactgacattagcgctccttacattcagtatcgccatgctatgggaccgcccgttttataaattcaagagtctcaatactattatcagtacaacacttgcagggttcgtcttatttactggtcttcatttctggagtctttatgctcaatag

SEQ ID NO: 9292 - DNA, 1587 bp, Photorhabdus luminescens
atgacaaatatttgtcagccaattgtcgatgcagcccaaaaatatcctgagcatttagccctgcaagcgccacattcacgggatcatagtagcggtttaagctttcagacgtttttttctcatgcctcccatttccagcatcagttaactcaagctgggttcgtcgctggcgatcgcttgttagtgattatccaaccaggcttagtactttatccattgcttattgccattctggggctagggctagttcccgttatgcttgaacgcgggcttgccaaaaagcaactgagggagatactgcgccacagtcaattatcggcggtgatcactcaacctacgttaggaaaattctggtttctgctccctgaactctggcgactgcgacgttttgtcatcgggcaacgtatcttgggcatgaaagtactagaaacacccaatcaacatttaccattgagtagctttatctgccgggatttaccgccggatacaactgggttaattacctttacctcgggttctaccggcacccccaaaggcgcaaaccgcactcatgacagcttactagcacaactttatgccataacagcactttttgccgaggggaagaatgagatagatctacacagtttccccgttatggtgctgcactcattatgctgcggcaacagcagtattttgcctgattttgacttttcccatcccgcaaccgtcgatccacagcagatcgtcaagcaagtgcaaggcgaaggtattacatgcctcagcggcgctcccgcctatatgagcaaaatcaccgattatgctaagaacaaagggttgtcattccctaacgtgcgaacagtcatcgtaggtggtgcgcctgccaataaggctctgcttgaaaactgcctgacagtctttccacatgctcggcatttagtagtctatggttccaccgaggttgaaccgatcagtaccgttgaaatgacgactcaattaaaccactgggcaactcatgatggttatctagtcggaaaacccgttacacaagcagaaatatgtatccgggaaataacggctaacccccaacaaattactccactcgccaccggtaatgtcggtgaaatcttagttgccgggccccatgtgctcaaagactatattgataaccctcaagcaacgaaagaaaacaaactcccacgtaaacaaggaggtatttggcactgtaccggtgacgtcggctatctggacacgacaggacagctctggctacttgggcgggtaaaagacaaagtggtgttagatgatggtcgtatcatccatccctacgtactggaaaaaaggatcaatgaactgcctggggtcactcaaagcgcattcgtgttacatcctttaggcggagccgccctgatactggaaagcgctacactaccgacagatttacccgctattttagacgagctggatctcacgctggttactcgtatttattgtgctaatcctatccctgttgacattcgccacaacagcaaaataaaccgcattgcgctgatcaatatgcttaggaaaggccaattgtcctccgttccatacaaggaaaaattatga

SEQ ID NO: 9293 - DNA, 1056 bp, Photorhabdus luminescens
atgcctaatattttcatgggagaatggtctccggccaatccactacctgaaggttttcttgaccttccacccagtatttatcgcgattggccgctatggcctggtgaagaccgggaaaaagtacaacagcagtttagcccgaagaattcttggtttgatcacagtaaagcctggattggctgcattccagggaaagcccgtcttgtcggctttttagtacctcatagcgttgatggccaatctgccgcatttttcggcttttgggaaactgataatgacatagcaagcaacaccatgttgtttagcgctctagaacaatgggccaaggaaaatggtgcgtgcaatctctacgggccgattaatttttcaactttcggacactaccgcgttcgacttgatcattttgatgtgcctccctttgagcatgagccttataaccctccttactacccccttttgttaaaagagttaggatttgatatccgctatcgctatacctcaatattcgacgatacccaagcaacagaagacaactttcagcaggctcatcaacgtgcgcaaagacttcctgaggttcaagcgacattattgccgctaacgccagaattatggatgcaagaacaggttaaactctattcttttatcgactcggtgtttggtgagaatttcgcttatgccacgccatcttggcccgcatttcagcagcattgcggtgaggagtttatcaaacctttttgccattaccctgcgtcatttctggctaaaactcctagtggcgaaattgccgggataattttgagtctgtcagtcctgcaaaacggtcagcccaccattgggttgctgaaaaccgtggcagtcgcaccgcaataccggggcagccggctgtacaacatgctgtaccactcatttgaacagagtgccagacgtattcaccctcgtctaggaggggccatgatgcgtgaagataatacatcgctcaaaactgccaaacggcttttcaatacacctgctgccaccaagcatcaatatgcgctttattacaggaggatcgcatga

SEQ ID NO: 9294 - DNA, 2766 bp, Photorhabdus luminescens
ttgctgcattggtggaacaatatgaaatatctctacacgcaagataacgctattgaattggcggaacattccttaggtggaaaagcggctaatttattatggcttacgcaaaacggttttcctgtacctaattattgggtcatcagcagcgaggtgcttaataacctactcatcaacgatacgtttgcaagcaacatcatagagcagttggctaccgtaccacatgatattagccaggaaaaactcgatgctattgctgcgccattgcgtcagtggctacagtcgattccattgcctgctaaattagaagaagaattagctctcttgtcagagaatcacccagatgaatttttcgctgttcgctcatcagccattggtgaagatgccgccaatgcttctttcgccgggcagatggacagctacctatttcagcggggtaaatcagcgcttgccaatagcttacgtgccgtgatggcctcagcttttaacacgcgtgcattacaatatcgcctacacaaacggctaccgatgggcaatatcagtagtgctgtcatcattcagaacatggttgccggtgaagtttctggtgtcatgtttactgcacaccctgttacgggtagcaggcaacattgcctaatctcatccgcctggggcaccggagaaggtgtagtttccggcgaatgcgataccgatgaattttcagttcatctcacctcacctgagatcgaacgtcatatcacacaaaaagagacagcaactgttttcaatactaccaacggcagcggtacagtaaccatacccgtcgcgaaagaaaaacagtcggaaccgaccttactcgataataaaatctatgcactacgagatattggcaaagaaattgcggcagcacgggggtgtccacaagatatcgaatggacgattcaaaaccaccaaatctttattctacagacccggccaataacccgattgccacgtctggatgataaaagcgaacatcatattattttcgataattccaatattcaggaatcttattgtggaataacaacaccactgactttctcttttgcccgggcaggttatgccaccgtttatgaacagacaatacgtgctttaggttgctcagataaacaagttaatcagcatcgttccatgctggaaaatatgctcggcttagttaaaggtaggatctattacaacatcaacaattggtacaaaggactactattacttccctctttccaaaccaataaaaaagatatggaaagaatgatggggctggaagatccggttgattttattgaggataaaacactttcactgggcgataaaataaagaaattgccaaaaatggggtgggcactcctgcgcttgctatatgcctttaggactatggatcaacgggtagaactattcttagagcagtttaaatggcatgccgccgccataaaacaatcagagttgcatacttgcaacagtggccaactgatcgaaaaattaaaatatctggatgaacatctgctacgacgctggacgacgccgatcctgaacgacttttacgtgatgatgtttaatggccgggtacatcgagggctggttgctgccggtattgagaattcatctgcactattaggcgatctcctctccggagatgaagatattgaaagtacccaaccgaccaaagtgctgttaaagatgtgccaatatgcacgccagcaccctgagttgtgcaacctgttgaccctcggtgatgcgcgtaccctgctgacccaagtacgcccactcgatgaatcattccaccagcagtgcattgattatattaaaaaatatggcgatcgcacgatgggtgaattgaagctggaaaccatcacactaaaacaagatcccagttttttatttctgatactaaaaaactaccttgctatcgataccctcacaccagagacgttatccagccgggaaagaaagttgcgtactcaggccgaaaataccgcatttcagcaaatacagcagcgacttggctccaagcggatgaacacctttaaaaagaatttgcagaaattacgccaagcgatacgtcaccgggaaaatatgcgttttacccgaactcgtatgtttgggctgtatcgagatatcttcctacaacttggtcaggcatatgcattagaaggaatactcgctgaaccccgcgatattttttatctcacgttagaggagatctacagcggctacgaaggaacagcaatacagacccaacttgagcctttagttgctatgcgcaagcaagaatatgccaactacgaaacagaggatgaaccagctcatcactttttcattagaggctcactgtatcaacagcaagattacagctatccctatcaggaacaacaagccccaaccgatagcagcatgctacagggtataggttgctacccagggcaagttgaaacaactatccgattaattaaaaacccacaggatgaaatgtcactagcagggcaaatcctgtgtaccgtacgtaccgatcccggttgggcaccattattccctacagcaggcggattactcattgagcgcggttccacactttcacattccgccgttgttgctcgtgaactggggatccccgccattgtcggcattcccgccgtcacacaaattttaaaagatggcgatcgggtacgcatggatggagcaactgggactgttgtccgcttgcacgacaccactgtagaagagctgacatcaaggagtgaacatgcctaa

SEQ ID NO: 9295 - DNA, 2502 bp, Photorhabdus luminescens
atgttgcaaaaaaatctccaatcatatgtatgtgatgtttcagataataccactgcacacacagaaaactgtgcgcgaagttctattctagaattatcacacgatacatttagccttaaacaccaagaagcaacccaagtagaattactgccacgccgccacctctatacttatacagagaaagcccggcaaaaacgtctggattatttagcaaaacataccggacatacattgaaacatgtagcagatacccatctggatgcaacgcaattaacaaaaaccattgaagggtttatcggttcaatagaaatccctgtgggaattgctggccctatcttgataaaggggcaatatgctcaaggggtatattatgcgccacttgccaccacagaaggcgctttaattgcgtcaatatcccgtggctcctcagccattatgcaatcagggggtacaactgcgcgtgtacttggacaacgaatgatacgtgcccctcgttttgaattttgcagcgtttcgcacagcattatgttcagtgattggatcaacgaacatatcagcgaactacggtatgaaattggacgccattctaagcatgcacaattggtggaagtaaagccacaaatcatcgggcgcagcgtccatctgcaattcatctataatacagccgcagcggcaggtcaaaatatgaccaccatctgcacctggtatgcatgtcagtggatccaacaacagttagccaaaatggcgtttataccactgcgtcactttataatcgatggtaatacttcgggcgataaaaaagtctcttatcaatctttcatcgaaggacgtggaacacgtgtagtagctgaagtttatctagaagctgaatcctgtcagcaaatattacgggtcactccacagcaactcgtcacggcttatcaccatgtctgcgagggcgctatcgcctcagggatggtcggcataaatattaatgccgcgaatgttatcgccgggatgtttaccgccttagggcaggacatcgcctgtgtacatgaatcttccgtcgcgcatttacacatgacattgactgccgataaccgtgtctattgcagtatcacactgccctctctaattgtcggtaccattggtggcggaaccaatttaccacaccaacgtgaatgcctgaacatgttgggctgcactgatgaaaacggcaccgctcgtctggccgaaatcatcgctagttattgcctggctcttgatatttcaacactgtcagcggttgctgcggatgaatttgcgcaatcacatgaaaaacttggccgctatcgccctgtcaccactaacaatatcactgcgcacaccccacaagagcttgatttgcccttcttccagcaagcaaattttaaccctgtgttacaaggggcccatttaacgacaatcaaacctaaattttcgggtgatgatgggtacagcatgctgacacatctaagttcaaattatgcggaacgtttaattggcttatttcctttttctatgacgacatccgcacagaacaatttatccgtgatgctgaaattgaagcctctggggagtgaggtcgtgaatatggtactggatatcgctaaacactgctcttctgagttgtttgccgttttccaggattttgaacatcagcttgaatttaaccaaagccatagccgtgagctggctattatgaatcagcaagatccacggttgatgcgctatattcccgttatctatggtgtgattgaaaacgaagcaactggaacttatgccctgattgaagaattgctccacgatatggtgttaatgaacaatattaacctggaaacaccttgggagcagcaccaccttgaagccgccatccggggagtagccgatattcactctatctggttgggacgggaagaagagctcacgtggaaattctcgcaactgcaaattccgaatgccgatacagtttcacagatgaatcccctgtggcaaaaactgggcaattttatccaccaaacgtttcctgagttgttcactgccgaacaacatgaagatttccagcactgggtggataatgccgccacttggtggaaagagatcgaacagatgcccaggacattgatccacggtgatttcaacccacgcaatattgccttccggcaacaggaaaccggcttgcatttatgtgcttgggattgggaattgtctactttgcatctcccccagcgcgacctggcagaacttctggcctttagcttagacccacaaagtgatgcagataaggtggcttattatattgaactacaccgggttgaacttgagcaaaaatcggggctctccctcgaccccataatttggcgtcgtggctatgaattagcgctgcatgatttatggatgagaagaattccgttttatatgatggcacataatgttgttggctacccatttatggagcgcacaatgaaaacgctccgctggcttatttcattaacacggaattaa

SEQ ID NO: 9296 - DNA, 891 bp, Photorhabdus luminescens
atggatgagcgtttcccgctacaaaatgcgccgcttttctttatcttttatatcattagctattccgtagctttttattcaataggggaaaagcccattttgtcatgggagatcctgctcggttgcctgatgtccttctcctattttttactattacggatattcgatgagcataaagattaccaactggattgtgaacatcatccacagcgaattttacagcgcggtattattacgctgaaaaatctacgggtacttggtatctgttgtatcgcattacaattaggtggaagtctatttctagatcggggaattggctcagttacttttgcctggctgttggtctttatctggacctgtcttatggggaaagaattctttatcggtgaatggctaaatcaacaccttacttggtatgccatttcccatatgctggtaatgccactcattatctggtggttaagcaatatcgccagtcctaacctcacactcaatttcccaatatgggttttgatgggattgtgctttttctctggattcagttttgaaattacacgcaagtgtaaaggcccagatgaagaacgtcttgaaataccgacctattcatctattttcggcagaaaaggagctgtcgctattatcgcggcattgctcactgtaatgctgatattacagatttggctaatccgtatcaccactgatggtatagcgttatgggcgttaattaccttggtcgtttgttatgcattgtgtctatggcaattaggcaaattcctccataaccctaccatccaaaatcgcaaacgcgatgaagctatcgtgggaatattcatggtgctaggttattcagtttgcactgctagcattttaataaagcttgggtttgcttag

SEQ ID NO: 9297 - DNA, 234 bp, Photorhabdus luminescens
ctgaaatatgatattaaagcccatgattctttaatccaaatggaaacaaaagcatctcataaacatacagttatagaaaaaaatgtaaacataagttgcatgctgaaattaaaatttacacatactgattatagccgattgcaaatttttggcttaatgtatggcatcagtccatatgtatttcttaaattattgagagagataatgcgaaaaagtacgcataggatttattaa

SEQ ID NO: 9298 - DNA, 243 bp, Photorhabdus luminescens
gtgttaggaaaaatccacaatcttactctgcactggtttattactgttcgtgatagtcatttagttatcaaccagtataagcaggaagaggttagtttcagcgacgaagccaattatctgattctaatggttattcgtacagaattagggttgtgtgttaaaaatttggtagatacgttagcaaaaaagttcatgcttgctgttctttgtgcgggtttggtcccaattggcttaagtgtataa

SEQ ID NO: 9299 - DNA, 504 bp, Photorhabdus luminescens
atgttgatcagagtagaaattccagtagatgcagcgggaatagatcaattattacggaaatcttttgataccccggcagaagcggaattggtccaacaattgcgggaagatggattattgacgttaggtgtggttgctacagatgacgaaggccaggtaatcggttatgtggcttttagtccggtggatattaatggtgaagatcaccaatgggttggtttggcaccgttagcggttgctgaagaatatcgtcggcaggggattggtgaaaagctggtgtatgaaggtttggatagcctgaatgaatttggctatggcgtcgtcgttgttttgggtgatccacactactattgccggtttggttttacgcttgccagtgagcatcagttgcattgccagtggtcaacgtgtgaatcttattttcaggtatatgaattagctgatagttccttggctgaccataaggggttggttacttactcctcacactttgaccgtttctaa

SEQ ID NO: 9300 - DNA, 315 bp, Photorhabdus luminescens
atggctgaaaatcaatgggttctttacttactgaaaacaaaatcaggcatgctttataccgggataacaacaaatattcaccgccgttttgcacaacatgaaaacgggaaaggagccaaatcactgagggggaaagggccgttacagctagttttcagtagttatgccggagaccgctccaatgcctcacaactggaatatcaagtaaaacaattaagtaaacagcaaaaagagaggctggttatttgccagcccgtctgtatagcagaatatttagcatcaattagaaacggtcaaagtgtgaggagtaagtaa

SEQ ID NO: 9301 - DNA, 252 bp, Photorhabdus luminescens
atgaaaaacgtaaaatatatcgctgttgctttagctttaagtgctatctcttttggtagtatagcggcaacagaagttcaaacttcttcttcccctaaaattggtgtagtttctgtaacgggggctgatactttggaaaccctaagtgccgaattatccaaaaaagctgacaaagcaggtgcatcttctttccgtattatctctgccagcggtaagaatcaattatcaggtgttgctgagatctataactaa

SEQ ID NO: 9302 - DNA, 432 bp, Photorhabdus luminescens
gtgaacgcgactgaaaactttcagattatccacagatacctcgcaagacagcatgtcctaacgctttgtacagcaaccggtgatgatgtttggtgcgcaaattgtttctatgttttcaatgccgatgaaatagccttttggtttatgactgaacttcatactcgccacggtgaaatgatgcaggtaaatccacaagttgcaggtaccattgccgggcagattcgtcatattgcacagataaaaggtattcagttcaaaggagaagtcattcgtcttgagggtgaaaaagataaagtggccagagcacgttattgccgccgttttcctgtgtcaattgctgttaaaacacctatttggcaactgaatctcaatgaaataaagatgactgataatacgcttggatttggtaaaaaaatctgctggcagcgataa

SEQ ID NO: 9303 - DNA, 465 bp, Photorhabdus luminescens
gtgaattaccaccaatactactctgttgatgtggtcaacggccccggaacccgctgcacactatttgtcgcggggtgcgaacatcaatgccccggttgttataacaaaagtacctggcgggtgaactccggccaaccatttacgcaggaaatggaagaccgtgtaatttttgatttacaggacaaacgtattaaacgacaagggctatctttatctggcggagatcccctacatccacacaacacatccgcaatcctgcaattggtaaaacgggttaaaacagagtgcccagacaaggacatttggctttggacaggttatcggctaaaggaacttagcgaaattcaacaggaaattgtcagctatattaatgtgctagtggatggcaagtttatacaagagctttatgagcccggtttactatggcgtggtagctacaaccagattatttatagattaagataa

SEQ ID NO: 9304 - DNA, 2139 bp, Photorhabdus luminescens
gtgaaaactgttgtgataaaacgggatggtcgccaggtaccatttgatgaaacacgtatcagagatgccgtaaaacgggccacttctgccgttggcatgacggatgatgagtattgtatccaagttgcatccgcagtaacgcaatcaatggctgactacaggcaagttgatgtacaagatattcagaacgcagtagaacatcaattgatagcaaacaagcatgatcaccttgtccaccgctatattcaatatcgtcacgatagggatactgtccgagaattacacagccgacttaatcaagaaatccgtggcttagttgaacagagtaacgtttccctactcaatgagaacgccaataaagacagcaaagtgattccaactcaacgggatctgctggccgggattgttgctaaaaattatgccaaacaatatattctgccgcgtaatgtggtattagcccacgaaaaaggcgaaatccactatcatgatctcgattattccccctttttcccaatgtttaattgtatgttgatcgatctgaaaggcatgctaactcatgggttcaaaatgggtaatgctgaaatagaaccaccaaaatccatttcaaccgcaacggcggtaacggctcaaattatcgctcaggttgccagccatatttatggcggtaccaccatcaatcgtatagatgaagcattggcccccttcgttaaagccagctatgaaaaacatttggcgattgccgaagagtgggatatcactgataaaaaatcttatgccgaagtacgaacagaaaaagagtgttatgacgcttttcaatcactggaatatgaagttaatacactgcataccgccaatgggcagactccttttgtcacttttggctttggtctgggtacatcaaaagaatcccgtctaatccaacaatctattctgcgtaaccgcattgctggtttgggtaagaaccacaaaacagcggtgttccccaaactggtatttgctatccgtgatggcctgaatcacaaactcggtgatcctaactatgatatcaagcaactggctctcaaatgtgccagtaagcgcatgtacccagatattcttaactatgatcaagtggttaaggtcacaggctcctttaaaaccccaatgggttgtcgcagtttcctcggtgtttatgaggaaaggggggaacaaattcatgaaggacgcaataacttaggggttatcagtttgaacctgcctcggatagctatcgaagccaaaggagatgaaaaacatttctggcaattactaaacaaacgtctggcactggcaaagcaagcactaatgacccgtattacccgcttggaaagtgtcaaagcacgagttgcacccatcctttatatggaaggtgcctgcggggttcgcttgaaagccgatgataatatcgctgaaatctttaagcatggccgggcctctatctccctaggctatattggtattcatgagaccattaatgcattgtatggcaatcaagttcatctatttgatgatcaacaattacgtgtaaaagcactctcaattgttgatcatctgcgaaaagccactgatcaatggaaaaaagagacaggttatggtttcagtttgtacagcacaccaagtgaaaatctatgtgaccgtttctgccgccttgacaccgctgagtttggcgtgattgaaggagtgacagacaaaggttattacaccaacagtttccatcttgacgttgaaaagaaggtcaatccttatgacaaattggattttgaagcgccttatccatcactaacaaatggtggctttatctgttacggcgaatatcctaatctgcaacataatctaaaagcactggaagatgtctgggattacagctactcacgtgtcccttattacggtaccaatacccccatcgacgaatgctatgaatgtggattcaccggtgaattctcctgtaccagtaaagggtttacctgcccacgctgtggcaatcatgaaccttccagagtatcagtcatccgccgcgtctgtggttatctgggaagccctgatgcccgcccattcaatgcaggtaaacaagaagaggtgaaacgcagagtaaagcatctgacaaatgggcaattaggctaa

SEQ ID NO: 9305 - DNA, 387 bp, Photorhabdus luminescens
atgtcatacgagattaataccaataaagccccagcggcaattggtccatatgttcagggggttgatctaggcaatatggtcatcacttccggccagatcccagtcaatccagaaacaggtgatgtcgcagaagatatcgccgctcaagctcgtcaatcactggaaaatgttaaagctatcgttgaaagagcaggtctcactgtaggtgacattgttaaaacaactgtcttcgttaaagacctgaatgacttcggtaccgttaacgcaacttatgaagcattcttcaaagaacacaatgcatctttcccagcccgttcttgtgttgaagtagcccgtctgccaaaagacgttaaaatcgaaatcgaagctatcgcgattcgtaaataa

SEQ ID NO: 9306 - DNA, 465 bp, Photorhabdus luminescens
atgacccaagatcataaactacaagtcgaagctattagatgcggtacggtgattgaccatatcccggctcaggtcggcttcaaactactctctctgtttaagctaactgaaaccgatcaacgcattaccatcggcctgaatttaccttccaatcgactaggtaaaaaagatctcatcaaaatcgaaaatacattcctgacagagcagcaagctaaccaacttgctatgtatgcaccgaatgctacggtgaactgtattgaaaactatgaagttgtgaagaaacttcccattaacttgcctaagtgtatcgataacgtattagtctgccctaacagcaactgcatcagccacaatgaacccgtagaaagcagttttcgagtcaaagtgacagtggaagatgtggtgctaacctgcaaatactgcgagaaagaatttgaccgcaatgtggtgattctcaacgattga

SEQ ID NO: 9307 - DNA, 180 bp, Photorhabdus luminescens
ctgtcaggaggagattgggaacaatttgtagtactgaatcaccggcgctttatctggataaacgaggtaccaccgcctaaaatggaagacgtgtcgattcttaacaatattctggaggatgaatacagaaagttgtcactaaaatgtattcatacaaaacactatgacccaagatcataa

SEQ ID NO: 9308 - DNA, 1521 bp, Photorhabdus luminescens
gtggtgggatatcaattacaccgttcccggcatgagcaccacacaatggatttagttataaaaaaccgaccggcgtaccacacaagttcaatgcggaacagcaacgggcctttatggaataagtgggtatatatgaataataaatacgaaacggttattgtcttaggggctggcccaataggtctattttctgcttttaaaatattagaaaataattttgcggaaaatgtattgatcttagataagcgatttatttctgcttacacctttaaaggctgggcggaaagatcaatggttgtacaatttcatcgaaagcttttttctctctcttatcttccaaaaatagtgaaaaagtgtccttatggagtacttaaagaagattatgaagataatcggaagaagtatagtgatttagatcacatgagtataaaaaacatacaatccactattctagaaaatatggaaaaattttataaaaatcgttttttcatggtaggattaaaagatatgtcctttgacaaggatattgtttcaatttctatttttacagagcactttgatgataatagtattttaaaaaatttaaacccggaattaattgtagatgcaactggataccattccatcttaatgaataaaacaataggcattcaattcgaaagtgagcatgaatacggttcagctctaaaaatgacctggccagaacatgaaatgtctcatgttgaaaataaaaaaactgaatttcatgactgtcatgaaaatacaatcttttttagcgaaggaaactcatctgtagctgaattctcatatccgtctgataaatttagtgaattttttgaagaatgtgggtattctataaatcacaggagtaccaaattaccatttctaaaatttgatacaacacctttttcaataaaattaccaccattcttagaaaaaataacatctcttaagaaagatcattttctatataaaagagcagttgacttattcaatatgattagaagaaataaactttctggtattaatggattagaattcattaatcacttgcaaggtttcaattggtcagaggcagacagtcttgctttagtcgttcgtaggataataaataaaagagtaactatagaaaacacatatgctaatcttgaagaaaactttttagatttaatgaaaattagagttatttttataccatctagagccgagagatggttatcaacaaataaagtaacaacaaaaattaatcttatcttttcgaatgataataattcattacataatcaaatttcttcagtaacagcttgcgctgtcggagatagtttagctagcacagactttagacatggtcttggtataaatcgaggatttcacactgcaactaggttatttcaagataaaacagatccagaattagtaaggcttgaattgatacaaaatagctattctatgctagatgttataaatgataattcaatatttagtagagctatttcgtgcagagattggcttatcctatag

SEQ ID NO: 9309 - DNA, 795 bp, Photorhabdus luminescens
atgtatatagatatattaattataatatctgcatttgctggaagtatactatctgggctttttggtgggggagcgggtttgatttttactcctacaatttatttatttttatcttatgctaacccaaattctagttatatcatgcaaactagcatcacaacgatgatagcttctctaatgatatctggtctagttgctattgttaaacatcacaaatacaaccatattgattggaatgttctaaaatggtctgctccactaattataattggttcaatactaggttgttttaccatgactgttgtttcaagccgatcggttatatatgtcttctctttagcaacactaattttggcgattaggtcaacacaaaaattaatttctaatacccaacaaaataatacaaatagagatcttggctggtcatttcgttatattggctgttttttactaggattaatatcaactttgtccggggcagcttcatttgttgttccttattatgagagcattggcttagatattaaaaaatcaatagggacaacaactgttgtagtctggttgtattctgtatttgtactaatatttatgatatcactcggcctaaataaaaataacttaccacctggaaatataggttttttaaattataattatctatggttattcataataccaacaataccaggagcattgttaggagcaaaattagccaatactcttccagaaagaaaactaagaattgcctttacagtactattgtattttattggatcaagtatgttattttcataa

SEQ ID NO: 9310 - DNA, 1383 bp, Photorhabdus luminescens; identical to SEQ ID NO: 7510

SEQ ID NO: 9311 - DNA, 312 bp, Photorhabdus luminescens
atgatgactatttggacattgaaacaaattgttgcactagcacaagcaaattcatcgccttacagagaactttacgctggtctaagtcctgaaagcgccactctgttggatctgccggtcctttctcatgaaagattaatggaaattgttcacaacaaagatgccatccgtttctttaataccgatacgagtgcaggcattatctatcaatcctctgccacaacctgtctttcctacacaaatattttaacccgcccccgcgttattgaacttttccctcatagattgatctcaataaaaaacacgacttga

SEQ ID NO: 9312 - DNA, 924 bp, Photorhabdus luminescens
atggctaatccgttatatcgcaaacatatcatctcaataaatgatctgagccgcgaagatctggaattggtgttgcagactgctgctacactgaaagccagaccacaacctgaattgctgaaacccaaggttatcgccagttgtttcttcgaagcctccacccgtactcgcctctcttttgaaacagcaatccaccgccttggcgcttcagttgtcggtttctcagacagcagtaacacctctctgggtaagaaaggtgaaacgctagccgatactatttccgttatcagccaatatgttgacgccatcgtgatacgtcatccacaggaaggtgctccacgtctggcttctgaattttccggtgacactccgattatcaatgccggtgatggtgctaaccaacatccgactcaaaccttgctggatctattcactattcaggaaactcagcaacggctggatagtctgaatatcgcgatggttggtgatctgaaatatggccgcacggtccattcgctatcacaagcactggcgaaatttaatggcaatcacttttattttatcgccccggaagcattggcaatgccaaaccatattcttcatatgctgaatgaaaaaggtgcgacctacagccaacacgctaatattgaagaagtattaccggagctagatattctttatatgacccgcgtacagaaagagcgccttgatccatccgaatatgccaacgtaaaagcacaatttgttctgcgtgcttccgatctgatcggagcgaaagagaacctcaaagttctgcatccattgccacgtattgatgaaatcactgccgatgtcgataaaacgccctatgcttattatttccaacaggcagagaatggtatttatgctcgtcaggctctactatctttagttttaaatgaatga

SEQ ID NO: 9313 - DNA, 1017 bp, Photorhabdus luminescens
atgaatccgttccatcagcgtcattttctaaggttacttgatttttcctcagcagaaattcatgccttgctaaagctagctgctgaattaaaatcgactaaaaaatctggtacagaaaaagccctgttaacaggcaaaaacatcgtgctgatttttgaaaaagattccacccgtacccgctgttcatttgaagtggcagcttacgatcaaggagcaaatatcacctatctcggtcccagtggcaaccagattggacataaagaatcgatcaaagataccgctcgtatacttggccgtatgtatgacggtattcaatatcgcggctatgcccaaacaatcgttgaatcgctggcaaaatatgcaggtgttccggtatggaatgggctaacagatgaatttcaccctactcagctactggcagatctactaactattcaggaacatcaaccagaaaaaccattgtcagaaatcaaattcgcctacttgggggatgcccgtaacaatatgggtaataccatgctagaagccgcggcactaacgggtatggatgttcggttgattgcccctgaaaaatactggcccaatgccgcactggtgactgaatgccagaaactggctgaaaaaacaggaggtaaaattactctgacggaaaatatcaccgaaggggttaaaaataccgattttctttataccgatgtctgggtttctatgggcgagccaaaagatgtttggcaacaacgagttcacctcttgaaaccttatcaagtcaatatggatgtggtgagtatgacaggcaatccacaagtcaaattcctgcactgcctgccagcatttcatgatgaagaaacggcattaggcaaacaactcgctgctgaatttaatatgtatggaggactggaagttaccaatgaagtttttgaatcagagcacagcattgtgtttgatcaaggagaaaatcgcctgcataccattaaagcggtaatggtcgcaacattagcaaatgatcttaaaatttaa

SEQ ID NO: 9314 - DNA, 408 bp, Photorhabdus luminescens
atggcaaatcagagagacttagaagaacaacgcgaagaaacgcggcttattattgaagaattactggaagatggtagtgatccagatgcactttatgccattgagcatcacttttctgctgaggattttagtctgttggaaaaggctgcggttgaagcctttaaactgggttatgaagtgactgatgcggaagaattggaagtcgaagatgggactattctgatgtgttgtgatgttatcagtgagtgtggattgaatgcagaactgattgatgcccaggttgaacagttggtgaatctagctgaaaaaattggcattaattatgacggttggggcacttacttcgaagatcctgatgagcaagatgaagatgatttgccggagcagggtgagagtagacttcattag

SEQ ID NO: 9315 - DNA, 2811 bp, Photorhabdus luminescens
atgattcgttacaattctgcaattaaccgaaataccccatctgtcagcgtacgagataatcgagggttaaatatacatacgctggaatatctgcggactcaagctgatgaaaccaatagcaacgaattgatcactcgctatcaatttaatactcacggacttcaagtaaaaagcacagacccacgtagatataaaaaccagagtggttcaaacttcactcgtatctttagtctcgctgggaatacactgcgtgaagaaagtatcgatgctggccgaacgattaccttgaacgatatcgaaggacgcccagtactgactatcaatgcaatcggcgctcgtcagacccatcactatgaaggtaataccttgcccggccgcttgctggctgtcaccgagttaatacaaaagaacgagaaaaccacggagcgccttatttggggcaacaatacagatgcagagaaaaaccagaatctcgccgggcaatgtatacgccattatgatcctgcggggctggtacaactggaaagtttgtccttaacaggatcggttttatcacagtctcgtcaattaatagccgacgatcaggaagctgattggcgcggtgatgatgaaaatagctggcgtacaaaactgaatggcaacatattcacgactcaacataaaactgatgccattggtgctctgctaactcaaatcgacgccaagggaaatatgcaacggctggcctatgatgtcgcgggccaactgaaaggtagctggttaacactaaaaggccaagccgaaaaagttattgtacagtctattacctggtcagcagccggacaaaaattacgagaagagcacggtaatggcgttattacggaatatacctatgaaccagagacccaacgattaattaacattacaacccgccgaactagagatagtacaaaaccactacaagatttacgttatgaatatgatcccgttggcaatgtgatcaatattcgtaatgatgcagaagcaacccgattctggcgtaatcagaaaatagtaccggaaaatgcatattcctatgattctctgtaccaactcatccaagcaaccggccgcgaaatggctaacattggtcagcaaggaagccagctccctcctttaattacccctcttcctaccgatgacaatacttatactaactatattcgtacttatacctacgacgatagcggcaacctgacacaaatccagcacagtgctccggcaagtaacaataactacaccacaaatatcaccatttcaaaccgtaataaccgcggtgtcctcagtaccctcaccaacgaccccaatctcgttgatacattctttgatgcaggtggtcatcaaaccagtctgttctcagggcaatccttaaactggacaccacggggagaactacaacaagtgaaccaaagtggtaataccgcgcgtgagtggtaccactatgacagtgacggcatgcggctactgaaaataaacgaacagcaaacatccaataccacgcagcagcaacgagtcacttatctgccagggttggaattacacaccacacaaagcggcaccaatatcaccgaagacttacaagttattactgtcaggcaagcaggaaaagcacaagtacgcgtactacactgggaaaaaggccaacccaccggcataaataacgatcaagtcagatatagctacgataatcttacacacagcagcgaattagaactggatatgcacggagaaatgatcagttgggaagagtattacccctatggtggcaccgcagtatgggcagcaagaaatcagattgaagctggttacaaaaccattcgttattcaggtaaagaacgtgatgcaacgggactgtactattacggctaccgctattatcaaccgtgggccggtagatggttaagcgctgacccggctggaaccgtagatggtctgaatttgtaccgtatggtaagaaataatccaatgaccggcatagatgaagatgggcgtatgtttaaaaccgtagcaacaggtgcattaggcattggcggtatggcatacgagctttacaaatataaaaatcaacaagttgaaaagcctcagatgccatctcctgtctctgaatcctacggtgatcaacaagtcagcaaaatcacccaaaaagcgagtgctttaaaagcaaactatgacccgatgaagcagatggcccataacataacggggcgtaaagaagccgcagaacatctcgcacagggtcaagtccctggcgctcaagcaataaaagaaggggcaagcttagtcgcggctgccggagaatttgctgcggctggcaatgtcggtgaactaaacaaaaccacgctaacaaaagccgccggcaccgacgcaattaataattttagtctcaccttggacggtataaaaaaggtatttaaggcaggcgcggctagtgctaccgtcagcccagaaaaattggaagagctgcaaaaagcaactgatgatttaaaagaggtcgcaacagatacgctaattaccggggcatcgctaggtgcgacagtcggagccacactggataccgccgccgcggtcgtgccacacccggtagccaaagtggcactcaaaggtctgtcattggcatggaaagttaccggcattgttcacaccgcagaagaattaagcgagctcgcagaaaaacataaggatctggtttctaatgagctaggacaagaattaaaaagggaggtcaccgaggcaaaccaaattaggcggggaaccattctcgcaaaagttagagaacacggtttgataaaatag

SEQ ID NO: 9316 - DNA, 774 bp, Photorhabdus luminescens
atgaaaatgttgcttaccgcattattagcgggtgtcattcaattcggcattgcatattctgcgcatgcagaatctggccttgataacattaaatcagcaggcgtattcaaaatcgctaccgaaggaacttacccgccatttacctatcacgatgtctcaggagctttaactggatttgatattgatattggccgcgaaatcgcacgacgtctgaatgttaaagccgagtttaccgaaggcaagtgggatgggcttattgccgggcttgatgccaaacgctatgacgcggtactcaatcaagtcgctatcacaccagaacgcaaaaagaaatatgacttttccggcccatatatcatatctaaagccgtacttatcacccggaaaaataatgacagtataaaaacgttcagcgacctgaaaggtaaaacctcaagccatagcttaaccagcaattatgcccagttagcaaaacatttcggtgcggaaatcgtccccaccgaaggatttaatcaggccatcgatttggttgctacaggcagagccgatgccactatcaacgataatctgtcctatctcgattttaggaaacacaaacccaatgcaccggtaaaagttgtcgcgtccgaacccaatggtgatctagtcggggtgctaattcgtaaaggcgagccagaattacaagccgctatcgataaggcactagccgatatcaaagccgatggcacctatttacgcatttccactcaatatttcggcaccgatgtttctaaataa

SEQ ID NO: 9317 - DNA, 765 bp, Photorhabdus luminescens
atgattcaactctccggcattgaaaaaagttttgacgggcaaaaggtcctgaaaaaaatcgaacttaccattgaggaaggcagcctgaccgcactaattggcccatccggaagtggcaaaagcacgctattacgctgcatcaacttattagaaattccccaagccgggaagctccaaatcgacaatgaaaacataaccttcaccggcaaagggcggattgctcacaaggatatacaacggatccgccaacaaaccggcatggtgtttcaaaactttcagcttttccctcacctcaccgtcattgaaaacatcatggaagggttaatctgggttcagaaatggtcacgtgaacaggctaaacagcgagcgcttgaactactggaaaaggttgacatgtcacacaaggccgatgtctttccagccacactctccggtggtcagcaacagcgcgtagcaattgccagagcactggcaccctcacccaaagtattattatgcgacgaaccaacttccgcacttgatccagagttatcgcaagaagttgttgccgtattaaagcagttggctaaagaaggaaccacgatgttaatggctacccatgatctgcgtttggcagctaatcttgcccacaacgtcatatttttagaatccggggaaatcgtcgaatcgggaacgtcgaaaacgattttcaccggtgcccttaaacaacgtactgtggaatttgtttcaaccttaaccaataccttaccggattgggaaatatag

SEQ ID NO: 9318 - DNA, 702 bp, Photorhabdus luminescens
atggaaccctcttggttcaatctagtactcgattctttttggcctatgctttatgcgggctttgcttttactattccactaactcttattacttttactctcggtatcatactgggttttattgttgcgctcatccggctttacgggccaaaaccacttattgctgtcgccaaattctacgtctggctgatccgtggcacaccgttgctggtacaactgtttcttattttttatgccttacctagcgtcggcattacgttaggtgcatttacctcggcagtgattggtttcacattaaatattggtgcctatacctctgagataattcgcgccactttattgtctgtaccaaaagggcagtgggaagcagcttattctatcggcatgagctggacacaatcattgcgtcggatcattctacctcaagccgcaagaatcgccattccaccactctcaaacacatttatttcactggtgaaagatacttcactggcttcagtcattaccgtaccggagcttttccttgctgcacaacgtattgcagcggtgacttatcaacctctcattctttatactgaggcggcaatactttatctgataatcagttcagtattgtcatcactacaaacccgtctggaaaagaagttttcgcaaaagagtgacatacaggaattaaaagatgattcaactctccggcattga

SEQ ID NO: 9319 - DNA, 774 bp, Photorhabdus luminescens
atgaaaacacttattaccctattattggcaaatactatccaattcggtctcgtatattcagctaatgcagaaccaacccttgataagattaaatccaccggcacactcagaatagcaacggaaggagcttatccaccatttacttatcgcgacgcctcgggtactttaactggcttcgatgtcgacattggccgtgaaattgcacaccgattgcatgtcaaaccaacatttattgaaggaaaatgggacggacttattgccgggctggatgccggacgttctgatgcagtaattaatcaaattgcaattacacctgagcgcaagaaaaaatatgacttctccatcccctatatcacatcgcaagcggtacttatcattaataaaaataataataacattagaaaattcagcgatttaaaaggcaaaacctcagcacatactctaaccaataattttgcccaaatagccagagataatggtgcagaaattatcggcactaatggatttagtcaagaaatcgagctggttagtaccggcagagccgatgccactattaatgatagcctatcttatctggactataagaaacataagccaaacgcaccagtaaaaattgttgcagcaacccccaatgcgggtcaaacagcagtgttgctccgcaagggcgagccagaactaaaagttgctattgatcaagcaataactgacatcaaaaccgatggcacttaccaacgtatctggactcactattttggcgataatcttcccgaataa

SEQ ID NO: 9320 - DNA, 2898 bp, Photorhabdus luminescens
atggaaaaaacacccgcaactcaaacgcaagccgagccatctctcgataaaacgtacaatcctaaagaaattgaacaacctctttataaccattgggagaaaagtggttacttcaagcctaacggcgatactagccgtgagagtttttgtattgttatcccaccaccaaacgtgaccggtagcctgcatatgggccatgcatttcagcaaaccattatggataccatgatccgttatcagcgaatgcagggtaaaaatactttgtggcagtccggtactgaccacgcaggtattgctactcaaatggtggttgagcgcaagatcgcagcagaagaaggcaaaacccgtcacgattatggccgtgaggcgtttatcgataagatctggcagtggaaagcagaatccggcggcacgattaccaatcagatgcgtcgtctgggtaactctgttgattgggagcgcgagcgtttcactatggatgaaggtctatccaatgccgtaaaagaagcctttgtccgtttgtatcaagaaaatctcatttatcgcggtaaacgtttggttaactgggacccgaaattgcacactgcaatttccgatctggaagttgagaaccgtgaagttaaaggttctatgtggcatctacgttatccattggccgatggtgtcacaaccgcagaagggaaagattacctgatcgttgcaactacccggcctgaaactatgctaggcgataccggcgtagcagttaacccggaagatccgcgctataaggatttaatcggcaaagaaattattctgccattaattaaccgccgcattcctattatcggtgatgaacatgcggatatggaaaaaggtactggttgcgtaaaaatcacaccagcccatgactttaatgactatgaagtcggtaagcgacatgccctaccgatgatcaatatcatgacttttgatggcaacatccgtcataaagcagaagttttcgatactcatggtgagatttctgacagttacagctctgatattccggctgaatatcaaggcatagagcgtttcgctgcccgtaaaactatcgtggcggagttcgaaagactgggcctgctggttgaaattaaagctcatgatctaaccgttccctatggcgatcgcggcggtgtagttattgaacctatgctgactgatcaatggtatgtccgtaccgcgcctctggcgaaagtggctatcgaagccgttgaaaatggcgatatccagtttgtacctaagcagtatgaaaatatgtattactcctggatgcgcgatattcaggattggtgtatctctcgccaattatggtggggccaccgtattccggcatggtatgacaccaacggtaatgtctatgttggtcgcagtgaagaagaagtccgtcgtgaaaataatctgggcacagatatctctttaaaccaagatgaagatgtactggatacctggttctcttccggtttatggactttctctacccttggttggcctgaacaaactgacgcgctgaaaactttccacccaaccgatgtgttagtgagtggctttgatatcatctttttctggattgcccgtatgatcatgatgaccatgcatttcatcaaagatgaaaatggcaaacctcaggttccatttaagactgtctacatgaccggtcttatccgggatgaagaaggtcagaagatgtccaaatccaaagggaatgttattgacccgctggacatggttgacggtatttctctggaagaactgctggaaaaacgcaccggcaatatgatgcagccccagttggctgaaaaaatccgcaaacgtaccgagaagcaattcccggcaggtattgaaacgcatggtaccgatgccctgcgctttacgttagccgcgctggcctcaacaggtcgtgatatcaactgggatatgaaacgcctgcaaggttaccgtaatttctgcaacaaattatggaacgccagccgctttgttctgatgaatacagaaggtcaggattgcggccaacatggtggcgaaatggcgctatcgttggctgatcgttggattctggctgaatttaaccagacagtaaaagcctaccgtgaagccctggacacatatcgttttgatatggcggccaatattctttatgagttcacttggaaccagttctgtgactggtatctggagctctctaaaccggcgattaacaaaggttcagaggcggaagttcgtggtgcccgtcatacgctaattgaagttctggaaggattattgcgcctggctcacccgattattccatttatcaccgaaaccatctggcagagagtgaaaatagtgaagggaattgaggcagataccattatgctgcaaccgttcccagaatttgctcaagaaaaaactgatgaactggcactgaccgatctggaatggattaaggaagcgattattgcagtacgtaatatccgtgctgaaatgaatatcgcaccgggtaagccactggaagttctgctgcgtaatgctgatgctggtgcccaacgccgtgtagcagaaaacctgaattttattcaggcaatgggccgcttatcttctgtgactcttctgtctacggacgaagaagcaccgatttctgtcactaaattgattaatggcgcagaagtattaatcccaatggctggcttagtcgataaagaagctgaactaagccgcttaaataaagagattgagaagctggataaagagattggtgccattgaaggtaagctatcaaatgaaggcttcgttagccgtgcacccgaagctgttgtaaccaaagagcgtgaacgtctggcaaactgcaatacatccaaagaaaagctgctggctcagaaagaaaccattgccgcgctgtaa

SEQ ID NO: 9321 - DNA, 450 bp, Photorhabdus luminescens
atgaaaagtgccacgttttatttactggaacagccatcacctcaagcagatttgcaagctcacgaatggctggcatgccagtttgcggctgaccaatggcgagcagggaaacgggtgctaatcgcctgtgaaaaccagcagcaggcagaaaagttagatgaagccttatggcaacgggaacctcatcagttcgttccacataatcttgcgggtgaagggccaaggtatggcgcaccggttgagttatgttggccacaaaaacggggaaatgctccccgtgatatcctaataaatctgttgccgcaatttgcagactttgccaccgctttccatgaagtgatagacttcgttcctatagatgaaaatttgaaacagttggcgcgtgaacgatataaatcctatcgcagcgtcggctttaatttgaccatggcaacgccgccaacatactaa

SEQ ID NO: 9322 - DNA, 1521 bp, Photorhabdus luminescens
atggagtttagtgtaaaaagcggtagcccggaaaaacaacgtagtgcatgtatcattgtcggcgttttcgaacctcgtcgcctttcctctatcgctgaacaacttgataaaataagtgacggttacatcagtgcattactgcgccgcggtgaactagaaggcaaagttggtcaatcactgttgctgcatcatgttcccaatgtgctatctgaacgtatcctgcttatcggctgtggtaaagagcgcgaattggatgaacgccagtataaacagattattcagaaaactatcaataccctcaatgaaacaggttcaatggaagctgtttgcttcttaacagaattgcatgttaaaggccgcaataattattggaaagtgcgccaagcggtagaaacagcaaaagaatctctctatgctttcaaccagctaaaaagtaataaaaatgagttgcgccgcccactgcgtaaaatggttttcaatgttccgacccgtcgggagctaaccagcggtgaacgtgcaatccaacatggccttgctattgctgccggtatcaaagcggccaaagatcttagtaatatgccacccaatatctgtaatgccgcttatctggcttctcaggcacgccagctcgcagattctgccaatagccatattacaacaaaagtgattggtgaagagcagatgaaagagctaggcatgaatgcctacctggctgttggtcaaggttctcagaatgaatctctgatgtcagtcatggaatataaaggcagttcagataaacatgccaaacctatcatcttggttggcaaggggctgacttttgactccggcggtatttcaatcaaatctgcgggtggcatggatgagatgaaatacgatatgtgtggggctgcaacggtttatggcgtgatgcgtgtggtttctgagctacaattaccgctcaatgtcatcggtgtcatggcaggctgtgagaatatgccaggagggcgcgcttaccgtcccggggatattttaaccaccctatctggtcagactgtcgaagtactcaataccgatgccgaaggtcgtctggttctgtgcgatgcgttaacttacgttgaacgttttgatccagaattggtcattgatatcgccacactgaccggtgcgtgtataacagctcttggtaatcattacagtgggttgttatccaaccataatccactggcccatgagttactcaatgcttcggaacaatccggtgatcgcgcatggcgtctgccaatgactgatgagtttttcgagcaaatcgattctaactttgccgatctggcgaataccggcggcagtggcggtggtgcaattaccgcagcctgcttcctgtcccgtttcgcaacaaagtatcactgggcgcatctggatatcgcgggtacggcctggcgttcaggtaaaacaaaaggcgcaacaggccgcccggttgcgctactgtcacaattcctgttaaatcgggcaggaagtgccggtatcaataacgacgattga

SEQ ID NO: 9323 - DNA, 1101 bp, Photorhabdus luminescens
gtgatcatcattagatatctggtacgggaaaccctgaaaagccaagttgcgatactctttatccttttactgatctttttctgtcagagattagtcgaaattttgggtgccgcagtggaaggaaacgtcccggcaaatttagttttatccttgttaggattaggtgtgcctgaaatggcgcagttgattttgcccctgagtctgtttcttggggtattgatgactttcagtaaactctatactgaaagtgaaattactgttatgcatgcgtgtggtttgggcaagcgtgtgctggtggtttcggcgcttattctggcgttgttaacttccgcgctagcggcagtgaatgtcatttgggtcatgccgtggtcctcgaaatatcaagaacaggtggtggctgatgctaaagctaacccaagcttggcagcgatcatggaagggaggtttaaaccttccgaggatggtaatctggtgctctatattggcaacgtgcacggcaataagtttgaaaacgtattccttgctcaacttcgccccgttgataaccagcgtccttccgtggtgatctctaatggcggtcatatggtggagcgacctgacggcaaacaggtggtcgtccttaatcatggtacgcgttatgaaggcactgcaatgctgcgtgattttaggatcactgagttccgtgattatcaagcgattattgggcatcagacttcaatcgtagataataataaagttgaacagaaatctattatccagttatggcaggataatgataaggactcccgtgctgagttccattggcgtttgactttggtgctctcggtactgattatggctatgatggttgtaccgttaagtgtggtgaacccacgtcaagggcgggtattaagcatgttgcccgcaatgttgctttatctgattttcttcttattgcaaagctccctgcgttctaacggtagtaaaggcaaattggacccgatgatttggatgtggctgactaatgggacttatctgatgttggcgctggttctcaatatttgggatacgttgccggtgcgtaggatccgggctcgtttcaacggcagaggagtagcctga

SEQ ID NO: 9324 - DNA, 1080 bp, Photorhabdus luminescens
atgtttggtgtattggatcgttatatcgggcggactattctacagactattctgatgacgctgtttatgctggtatcactctccggtattattaagtttgtcgagcagttaagaaaagtggggcagggggaatatactactatttctgctggtctttatgttttgttaagtgtgccgaaagatattcagatattcttcccgatggcagctttgcttggtgccttactggggcttggtacgctggcaacccgtagtgaattggtggttatgcaagcttctggatttacccgtatgcagattgctggctcagtgatgaaaacggctattccgttggtgatcctgactatggttatcggagagtgggtcgcgccacaaggtgaacagatggcgcgtaattaccgggctcagaagatgcttggtggttctctggtttcaacaaataaaggtatgtggacgatagatggggacgattttatctacatccagcggattgtgagtgataccgagattaaaggcgtcaatatctatcattttaatgatgataaaaaactactctctgtaaaatatgcagccagtgcggtttatgataaggataacgacctatggaagctttctcaggtggaagaatctgatctgacagacagcaaaaaaatcaccggatcacaacgtatttctgctgactggaaaattctcctgacgccagaacagttgaatgtagtcgcacttgagcctgaagcgctttccatcagtggcttatatcagtacatcaaataccttaagcagagtgaacaggaatcaggccgttatcaactgaatatgtggaaaaaaatatttgcgccgctttcagttgcagtgatgatgttgatggcactctcttttatcttcggaccactgcgcagtgtgccgatgggagtgaggatagtaacagggattagctttggcttcctattttatgtacttaatgagatctttggtccactgagcttggtgtacagcgtgccagcggttttggcggcactattaccaagcctattgttccttactgtgagtatttatttactccttaagagaagacagtag

SEQ ID NO: 9325 - DNA, 1263 bp, Photorhabdus luminescens
ctgtttgtgaattcactggaaatatgcctgattggtcaattcaaaatgaataaacagttttttaagatcttctccatttctgccatgatgttggctctcgcagcctgctcttcttcaaacaaaatatattcggcaaagtttctgcaaccgaagaaacaaccattgaaatgggaagtgttcgaaggaaatgcgagaactaaaaagctagcttcacagttggttgatcagtatgcacaggatattttcaacagcagtaatgcacaaggcatggcgatggtggtgattgataataatcagacggtttaccgcagtttcggtgaaacccgtccgggaaacggcatccgtccaaagcccgattcaatcatccgtattgcctcgctaactaagttgatgaccagtgagattatgatcaagctcgaagaggatgaggttctgcgttccaccgatccgttgcaagactatagttattatggcgtgaaagtgccccaatacagccctcttcaacccatccggttattccacttggcaagccataccagtggcttacctcgtgagcagccgggaggtagatgggggcgtcctgtttttgtttggcctacacaagccaatcgctggacctggttaaaaacagctcaattagactccgcaccaggcactacagcatcttattccaatctggcttacgatttattggcagatgcgctctctaaggctacgggtaagccatatacccgtttgttatacgataagatcaccggcccttattgcatgaaagacacgacactgacaccaaaccgttctcagtgtgctcgtttgatggaaagttataagccaagtccgtgtcttaacactgttgctgcggcaggcagtggtggaatctattcaacgccaaaagatatgcagcactggatgcagcaatttttatcatcagacagtcagttacgtaaacaaaccgcgagtcgcgaacaaggtatttattttaagcgttccgctctggcttcaattaaagggatggatgttgccggtcaggcagatggcgttggccttggttgggtttacatgaacgcccgcggcgatgtaccgggtatttatcagaaaaccggcggtggtggagggttcaatacgtatatggcaatgatccccgaacaaaatatcggggtgtttgtggtgatcactcgtaaacaacacagcctgttcagtagcgtaacaacgggggttaatcaactagtaactgcattgtcgaaaaatcaccatcaagcttga

SEQ ID NO: 9326 - DNA, 96 bp, Photorhabdus luminescens
atggtgccgaaggccggactcgaaccggcacacccgaaggcggttgattttgaatcaactgcgtctaccgatttcgccacttcggcactgaagtag

SEQ ID NO: 9327 - DNA, 1257 bp, Photorhabdus luminescens
atggccctgacagacgttgtagcccgcaccgctaagcctcgcgagcaagcttacaaactcgcagatgcacatggcctgtacctgatgataagccctggcggctctaagcgctggtatctcaagtatcgtttcgaaggtaaggaaagccggattgcttttggcgcttatccgctgatctcactggcgaaagccagagaaaagcgcgatgaggtacggttgttgctagccgatggtatcaacccggcggaaaaacggggggagggaaaaaaagaggctcaggacgcgctgataacctttgagaaagtggcaagagactggcatcgaaatatcagccaaaaccgctggtcagaaacccatgccggacgggtatggcgcgatatggaacgcaatattttgccagcgataggtcatcgccacatagcggatctgaagactaaagacttgcttgagccgctgaaagccgtggagcaaaacggccatctcgatttagcgtcacgactacgccagcgagtgaccgatattatgcgctatgcggtgcagaatgatttgatagagcgtaatcctgctcaggatctctccggggcgatagcgccgccgaaggcaacccatcgcccggcgttgaaactggataagctaccggattttctggcaaggattgaaaactataaagggcggacattaaccaccctggccttaaagttcacactgtgcgtctttatccgttccagtgaactacgctttgcccgctggaccgagatcgattttaaacgtgctatgtggactataccggctgaacgtgaagcgataccgggtgtaaaacactctcagcgtggggcaaaaatgcgcactgagcatttagtaccgttatcccgccaggctttggcgttgctgaaagaaattcaggctatcagcggcggtcacgaactgatattcccgggcgatcgtcgcccgactaaaccgatgagtgaaaacaccgtcaataatgcattgcgggtcatgggatatgacaccactactgaactatgcgggcatggtttccgcacgatggcctgtagcgcactggttgagtcagggcagtggtcacgagatgcggtcgagcggcagatgagtcaccaggaacgcgatagcgtgcgggcggcttatattcataaggctgagcatattgaagaacgaaggctaatgctgcaatggtgggcggattatctggatgcgaatcgggaagggtatgtggtgccgtatgagtttatgggggcatga

SEQ ID NO: 9328 - DNA, 948 bp, Photorhabdus luminescens
atgctattcaagaagataaagacgtattttctttatataattctatcaatgtttttaattactaatacttttcttgttaggcacgaattcatttttaagaaaacatttattgtattgtttctttttttgacgatagttatttgtttctatcaaaaggatgcattcaaaaaaataatatattattttatttactttaataatgacaagatcgtcaaaaagatttcaggaggactatcattactagcctggttgttctttgtatcatctttgttcttactaaatattggcttggtgtggcttgcgagatggtttattcttgtatttattatatttgttgttatcagcggagtatttaccttctatgacctggagcgtgaaaataatattatctttagcaagctgaaaattgtatttgtcagtagcgtatccttattatatttcattacaagtacatatgcagctagttattttatgcaaatgagtaatatggatataagtgattccccgttgcttgagtttgggtggaaacttgctttttttgctatttatttctttatgctcttacaaccagtttcatacggtatttttctattagtatcaaataaattaaaagggcatcagttgatgactttttttggcatcataatgttaacatcattactgctgtttgctttacctcgctgggcggagaattttatagtagttgtgcttgattgggctactagcagtgaatggcatacttccgcaacgtgcggttccttgaatattagtgattcaacagatcactattttggatttaatacaaataaatacacagtctatttttctaatcgtgatggaaaatggggatttgaggaaatcaactgtattaaagatgataaaaaccaagattcattaaaacgtgttcctgtaactgaatcaagtatgcctaaatggtttaaagaataa

SEQ ID NO: 9329 - DNA, 264 bp, Photorhabdus luminescens
atgctacctcatcgcttaaaagccgcacgtttaaaggctggcctgtcgcaggaacggttagggattcttgccgggatagatgaagcgacggccagtgcccgtatgaatcaatatgagcgcgggatacacacgccagactttgagctggcctgtcggttggcatcggtgctacacgttccagcttgctatttttatgccgtggaagacgatctggcggaaatgattcttggatattcagactcgcaggaaaaatcaaccctataa

SEQ ID NO: 9330 - DNA, 288 bp, Photorhabdus luminescens
atgacatcacatcatgactggcatcaggcagatatcatcgccgccttacgtaagaaaggtacaacactggccgcgctatcgcgttctgcgggacttagttcttcaacactcgccaatgtgctttctcgtccgtggccaaaaggggaatggattgtggccacggcgctggacgttcatcctgcgaagatctggcccagccgttattttgatagttctggtacgctactggacagaaaaatgcgcataaggaaaaaattgaatgaagaaggtaaacagtctgctatttga

SEQ ID NO: 9331 - DNA, 174 bp, Photorhabdus luminescens
ctgctaaatattccactccaaaacttccctcgcctcgaacgcgctacggtagaacagagaaagcgcttcacccttaatgcaggcgggggaatccattgggaggaaattgatgaggatatcaatattgaggcgctttatgcgggggcaatcagggatatgactaatcgtaaatga

SEQ ID NO: 9332 - DNA, 261 bp, Photorhabdus luminescens
atgctacctcatcgtttaaaagctgcacgcttgaaggctggtttgtcacaggaacggctagggattcttgcagggatagatgaggcgacagccagcacccgtatgaatcagtatgagcgcggtatacatacacctgattttgcactggcctgccggttagcgtcggtcatggggattcctgcctgctatttttatgtggtggaggacgatctggcggagataatactggaatatgcgaatactcgtcagtccgggatctaa

SEQ ID NO: 9333 - DNA, 1143 bp, Photorhabdus luminescens
atgactggattgctgggcgtatcagcaaacgcgagggaatacagcaagcggggaagcgaaacgatgagtaaatccgtaaccgataccgaagcagaatttaaaacctcgcttcctctgcgcaaaggttctgatggctttgacacccaacaggactatctgattaagggatatttgccagcctcatccgttgccaacgcttacggtgccagcggatcttacaaatccttcctggcggtatcatggggatgccatatcgccactggcaaaccgtgggcagggaaaccggtcacacaaggagcggtcatctatgtcgtcggtgaaggtgggatcggcgttcctcgccgtatccgggcatgggaacagacacttaacggcggcagcccgattgatgcgctttatcgcatcgattgcccggtctttcctgccagcccggagagtgtacaacaggtgatacaggccgccaaagatgttaaggccgcaaccagtatgccgatccgcctgatcattctggataccctcgcccgctgcttcggtggctcagacgagaacgccgctaaagacatgggtgcatttattcagggatgcgactatatcaaagcggccacacaggctacggtgctgatcattcaccattccggcaaagatcaggataaaggcgcgcgcggctccagcgcattccgggccgcactggacgtggagtttaacgtgcgccgtgaaggtgatggtggtgcattgatactcagttgcaccaagatgaaagatgccgaagagccgccacgtcgcgcttatgacctgcattccgtcgatttatacgtggatgatgatggcgatcggatcacctcgctggtgctgaacgatgaaggccgtgaagccagggaaaatgatgttaccagcgaccctgatttgatcggcatttcgcggctgacggaaaatcattttgccctatggcaggccattcgttcgcgcacggccagcggcgatagctgcacccgcgcattagtcagggacgatatgaaagcgatgggatttgatgtatccaaaaagtttacccgctggctggataaactggaaaaggatggtctgattgctttagatggggaacgcattacgccgttgtcgcaaagagataaaacgagggattaa

SEQ ID NO: 9334 - DNA, 867 bp, Photorhabdus luminescens
atgagtaaattaagccgtgaaatgaagatgctggcgaaacaagtcggcggcagctttaaaactgttcatgatcgcacccgcattattgaccgattttgtcggcacctgattgcactcaatatccaggtccgggatgttcagcatctgaaagctaaacatatcgaaagctatattgccgatcgccaggcaacaggtatctctgctcgtactctgcataacgacatgtcggtgtttcggttggccggcagggaaaagctcgttacatcaatacgtttagcgaataaaacgttgggattaagcggagcaagtcgtgcaggcacgaaattcgcgatcccggatgagcgatttcaggccgtattgcgcagcgcacagcagcatgaccggggactgacttgcgcccttcaacttgcccggttgctgggattacgttcacaggaagcagtgcaatgcgccagttcgctgaaaacatgggaaaaacagcttgaacgcaatcaatcaacgctcaccattgtttttggcactaaaggcggcaggccacgtgaaacgcggatcatcgaccgtcatgctgttcagcaggcggtaaaagaggctctgctggttactaaaacacataatggcaagctaatcgacaagccagatttaaaaactgccatgaacttctggcgttctcataccacacggttagggctaaccggccattattccccgcacagcctgcgctacgcatgggcgcaggatgccattcgttattacctgtcacaaggattctcccgcagtgaagccagggcgctgacgtcaatggatctcggtcacggcgatggtcggggccgttacgttgagcgtgtttacaccaggaaggaggactga

SEQ ID NO: 9335 - DNA, 129 bp, Photorhabdus luminescens
gtgatgatactgctgtcatcgcaggcaaaagctgtagccttgcttgcagcaactcattcactgaggagaagaccgaatacagcattctttacaaataatgccgatcggcgaggaaacgctcgttattag

SEQ ID NO: 9336 - DNA, 312 bp, Photorhabdus luminescens
atgccgatcggcgaggaaacgctcgttattagccgtctcttaagtttaaggaacctttatcgtcacgtcataggtgcgtttttgttgacgatacctgctttcaaaggtgggcaggtttaccgcatccagcgttgtctttcaggttacgacaactttctttgtggtcgcccgaaggcgtcagtctcagaccacactccattccatatgactttggctcgtgaccacccgaaggcgtttctcacaggtcactcgtatcatcctgatactggaaacattggctggctgtcgttgacagcgggtatgcgtggttaa

SEQ ID NO: 9337 - DNA, 360 bp, Photorhabdus luminescens
atgcgcgtatttaaaactaaatggttcagcaaggcggctaaatcgcacgcaattaaagatagtgagttatgccaggctattgaggcggcgatgcaaggtaaggctgacgacctcggcgggggagtttacaagaagcggctgaaccagaatcgcgatcgcgccattatcctggcgaaaggtggggaacactggttttacacgttcctgtatgccaaacaggatatggcaaacattgataatcgcgaactggccggattccgtgagttagcaaagcactacgctgcccttgctgatgaaaagattacggcactgattaagaataaagaactggtggagatttgccatggctgcaaaaagtaa

SEQ ID NO: 9338 - DNA, 324 bp, Photorhabdus luminescens
atggctgcaaaaagtaaattcaagagtcctgcatttgaggccatccacagcgcggcttctggattattcagcgtcgatgctatcccgcaggaaacgatgcgccactttgataaagcgtgccttaataacgtggacgacctgcaacctgttgagattaaggcgctgcgcgagaagctgaacgtcagccagccagtttttgccagttatctgaataccagtgtgtcaacggtgcagaaatgggaaagcggcgtaaaacgccctggtggattggcgctgaaactgcttaccgtggtgcagaagcatgggttgaaggtgttggtttga

SEQ ID NO: 9339 - DNA, 183 bp, Photorhabdus luminescens
atgtctggcagacttagaaaccatctcaattgccatttcgaacttgcgttgtgttcaaaatccttatgtattttgctccggattttgcacgctgttcgtgccaaactggctgcaccaataatacctactgggagaggttctatgttgtatggattgacgataaggcaggtatttcttgattga

SEQ ID NO: 9340 - DNA, 1377 bp, Photorhabdus luminescens
ttgattgatataataagggtctggctgatttctcaatcatggttttggcgattcagggctagaattgcaaaaattagttttctctttgagaacagcacgtacaaacgccgcacgtatgtttctaaggcgaaggctaatgttcgcattcttggatctttcacgtgggttggcttaaatagtctattttgggttgtattgacgctatctattctaggtttcgttgaggattatcttcgtagtaaaactgttttactcaagccgcttagtgcagacgacaaaaaattttatattgatcaactaagattatatgcacaactgcttactgcgatattttcaatatatttcgcgactattggcatcatattgagtactggctataccagactcagacgggatataatacaattactcactaccgagcaggttggtagtatttattcgcgggttttggtgctttcagctgttttttgtcttggtgcaactactctccagttggttggatttgaacccggtctcttcattactgcgatagggacattcttaacgcttataagctctctggccttgtttccattaggtcaaaggttattcaatttttttaaccttaaccagttggcgcgtagcgaaatactcccaaggattgcgcaccatattgaaggtgcagctaatcccaataattcaatatctctggccaaccatcattcaaaagtcgcacgctcagcttttgagcagctctgctatattgatgaccgtatgaaaggagaaaaagtagggcttggcgataatttacctgcattgagtgatgattatatggtattgcttctacactacattcatcaaaaacacagaatcgaccatcagagctactggtttcctaggcgacaaaagcacaaccaatggtttttggcaggggatctagcgactacaactgctctgcaaacaaatagccaattatctatcgaagaagaagcaaaccatcaatggctagaaaatgtaattattgaaaggttggctggtcacattgagcttgcgtttgagatgggtgatttcaaactaggattgaaacttattagccgattctcatcgcgaatatcaacttatgctgagcagttccagttcgacattgggatgcgagagcttcagcgtatgaaggaactcattgaagaagcctttgtttcgtcagatatcattccagggaatgaagaagtcactctgcggataggaattgcagattcgtgggccgcattaggtagtaatctttgccttgaaacgttgcggcgtatgataacgtttgagaaggaactgagacaattctttaataacgacatttggacggaaaagtctctacagacgttacctccttttcttgcaggttga

SEQ ID NO: 9341 - DNA, 312 bp, Photorhabdus luminescens
ttgcaggttgaattagcttttattattgagcgcattaactttgaacaagagattgaaggacagaaattatctaaaccaaaatatgttcaacaattagccgttcaaaagttgttgcagcaatatgcaaagatattgccaatcatatctgatttttacggaggtatggtgccgggttttattagctcattgacaaaaatgaatatgtcagaagctgcaactcaagtgattctcgcaagtttgcataactattggaagttgcctaactggtttgatgaaatttctcaacatcttagaaagatgtggggagtataa

SEQ ID NO: 9342 - DNA, 756 bp, Photorhabdus luminescens
atgatcgctcgtcttacatatgggcgagatgaagctatcgcgatgcttggtagagcagacattgttgggcatatttttgcgggcgaacataacgacgaattgccagaccattttggacagatatacttcgagctggctgaggcctgtattcaataccttgaacagaatgatgaaaaaaaattcagtaaagttttcccaatgtttatgtccttggcattgctggcgatagactccaaatttgttgatccagcactcaatgtgaatgacgagtttcgcctacatctcatttcatcggtgatcaacgacttggcgtcagtcctcggcttcgctatcctttacagtaattattttgacaatatgaaattgtctgaagccgcacttgataaatttaaactacttattgataaaacggcaaacaaacaacagtacctgacgagaatggtacgcctgtcaaactcatatagtttcagtttgagtgcttcgcccagaaatatgattaggtcaaagtggaaaatggcatttgagcatcgagcaagacacgacggattcagtgatcaaatggggatgagtggaggaaaatctcataagaacaaaattgttagagcgtttctttattccgattcagatgcgtctcacctgtttttcgccattgaggctcttccccaacttttttctccaactgactttgagattgattatcatatcacttctctcgccaggtttttagatgaggaatgtgacgagggttcagaatga

SEQ ID NO: 9343 - DNA, 993 bp, Photorhabdus luminescens
atgaaaattgtcaggacctccccatttgatcgctattactttgctgatgttaatctcagtttcattgataggctttttatcaaactcaagagtgagcggcctacgtttaaccgaagcatgtttgatcaggattttgcgagaattttttgttctggctccagacaaagtagcaacctttttagtatcgagtctaatgacgatgagcttacaaaaacattatttaggtatattaagacaagacatagatctcacaacattgataaaaaaatgcgtgagttagttgaggaaatagctcgatcattggtttcgttcggtacggcatactactttcttcatgattttcctgaagaggaaaatatctgcatcgcgtctttcagtggaatcggcgttttcagttttttaaatatatattttcagttagtgccacaacgatgtgaaaagaactggaatagtgaggacagggaatatcccagagaattacgtatcttggatagagctaaattgatgcactttagtatgccaagatcaattaaacggatgctgtctgaacagaatcggactttagcggtcttggatggacaccaatatgacggcactggattctttcctaaggcgacacatgaaaatccaaacccaaagaacgactttgatttttgtgtttggagggatacgcaagagcgagcattgtaccgtgctacccgtgaaactggttggaatggtagaaagtatgattcgtcaaaacgttcagactttttcgtttgtcatcgtctgattcggtttcggcgaaaccagctgattttgcgtgattatatactagagttgctgggtaacgagtttacgagaataggtcgtcagtacaatgcggagtttcacgtcgcgatttcacctacaaatgctctgcctaaagttgataaacttgacgatctagaagcacgattactgaaggaggaagccagttttagcgaggtgttcgatttctgctatgaacgataa

SEQ ID NO: 9344 - DNA, 1266 bp, Photorhabdus luminescens
atgaaactcaatgccaggcaaatagaggcagcaaagccaaaagataaagcctataaactcgctgatggtggcgggttgtatctggaaattactccgcgaggttcaaaatactggcgtatgaaataccgccgacctactgataaaaaagaagacaggttagcatttggggtttacccggtaatttctcttgctgatgccagagctaaacgtaatgaggctaaaaaactgatagctaatggtatagatcccaaagcaacacagaaagagacacaagctgaggcatcaggcgaattcaattttgaaactattgctaggaaatggcactccagtaataagcggtggggtgactataaccgggcgcgtgtactgcgcagccttgaacaatacatctttcctcatattggtaaaattgatatccgtcagttaaagacccgtgagctacttgtacctataaaagccgttgatgatgctgataaggtcgatgttgctaaacgtctacagcaatgtgttaccgctattatgcgctacgctgtgcaatgtggaattattgaaagcaatcccgctttagatatggcgggggcactttctacaacgaaaaccgaacatcatcctgctttaccgcctagccggttacctgaattactcgaaaggactgctttgtttaaagggcgtgaagtgacacgtatcgctattgaatttggtttattgacctttgttagagccagtaagctacgtttcgttaggtgggatgaattcgactttgataatgcgatatgggaaatacccggtaagcgcgaagccatagaaaacgttaagttttcagaacgcgggatgaagatgaaaacaccgcacatagtaccgttgagcagtcaagctatggcactactcgaaaagcttaaagaatatagcggtgataatcgatgtttattccccggtgatagagaccccaataaggtcatgagcgaaaacacggtgaataaagcacttcgagttatgggctacgacattaagacagaaatttgttaccacggatttagaacaatggcgcggggcgctatgggagagtctgggatttgggctgatgatgttatagagaggcaactgagccacttggaaagaaataatgttaaagcggcttacctacacacatcacatcatttagatgaatgtcgccttatgttgcaatggtgggcggattacctagatgctaataggcaaggatttatttcaccctatgactacgcccaatcaacaggcaggggataa

SEQ ID NO: 9345 - DNA, 432 bp, Photorhabdus luminescens
atgcaaagagatattcagaagatacttttacattggggtggttgggttgttcatgggcgctctggccttggctggtcatctgttaccgctggatttaaaggcttggtgagccgaacgagcattactaagctttcatgctgtgacgaggatggactgatcattgatgggtgtattgcgaaattgcgtaacgtccagatggaacaagaatgcgattttatcgaatgtcactatgctaaaggcatgtcgaaacgttctataggccgtaaatataagttaaatgaaagtgaagtccgtaaacgcatggcaatagctgaaagctttatcttaggctgcttaaccgcatcggatgaaactttagaactggatttactttatggttttccttgccaccagcaacccgtaccgcctcaaaatgtcgctgcttataggtaa

SEQ ID NO: 9346 - DNA, 2226 bp, Photorhabdus luminescens
atggctaatactaattttttgatcggtcgtggcgaactattaacacatgatatcccatcgcctaaaagaagaatggataaatctgaggtttatacactaacagaagcaaaaaaacgtttaacacctcaaatacaaacaactaacgatatatttaaaaagctaccagcacactcctgcccgcatgattatgcagtagccaaattaacaatgaaccctagctatattgcaaggtcttatttccctacggctatgttgagaaatacagatttaaaatctgtgggtagcaaaactgtaaaaattgtacctgaaaaatggaaaagaaaaatagatgttattgagcacccaactactcagctatttgtagccggaaaacgttcagcatttagaaatttatctgagtggatcagtgaattagaaaataactctgctgaatcaattgatttcgccagaatagaagcgtttgaagcatatctaccggaagaacgttttattattcctgaaaatatacaagaaacacatttcgaagtaggaattcatcttcttcaaaatgatgatgaggattttgtccagcgtaaatttatcgattatgcaaagtcattggatataaccgtatactctgatctaacctttacggccggctctttatggtttttacccgtgcaaggtaatatatccgctataaaaaaactagctcagtttaccttcgttagggtaataaggcctgttcctaaattaagaggtttaaggcctttaagaagaacatccggtaccgcaataccgtgtacactccccgaagaagccccgctatcaaatgatataagagttgcaatacttgatggtgggttgcctgataagcatccaataaaaccgtggttaaaatcatatcgggtgttagacgagcatgcgaatgacaatcccgatgctttagaacatggtttaggcgtttcgtctgcatttttatttggaccgataaaaagcaatgttaagccccctatcccgtacgcgtatattgataatttaagagttctagataataaagcatatgaagaagacccgttagagttataccgaactttaggtttaatcgaagaggttttactctctaggcaatatcaattcttaaatttaagtttaggccctgatttaccgattgaagatactgaggttcacgcttggacatccgttattgacgatcttctaagtgatggcgaaactttaatgaccgtcgctgttggaaacaatggagatatggataaagaatcaggaaatgccagaattcaaatccccgctgattgtgtaaacgctttagcaattggtgcatctgattcaactaatgatgataactggcaaaaagcttcgtatagtgcaattggaccgggaagaagtcccggtgtaatgaaacctgatattgtagcttttgggggtgaaacatctgaatattttcatgttctcacggaaggctctaagcctaatattactcctgagcgtggcactagctttgctgctccatatgcactaagaaatgctgtaggcataagagctattttaggtaacaatctcaacttattagcaattaaagcactattgattcactcatcaaaaaataaagatcatccaagcattgaagttgggtgggggaaaatacctgaagatttaaatgatattattgttagccctaatggtgtagcacgcatcgtatatcaaggggaattaaaacccggtaaatatttaagagcccctgttccgttaccaatctcaggcttaacaggaaaaataaatttaaccgctactttctgttacgcaacggctacagatccacaagactcagcatcatatacaaaagccgggttagaagtatcttttaggccgaatgactctagaattaaagacggtaaaaagaacgctgaaaccgcaggttttttcgaacttaaaaaatttgccactgaaagcgagcaacgttctgatatgggaaaatgggaaaccgtccttcatgcatctaaaaatatgctaggttccactctaaaaagtccagtattcgacatacattataatgctagagagtccgggggaagtgttccgggaaataaagcagacaaaattcaatatgcactaatcattactgtaaaggccgcaaaacatcaagatttatataatgacatattacgagcttataataaaattttagtgcctatacagcctcaaacgtctataccgattcgttcgtaa

SEQ ID NO: 9347 - DNA, 1122 bp, Photorhabdus luminescens
atgggcgaattaattggaattcaggcagatttagcccggttagtaagattggttattaacgagcagtacgatgatgttaggctatatgtagcacggctagtacgtaagtatcgagagaacacgccggagctatcagcacagcttgacttgtatttacgtagtaagcccttcaagaaaactcaaagcttacgtaaggcaactacaccacctaatataatttcagaagccttaccagtagatgaagattcaagactaacgctattaaaaacatcaccaacgacagatgcgataccaaagccattattaaatacagggattgaagatgcgttagaccagctaattcttgaacgtaaaaacattaataaactagaaaaaatcggattacaaccgacccgttcagctatctttgttggtcctcccggggtaggtaaaacattaacggcaagctggctagcccaaaaattaggcgtgcctttctatgtacttgacctaacagcagtaatgagtagttatttaggcaaaagtggtaataaccttagagcagccttagattttgccaaaagaggtccatgtgttttattactagatgaaatcgattcaatagctaaaaaaagaagtgacgattcggatgttggcgaacttaaacgtttagttacagtgattcttcaagaagtcgatcaatggccttcgtctagcgtgttacttgctgcgacaaactatgaagagcttatcgatcccgcattgtggagaagatttgaccttgtacttcattttgaaaaacctgatagcgaaacaatcaaagaagctatacaacgctttctaggttcagattatgccatttttgctcgatggatcgatattcttgtaatcctgtttaaaaatgagtctttcagcaatattgaacgttcaattaacaaatttcgtcgttcaatagctttaggtatcgcatctgatgaggtactaattgaagatttcattaaagatagcttatcaaagcttgataaaacagaaaaaagaaatgtcgctattaatttaagtaaaaactctaaactatctcagcatgcaatatcagatttaacaggtgttagtagagacaccattagaaaatacagtgctgcttaa

SEQ ID NO: 9348 - DNA, 423 bp, Photorhabdus luminescens
atggccatgtttgagtatgcaataagtaatgaaacaaagcggctacttcatgtggacgatgctaagaatgggcgaaagtgtaattgtgtttgccccggctgtgacgatcagatgatcgctaagcaaggtaaaatcaaagagcatcatttcgcgcatgcaacatctgagaaaaaatcatgttatatgacaatgcttcatcgatttttccaagagtatttttctgaacaggaaattttagatataccagaagttaaattatcggttttgggaagagaagtagatatacctcgcagaaaagttaaaatattgaatgctcaactcgaagcaacaataggtagtcaccgtgcagatgttttgttgctcactaatatatacccgcttaacttgaagatgcaggattcagaacctggaagttgtcattaa

SEQ ID NO: 9349 - DNA, 909 bp, Photorhabdus luminescens
gtgatgatcgctcaggccctgcgtcttcatgaaacgaccattaatcgtcatatcagtgattaccttaatcaccgcaaaatcaagcccgaaaatggcggctctcagagccatctcagcgaaacacagactcaggaacttatcgcttatctgaccgcgaatcttctgcccaccacacaagcggttatccgccttgtcaaagaaacatgggatatcagttacactgttcccggcatgaataaatggctgcaccataatggatttagttataaaagaccgaccggcgtgccgcacaagttcaacgcggagcagcaacgggcctttatggaaacctacgggaaactcaagcaggaagccggagaccatgaacccatcctgttcattgatggcgtccatcccacgcaggggaccaaactcgcttatggctggatgcgcaaagggcagaaaaccgcagtgaaaaccacaggaagccgtacccgtctgaacctgatgggggccctgaatctggctgatatcagcaaaacggtagtacgtgagtatgaccgtatcgacagttatcacatcgccgagttcttcattgccatccgtgagacttatccggtcagtcagaaggttcatattatccttgacggagccggttaccaccgaagcagactggtgaaagactgggcttatgtgatgaatattgctcttcattacttgccgccatacagcccgaatctgaacccgatagaaaggctgtggaaggtgatgaatgaacaggtcaggaataccccttatttcgcctcgacggtcttgttcagacaggcaatacatcgtttttttacggaaatattaccggaacttgccaggaacctgtcgggccgtattaatgacaacttccaggttctgaatcctgcatcttcaagttaa

SEQ ID NO: 9350 - DNA, 363 bp, Photorhabdus luminescens
ctgggtttgatgagaagagacaaaccttatacatcagtaagtttgtattctttttcacgagactttgccgcacaagcttccatgtctgttaaatgcataattacggagttaagtgaccagccagcgctgataaaaaattgcgcccttgaccactcgtctgaatacctgcgtgaagccctctcagtgtggttagccgccggtgtagaaattaaatattcagcgcaggacagagatattttaacagccatcggattccggcctcacatggcttcgctggcagataatcaggaaaaatatacacccgtgcagaacctgatttatgcactccgtaaggctgaactggtcaggcaggagcctgtgtaa

SEQ ID NO: 9351 - DNA, 1422 bp, Photorhabdus luminescens
atgaatttatcgccaacagcacaagccacattattgctcactagttatttttccaaggcgagcagtgatgatgtcaaacccctcactaatgctgaatggggtaggtttgcgttatggctgaaagaaaaatccacaacaccagcagatttgttggtatctgagcctaaatcaatattaagcacctggcaggattcccgcatcagcacagaacgcattatacagttactgaatcgtggccacagcctggcgttagccgttgaaaaatggcatcgagcaggtctttgggtagttacccgctctgatcctgaatatcccaagcgcttaaaacagcaattgaaaaccgactctccgcctgtgctatttggttgcggtaataaagctttactgaatgttggtggtttagcggttattggctcacgtgaggccaacaatgcggacttgtcttataccgagctggtcggttcaagagcggcatcagagggcattgcgattgtatccggtggtgcccgtggtgtggatgagacggctatggtgggagcaatgcttggtggcggcaacgttattggggtactggcagatagcctattgaaagccgctaccagcgcaaaatggcgcaagggtttgatgaatggcagtgtaatgctgatttcgcccttttaccccgaggctggcttcagcactggaaacgctatggcccgaaacaaatatatctattgcttggcagacagctcgctggtaattcactcggggaaaaaaggcggcacactaagcggggcagaagaaaacctgaaaaagtgttgggtgccattatgggtaaaaccaacgaatgacagtagcgcggcaaatactgatttagttgcgaagggagggcattggtgtgaggcagatgttcacaaccttaaggtttctgatttgttctccgtagaaaactctactgcttcgcagaaagaagctgaacaggttgatctatttttcatgccagcacagtcagaattatttgcgaaacctgcatcggaatttgatctagaggtagcggaaaatcgaataattgttgctcactcaatcgaacaagatgaaatccagggttcaatcgatcacgaagcagaagcagaagcagcagcagcagcagcagaagcagaagcagaagcagaagcagaagcagaagcagaagcagaagcagaagcagaagcagaagcagaaaaaactgtaatgcaggctgtggatttttatcaattgtttattactgagctccatcgattgacagtaagccctattacacttgatacccttatcgagaacactggtctgcataaatctcaattgaaggaatggttaaaacgagctattgatgagggacaagtgaaaaaactcggtcgtcctgttcgttatcaaatagaaaagaaaaatcaaaaagttgtttaa

SEQ ID NO: 9352 - DNA, 2103 bp, Photorhabdus luminescens
atgaatcgagctcaggcccaacaactactacaaactgcactagccaatccaaatgctgagtttcacgatggtcagtgggaagctattgatgctttagttaaccaacggcagaaactgttggtagtacagcgtactggctggggtaaaagctcagtttactttatcagcaccaaaattttccgtgatcgcggcatggggccgacgattattgtttctcctttgctggctctgatgcgtaaccagattgagtccgcccagcgcctgcgcatcatagccgagactatgaattccaccaatacagcggactggcagacggtgacacaaaggattataaataatcaaatagattgcctgctgatttctcctgagcggctcgccaatgataacttcattgaaaccgtgcttcatcctatcgctgaccgtattgctctgatggtgatcgacgaagcccactgcatctccgactggggccatgacttccgcccagactatcggcgtatagtcaatattttgcgccagttgccacctaatacaccggtattaggcacaacggccactgccaataaccgcgtggtggctgatatccaaacacaactgggtaatatccagatccagcgtggtccactgatccgtgaaagcctctcgctacaaactatggtgctgcctgatcaatcctctcgcctagcttggttggcgcaagtgattcccacattgcatggtactggcattgtgtacaccttaacagtgcgtgatgccgaacaggtagcaaattggttgaacgtcaatggcataaatgccagagcctaccatagcagtattgaggctgatggttttgaaaacagtaacgattaccgacaatatcttgaagagttattgctaaccaatcaacttaaggtgctggtggcaactactgcattgggtatggggtacgacaagccggacttaagctttgtgattcactatcaagcaccaggttctatcgtggcttactaccagcaggttggccgcgcagggcgtggtatcgacaacgctattggtgtgttgatatctggtatagaagatcaagatattcataagtttttcaggaattcggcattcccatcagaaactcaggtaaacgaaattttgcaagtactagataatagtgatggtttatcgcttcgtagcattgaagagcaaaccaacctacgctatggccagattgaaaaggtattaaaactgctaagtacagagaacaccgctcctgtgattaaagtcggaaacttatggcgcagaatacccgtgccttatgctatggatcgcacccgtatcgctcacctcaccaaccagcgtaagcaagagtgggctgaagtacaggcttatctgtcagataccagatgtaagatgactttcttgcgccgtgtactggatgatcacgaccctacaccttgtggcaaatgctcgtcatgcatcggccagcctgttgttaatcaggctattaatccagtgttagttcatcaggcaggcacttttcttaaacatgccgaaatgattatccagccaagaaaacaggtagcaacttctaatcgagcctttcctacatattgttttccacggcagttaggttgcttagttgctcagccaggtagggttctctctcgatggggagatgctggttggggaaagactgttattgaaaataaacattcgggttatttttctgatgaactagttgatgctatggctgaaatgatctcacagcgttggcagcctaatcctagtccaacttgggtgtgttgtgttccttccttaagacacccgaatttagtccctgcatttgcatgtcgtttagcacaaagattgaacctgacatttgttgatgcggtagcaaaagttcaagataaccagccccaaaaggaacaacaaaatagttttcatcaatgccacaaccttgacggtgtttttgagataacacaaattatacaaaatcaaccagtactccttatcgacgacatcgttgactctggttggactcttaccgttattgcagctttgttacagcaagcgggtagtggtattgtatatcccgcagcacttgcctcttcttcggtgaaagactcatga

SEQ ID NO: 9353 - DNA, 3315 bp, Photorhabdus luminescens
atgatggccgcaatttccctttcgaatgatattctccgtacctggcaacgtatagaattcttccaaccttatacacttgaaaaaaaagataaaagcttactaattccgcttaaaacactctatcagctgggagataaggcactaccctggctttcgtcagaactccgtcaacaacatgatattcccgatcaaaaagtcttatacaacttgtacgtcggtttgtttgataaagctatcgctaacgcgatcagccaagcggtgtttggtccagatgaagggtattatgcagaagaatttgagcaacggctggataaagaaggaacaacctgctttgccaaaattccattaggcacggaaggaaaccctgctctggataaattttcagtgagttctcttccttgggctttagggcacctgcgtgatgaacgttttgaacagcttaatacgaaggtattttcagccagttgcgagcatcttaaaaataccctcggcaactttagcgtctctctgaagccaatacgagaaaatggccccggtattttaaaagcaaatgatattttaacactgttgacgacacatctggtgagttgggcagattttgaaccccaatggcaatatgctttacaaatagactggatggagggaaatggcgactgtacagaagcatcacaagaaaatagcgatgaaattgaagaagaagtcagctctaatgataaaacctttgcacttcctattttaaatagttttttctttgaggacattgaatacgctattacggccctaaaacgaggagatagatgcaaagctctcagagcatatctttctcatcatagtgtccccaggaatccagacctttattcacaagacgggcttgcctccatcatcagtaaactccatccagcgaagatgcctcatggacgctggccttccgatcccaaacatgccatgtcgctaatgcagcaatttgctattaatacggcgatagaagagctcgctgatggtgggctgctttccgtcaacggccctccgggaactggaaaaacaacgcttctgcgcgatctaatagcacataacattgttgaacgagcgaagatacttacgcgttatcaaaaagttgatgacacgctggacaattccggttttattgtgaatgcgctcactggtttcgaaatggtcattgcgtcatccaacaacgccgcagcagaaaacatatcaaaagaattgccgcaaaagaaatcattggctgaagaattccaatcgcttgactatttagcaccaaccgcaaaccagatagctgccgagaaccgcccgaagcgcgaacataaaaaaagtaaaaatagtcagggaaaagttagaacctatcacctctatcgtccattgaaggaagagaaacaatgctgggggatcatttccgctgctttgggcaacaaaccaaaccggactaaattttctgatcgcttattttttgatgaacattttttacgcgacaccccaactgaagcctctcgtcccgctgaagagaactttctcagtctttggcgctggaggcactatcacaaccccatctctttcgccaccgctaaaaaacgtttcctcgtatgtctggaaaaaacaaaaaaacttcaacagcaattagaaatgcttgtgtatctgatagaaaaacagcataacgattcactcgacacgttatcactaaagttgaagcaaacagaagaactgtacgcaacacagcttaacaggctggaacaggtggaaacaaaacaggatgtattagaaaaacagctccagcatgcagaacagcaacaaaaaattatcgaaagtgatgcaccaggatggctaatgcgtctgatgaatcgcaagcgagtgcatgcatataaagaaacgttgcggtgtgcacaacacgaagtattaagactgatggggttgcaaaccgaacaagcccagcgcattgcggaacaacgcaagtcagttaacggcatagctgaaaaaaagcgaatcttacaacaggatatcgaaaaaattatccaacagcgggtgaatgaccatcgttctctacaaactttgaagcagcagttttccgatatcacattgccagatatcaaccaacctatcactgatgcaacattacaacgaacggccctttggcagaacgcacagataaatcgtcaacgttccgcattatttatcacagcgatggaacttcatcaggcttggctttatgaagcactaggagtacctcgttttagagacttcataatatttaatctcgcggcttttttagcacaacctcattccaaaatcacgcctatacgctggtggcaaacgctgtttatgtttgtgcccgtattatccacaactttcgcatctatagggcgcatgttccacggagtggaaagcgaagaacttggctggttaatgatcgatgaagccggccaagcacctccacaacaagctgtcgggggactctggcgtgcaaaacgggtactggttgttggagaccctttgcagattgaaccggtatttacgacccctccgccgttggttgaacgtctttgcctagatgctctgaatgaaaaggctaaagactggaatccgggattactttcagtgcagcaggttgctgatcgcgtcaatcattggggatgtgaattagaagtcatgaacaacctgatctggctaggtattccattgtgggtacaccgtcgttgtattgaaccaatgttcagtttggctaataagatggcctacaatggccgcatgattcatgggcttgatgctgacaagattcgctgccaacctgtgaacaacattctggaaaaccattggctggcatcggttggagggacaggtgaaaaacaatatcgtgacagccacggtaaagatttgctcaagttattggaccaactgcttgttgcaaatgtttctcttcattcgatttatgttattacaccgttcaaagcagttaagtcagcactgtgtgaattattaggaaagcgtgatctggctacctggcggcaatctatgccattgatgacacgaaaagaactcaacgtatggcaaaaaaattgtattggtacagtgcatacttttcagggcaaagaaaacgatattgtcatttttgtcctaggctgcgacgaaaataatgatggtggcgcaaaatgggctgccagcaagcctaatctgttaaacgttgcgctcacccgagcaaaaaaacacattttcataattggcgatccagcggtatggcatggtttgccttggtttcgtgatgtagccaaggagttgccagtggggacatatcatcatttacaataa

SEQ ID NO: 9354 - DNA, 768 bp, Photorhabdus luminescens
atgcaactggctacggaaaagttatctgcaggctatggggagaaacgcattctgaatgacctgtcgctcaccctcccgaccggaaaaatcacggcgctgctcggccccaatggctgcggaaaatcaacattactgaaatgcttttcgcggctattaacgccattatccggaaagataacaatagatagtgaacctttaacgcacttttcctcacgcaagctcgccaaacatctggcgcttttaccacaacatcctctcacaccagaggggatcgccgtccatgaactggttgcatacggacgtagcccttggcttacattttgggggcgtttagcacctcatgatcgtcatcttatacaacaagcaatggaaaaaacgcagattagccatcttgccgataaatgcgttaccgatctttcaggcgggcagcgccaacgcgcttttctggcaatggttctggcccaagatacgccggtggtactgctcgacgaacccactacatatcttgacatcaaccatcaggtggaattgatgaagctactgcgtgaactgaacaacgaaggaaaaacggtcgtgaccgtacttcatgacctcaatcaggctagccggtactgtgaccacctggtgctgctttcccaagggcaggttgtcgcccaaggctcacccgaggaagttatgacaccgaaattattacagcgggtattcagcatcgaagcggaaattcaccccgaacccgtttcaggtaaaccaatgtgtgtagtgtgttaa

SEQ ID NO: 9355 - DNA, 957 bp, Photorhabdus luminescens
atgaatcgtcaggttatcttacttttagtcgtgttgctggcagttacgctggtgctagcgctacgcatgggcacgcaaccacttccctgggacgctttaataagcggctggcaacccggtgacaaacaccactttgtgctaacgcagtaccgcttgccgcgtattttactcgccatcgctgtaggcgctgcgctggcgctttccggcgtcttggtccaagggattgttcgtaatcctttagcctcccccgatgtactgggggtcaatcatgcagcaagcctggcgtcggtaagtgcgctgatccttttcccttctctgtcagtgcagtggcttccgctactcgcttttggcggtggaatggctgcgctaatcctgctacgagcgatcgccggcccctcttctccactgcgccttgcattagttggcgtggcactttcagctacctggacaagcatcaccgattacctaatgctctcacgcccacaagatatcaacaacgcgcttttgtggctgacaggcagtctgtgggggcgcgactggcagtttgtagctatagccctaccggtattgatgatactgataccactcagcctacgcttttgtcgcgatttagatttgctggcactcggtgatgacagcgccagcacactgggcgtttcgctcccacacgtacaatcctggggattaatgttggcagtagcgctcgccgcaacaggcgtcgccgtttgtggtccgattggctttatcagcctcgtagtaccccatctcgttcgcagacttgtgggaggacggcatcgctggcttatacccgcatccatgcttatgggtgcacaagttctgctgctagccgatttgctggcaaggaccatagcgccaccgatagagctgcctgctggcgtgctgaccgccatcattggtgccccttatttcttctggcttttagtgaggacacgttaa

SEQ ID NO: 9356 - DNA, 999 bp, Photorhabdus luminescens
atgagacgccgccatcatccggtctggctttggggattgccgttggttgcactgcttagtgcattctggctaagcctgttttgctattccgctattcccattcccgccatcagcgcactcaaggcactggtgccaggtcatacaccgacattgcctgaagcactggttatcaatctgcggctaccacgcagtctggttgctattctgcttggcgcggctctggcattggccggtgcactcctccagacgctcactcataatccgctggcctccccctccttactgggcattaacagtggtgcagcactggctatggcgttggtcagcgctttcagcccggcaccgctagccggatattccatttctttggtggcggcctgtggcggtggaattagctggatgatggtgatggccgcaagcggtagctggcaacaaaaatacgatcgcaaccaactaattctggcaggcattgccttatctgccttatgtatggcactaacacgtattacgctactgcttgccgaagatcatgcttacggcattttttactggctggcggggggagtctcccatgtccgctggcctgaattctggcaactattccctttcgtggtggtcactgtacctgtagttttgttgctggcgaaatcacttaatctgctcaacgctggcgatgtcagtgcccatacgcttggcgtgaacctgacgcgactgcgcatcttcgtcagtctggcagtactgattctggtaggggcctgcgtcagtgtagcgggaccaatcgtgtttattggtctgctaatgccccatctggcgcggttctgggttggctacgatctgcgccgcacactgccaatgtgcatgttgctgggagcggtatttatgctacttgcggatttactggcccgtgcgctggcctggcccggagaactcccggcaggtgcggtactggcgctgattggcgctccttgctttgtctggctagcaaggaagcgaacatga

SEQ ID NO: 9357 - DNA, 909 bp, Photorhabdus luminescens
atgtctgcactgattcgcgttacgtttatcgctttgctcttcttcaccagcctgccccatgccattgcggtcacggtacaggatgagcagggcagttttaccctcaataccgttccccagcgcgtagtcgtgctggaattgtcatttgccgatgcattggccgccatcaatatcagtccggtaggtattgccgatgataacgatccgcagcgcattctcaccgatgttcgccagcgtattaagccctggcaatcaaccggcactcgcgcccaaccaagccttgaagccatcagcgcgctgaaacctgatctcatcattgcagacagtcaacgccacgcggggatttatcgggcactcaagggcatcgctcctgtcctgctgctaaaatcccgcaacgaaacctacgaagagaacctgcaatctgccgcgatcatcggcaaagtcatggggaaagagagtgagatgcagaaacggctggcagagcaccgtgaacgcatgaaaggctatgccagccagttgccacaaggcgtcagtgtggtttttggcacctcgcgcgaacagcaatttaacctgcactccagcgatacctataccggcagcgtcttaacagcattagggctaaaagttcccgcatcagttaatcatgcggcaatggtttctctcaacctggaacagttactggcactcaatcctgactggcttatcgtggcccactatcgtcaggaaagcatcgtgaaacgctggcagcaggatactctgtggcagatgatgacagcacagcacaagcatcagatagcagcggtagacagcaacacctgggctcgtatgcgcgggatatttgccgctgaacgcattggcagcgatgcggtaaaaatcttccaccatcaaccggttaatgaaacaccatga

SEQ ID NO: 9358 - DNA, 2361 bp, Photorhabdus luminescens
atgatgcctttacgtgcacagccactgcgcgcgcttcacaaagcaacaccgctggtaatggcgattcgtttgagcctgttaccggtggcttgcctaacctcagggataacgtatgctgcggtagagccagctagcacacactatgacattaatgcgggcgaattggataaagttcttaatcagtactccacccacgccggtattaccctttcagtagatgccagcttaacccgcggcaaacagagtcgcggtctacacggcaattactccatcaccgatggactgaacaccttgctgatcggcactgatttgcaggtgaagacattgggtgataacacgttcacactcaaacccgcccctgttgcgcagaaagatgtgctgaccgtggtaggcgactggctaggtagtgcgcgtgaagctgacgtgtttgaacatgcaggcgcacgtgatgttatccgccgggaagattttgccaaaacaggcgcaaccactatgcgtgaagtgctgaaccgcattcccggcgtcaacgcaccagaaaacaatggtaccggcagccacgatctggcgatgaactttggcatccgtggcctgaaccctcgtctcgccagccgttctacggttttgatggacggcgttccggtacccttcgcgccttatggacagccacagctatcgttagcgccagtatctctcggcaacatggacgcagtagatgtggtacgcggcggcggcgctgtgcgctacgggccacaaagcgtcggtggtgtggtgaatttcgtgacccgcgctatcccgcaggattttggtattgacgcaagtgtggaaggacaacttagccccacatcttcacaaaataatccaaaagaaacccataatttcatgattggcggtacagcagataacggtttcggcacggcgcttctctactccggcacacgcggcagcgactggcgcgaacatagcgccacacacattgacgatgtgatgctcaaaagccgctatgctcccaatgaagtgcacaccttcaatagtctactgcaatattacgatggcagtgcggatatgcccgggggcctttcacgcgccgattacgatgccaatcgctggcaatccactcgcccatatgaccgcttctggggccgccgtcagctcgcaagtctcagctatcagtatcaacccgaccagcagcacaaattcaatattcagggcttatatactcataccttgcgcagcggttatcttgagcagggcaagcgcattactctttccccacgagaatattgggtgcgcagcatcgaaccacgctatagccagctcttcaatttagggccttcggcccacgaagtagggatcggctaccgttatgtgaatgaatccagtcacgaaatgcgttactacaccgccaccagcagcggcgaattacccagcacgtcaagcccttatgaccgtaatacccgctccggcaccgaggcacatgcttggtatattgatgaccgcattgatatcggcaactggaccatcacgccggggatacgattcgaacatatcaaatccttccaaaacaacaatgtaaaaggtacccgccaagaagtcagttatgatgcgccgttgcccgcactcaatgtgctttatcaccttactgatagctggaatctttacgccaatacggaaggctcgttcggtaccgtacagtacagccaaattggcaaagcggtgaaaagcggcaatgtagaacctgaaaaggcgcgaacctgggaagtcggaactcgctacgacgacggcgcattggcagcggaaatggggctgttcctgattaatttcaacaatcaatacgactccaaccagactaatgatacggttacggcacgtggaaaaacccgacacactgggctggaaactcaggcacgttacgatctttccgaacttactcccaaactgaataacgtttcggtttacgccagctacatatatgtcaacgcggaaattcgtgaagagggcaacacctacgggaatcaagtgccgttctcaccgaaacataaaggggcatttggcatagattacaaaccgggtaactggaccttcaacctcaatagcgcatcccaatccagccaatttgcggataacgcgaataccgtgcaggaaagcgccaatggcagcaccggccgcattccgggctttatgctgtgggatacgcgcgtggcgtatgacttcggtccacaaatggctaatctgagtgtggcctttggggtgaaaaacatctttgaccacgagtattacacccgttcctatgatgataataacaaaggcatctacgccgggcagccacgtacgttctatatgcagagttcgctaaagttctga

SEQ ID NO: 9359 - DNA, 966 bp, Photorhabdus luminescens
atgaacaccatgttaacccactctcgccgccaggcattaaaatcagcatcacactggtatgcaatactgagtagcgatcaggtcagtccgctgcaaactgaaaaatggcagcgctggtacgaacagcatcaggatcatcagtgggcgtggcagcaagtggaaaatctgcgcaaccagatgctggtcgtgcccggcaatgtggcaagccatgcacttcaggaaactcacctgtcacgacgcagagtgatgaaaagcatactgttgctgctaggagctggcggtggctggcaactgtggtgttcggaagtgggtgagggcctgcgggccgattatcatacaactaagggggatattcagcatcatcgactgagcgatggcacactgcttacactcaataccgacagtgccgtcgatgtccattttactcctcaacaacgtctggtacatctccggtacggcgaaattgccatcactaccgggcatgataccgaagcaaaactattgcgtgtacaaacccgtcatgcgcaactaaccgcgctaggtaccaaatttacggttcgtcaggaagccaacaccacactacttagcgtgcagcaacatgccgtagaggtgatactgaccagcgctgaccgcaaatgtattgtgcgtcaaggtgaaagcctaagattcagcgccaccgattttggtgaactgaccgcagcaaccgacgaagacaacgtatggacgcaaggcatactatgcttcagcgatcagcctctgagtgaagtaatagcaaccctcgctcgctatcgaagcggtatattacgctgcgacccggccgtttcctcattacggttaagcggtactttcccgataaaaaataccgatacgatattaaccgtcatagagaaaacacttcccgttaagattcagtatattacccgttattgggtgaatgttctgcccgcagaaaaatcgttaacgtaa

SEQ ID NO: 9360 - DNA, 522 bp, Photorhabdus luminescens
atgtctgaccgcattgttgtttccgctgagctaacgtttgaatcgctttacggcgcgcatcatggctggctgaaaaactggctcacacgcaaattgcaatcgtcttttgacgccgatgacgtagcgcaggataccttcctgcgtgtgatggccggcgactcgctacaagccattcgcgaccaaaaatccttcctctgtacgatcgccaaaagggtaatgattgatctgtttcgccgcaacgcgctggaaaaagcctatctggaactgctggcgcaacggcccgaggcgtttatgccctcaccggaaatccgtcagtgtcaacttgaaacactccagcaaatcgaccagatgatcgatggcctgagcaacaaaacgcgccaagcgtttttactgtgccagcttgaaaatctgacctacagcgacattgcttcacgcctcaatgtgtctgtcagttccgtaaaaaaatatatggccaaagccaccgagcactgcctgctgtttcgcctggaacatggactctga

SEQ ID NO: 9361 - DNA, 165 bp, Photorhabdus luminescens
ttgcggaaaagcgccttcgtcgattttatgaagacactggtgatgctcgccatgactcagttgcttgaatcgggtcatccggcgttggtttgcacaggaaaagcgcttctcttaaactggaaatcgggtatctttctgtttcggtcagttatgtataggccatag

SEQ ID NO: 9362 - DNA, 1014 bp, Photorhabdus luminescens; identical to SEQ ID NO: 7370

SEQ ID NO: 9363 - DNA, 276 bp, Photorhabdus luminescens
ctgaattcgttaaaaagcatagtaaaggggatgcggatcaccaacgttatcgctgtttctcctgcaaccaaatctttcaacttgaatatgcctatcgagcgtgccattgctcatatatttggaacgagaaaacgttcaggaaacttctcaagaagctcgcctcgttcaatgttgtgttctggtgtactgataatttcaagacttacaatctattaccaaaaagccagcatcgcgccggaaagatttttactcaacatattgagcgagagaatttaa

SEQ ID NO: 9364 - DNA, 327 bp, Photorhabdus luminescens
atggagtttttgatgatactaaattacctctatgaagaagaatcaataagctggatagttattggattttttgctgcatgggggggagtggtgaagtatctgatggacaggcaaaaagctgacagaaaatggaattgggttagtgttatcaaccaaattgtcatttcaagttttactgggctattaggcggcttgttgagtttagatagtggtgccagtcattatatgacactcataattgccggactttttggtgctatgggcagtcgtgtattggaaaatctgtggcaacgttttttcattacaacaggagaaaaagatggttaa

SEQ ID NO: 9365 - DNA, 1026 bp, Photorhabdus luminescens
atgaaaatatttattacatcagaacaaaaaatcaaacttgaacgtcttcacgacaccactcgtgatggtcaggtacgagacagaataaaagctatccttctggcttctgaagggtggagttctgtgatgatagcccaggcattgcgactccatcagaccactgttgaccgccatatcagtgattaccttaatcaaggtaaacttaaatctgataatggagggtctgatagtttgctttcccgagaacaaactgattttttaatcaatcacttatctcaacatcttttccatcacacccatgaaatcgtggcctatgttgctcagctctggaatattacctttagcattcccggcatgaataaatggctacaccgtcagggtttttcttataaaaaaccttgtggcgtccctcataaattcgacgcagaaaaacagcgacaatttattgaatattatgagaatcttaaagtcacagcgaaagacgaacccatcctttttcttgatgctgttcacccgactcaaggcaccaaactcagttatggctggatgcgaaaaggcgagaaaaaaaccgtcaaaacaacaggaagccggactcgcctgaatatattgggcgccctcaacctgaatgccattggtcgtacggtgttccaggaatatcagaccatcaacgactacaacatttgctgttttttcaatgaaataagaaagtcttatcctgactatcatcaaaaaattcaccttattgtggatggagcgggttacaacaaagctcatcttgtgaaggagtgggcttatgttagcaatattgagttacattaccttcctccctatagtccaaatttaaacccgatagaacgattatggaaggtcataattaaacaggttcgaaataaccgttatttcgcggataaacatgaatttcgagacaacgtcttcaaatttttcaccacaacgctaccggatatagcggactcgctgatgtctagaattaacgaccattttcaggtgctaaaaactgcatcttga

SEQ ID NO: 9366 - DNA, 435 bp, Photorhabdus luminescens
atgccagtcaatcagattggcttacataatgaaaaggtgaaaaatatgagaaaaataacagttgataatgatgtggtaggacatgatactgaaatcaactcggttgtttcatcaactgcggagaaaattcgccaacagtttggagtaaaggtcgaccctaattcaagtcaggaaaagttctacattgcaacaccgattattcctgaatcccgaaagaatatcgttgtaaccaatgaaggtctcgccgatgttatcacggcgaaatattactggtcacattcttttacgtcagaatattttgaggataactcagttgatgtcaaggttggagagagcaaagtgttggttgccccttcaaacccgttgtattacagcaaagtagtcattttcaacaacactaaatccgtggcatttgtaacagtaagagaaaaataa

SEQ ID NO: 9367 - DNA, 1254 bp, Photorhabdus luminescens
atgagcgatattgttaagtataacgatgtaagtgcaccgatcccttatgctgtttattcaaatgccgtatatgcatttgagtgggattcatctgctattctaaagcaagccgtcgtcaagggattgtcgtatgtaccacatgtagggaaatatctttcttacattgttggttttttttggaaagataaagagaaagacatttggcaggaggttgtaggaaaagttcaacaactggttgaagatagtatattaaaagcagttaaaggtatactctcaggtaacatcaatgaattaaaagaaaaaatgaatgaggtaatccgttctctggagaagaatttaggtacccaagaagcaagggatgactacatgcatcttgccaggagtatggttggaaaagaagctagcttgatttttcatgaaaataagacaaattttcacatattgccgatgtattccacacttgccctgatgcagattatgtattggactgttggcattgagcgtcgcaaggaaatcggattgagtgatattgaagtcgagaatctaaggtcatatatcaaaaagttagttagtgatgcagagcatcacgtgaatagagtttataagttagaacttgatagtgtagtgtcagactctgatgttaatcgcgtggctgataatatcatgtatgtccatggatattgtcaaatacatggtctggaatatatggacatcattaaaaatatccaatccagaggtaataatattactgggttttatccgagaactatcagctactctacattctttggttcgccaacaagtgatgcgcgtattttggcattaaggccagagaaggatatgccagaaccgttcaaacccaaatttttaaatgaacggtttaataaaattgcatcggtcaaagggtacatagtacgaattggtggcgctaaacgtgttggggggctggagataacatttgagaatggcagcaagtatcaacagggccaagcaacgaatgagcatgaaatcgtcaatctcaaaggtaatttgattaagacgttggaagtatgggggaatggggccattgatgaagcaaaatttacattaacgaatggagatgtgttgacaataggtcaacgtaattcctctaattaccgtaagttctctcttgatggtcattatatttgcggggtgttcatcgcaaatgatcgttctggactggctggtcaagcagctaatattgccgtttcttatcaccaattagttgagtaa

SEQ ID NO: 9368 - DNA, 165 bp, Photorhabdus luminescens
gtgtttggcacttgtgcccgaaatactcattccattgagaaatatcagaatctcctgggttccgaactgttctctacaaactcgccgacgcctgcggctccggtgtgtactgctgaatggatatttgccagtgtgaccattcagacgctgctgcctgctagctga

SEQ ID NO: 9369 - DNA, 546 bp, Photorhabdus luminescens
atgaatatcgggaagttggagtcagccatagtagcaatgaagcgagtaatgaccgtggagcgaagggctggcagacagatcgaacgtaagagggcaacaatgaccgtacacagcaacgacgggttattatggttaacaaaacttgagcgtataggtgagaagtcagcaggtaacaaacaacttgtgttcaataacttggggcacctgttgaacagtgacatgctgaaagggcaatttctgcggcttgacgggaataaagccgtgggtatcgatcgcatgacaaaagccgcttacggtgaacaccttgatgagaatatacaaaatctcatcctgcggatacgcagagggacgtaccacccgaaagcagcccggatcactgaaattccaaaagaggacgacagtaagcgaccactggctatttcgtgcacagaggacaaacttgtccagcttgcggtcagtgacatcccgcaatgttcgcggatgtccgcaaggttcaatcctgtcgccggtactggccaatatctacctgcatcatgtaatagatga

SEQ ID NO: 9370 - DNA, 225 bp, Photorhabdus luminescens
gtgacatcccgcaatgttcgcggatgtccgcaaggttcaatcctgtcgccggtactggccaatatctacctgcatcatgtaatagatgaatggtttggtgaaatcagccgttcacatattcacgggcgggcagagatggtgaggtatgccgatgacatggtattcaccttccagtatcccagcgaagccaaacgtttctataaggtgctacccaatgaaaaatag

SEQ ID NO: 9371 - DNA, 207 bp, Photorhabdus luminescens
ttgtggcaacagatgataaatcagcctcgacctcaattggcaccagctgtcaccagtatgaaattattgatgaccccacatactgcacagacatccggtgcagcaataaaagaccattaccgtgaggcgcgtgccgatgaaggggatcacgttgacggtcggcgtgttcttcgacggaacgggcaacaaccgaacaaactcatatga

SEQ ID NO: 9372 - DNA, 1563 bp, Photorhabdus luminescens
atgaaggggatcacgttgacggtcggcgtgttcttcgacggaacgggcaacaaccgaacaaactcatatgaccttcagctagcctatagcaactgtagctcccttgcgggtgaggaacgggcaaaagcatgcgtggaatatgagcggcgctcaaaatctggtttgggcaatcagagctatcagggcgggctcaccaatattgcgcgcctggaccatctttataaaactgatacagtcctcaaagatgagcagacagaggcgcaggttaaggcctatatctccggcatcgggacggcagacggtgaaagcgatgcagtgttcggaatagcgttgggcagcagtctgataaagcagtttgaaggggtggtgacgaaaacgaacagggctcttgatgagatcgtttctgcactgggtgagttcatcaggcgtaaccgtgatcaagcgacgatagaaaaggtgcaatttgatgtgttcggattcagtcggggggcggccgcagcgcgtcattttgccaacagagtgatgaaccaggacgcggcgatagcttccgcgatagacagggggctggatacgcacaaccaccacggcaaaccttccggggaggtgcggtttctggggctgtttgacacggtagcggccataggccacctactgaacttctacaacatcaacgggcgcaacaaccccggcgtaaatcttgagctgcggccatccgtggcgcagaaggtgtttcagataagcgcaatgcacgaatgccgtcataacttcagcttgaatagcatcgcggggatgtggccggagctgatgctgccgggtgtgcactcggatatcggcggcgggtacaacgcggaggagaatgaggacacgctactgacgatgccgaattttgaggtggttcgcgacgacatggcagaaaccagcacggcgatttaccggaaaacggaggctatgcgggaggcgttgtatcagcttcccgcgctgaaataccagctgccgcacggagaggtaaaaacgcggatgatagcatggccgctggtcaaccgggacaaggcgcgggagcatatttttgagaagaaggtgggcgcagcggtgtttctgacccgcaagagtatcccgaatgactgggaaaaggtgtgcatgcgggtaatgctggatgcggcacaggacgctggcgttattttttccccaatactcagcagtaacaaggagttgcaactgccttcagagctgacccctctctgtgagaaagcgatagcacagggacgggctgtgcggcgaggagagacgccagtgagcttcaccaccgatgagctgcacatcatcgggcgatacctgcactgttcggcgaactggaacatcgattcagaccggagcctgtgggtgagtccatccacgggcgaggtttttctgcggcacaattacgcgccgacggatgggcgttcgtttgtatggccaaatgcaccgggtaaagggtgggtgcggacggtgtggaagatggacgaccaacagcagtgggaagaacgggtaaaggtgaatgcagatgagctggacgggcttttctga

SEQ ID NO: 9373 - DNA, 123 bp, Photorhabdus luminescens
ctggctgtggtactggatttatactgtcgtcatgttgctggctgggcattatcagcaaagcccgatgcggatttagtggttaaagcacgggacatggcatacgaacaacgcgacagaccgtaa

SEQ ID NO: 9374 - DNA, 201 bp, Photorhabdus luminescens
atgacaagacaacgtcgtacgttttcttcagcggacagcagaactttactgggcatgatgcgtactctggggtaccaaatggggcgtttcaaggtcagaagcctgatgaaagaggccgggatagtcagcaagcagccaagcccacacagttataaaacagcccggattgaacgattggatatcccgaatcatctacgttag

SEQ ID NO: 9375 - DNA, 225 bp, Photorhabdus luminescens
ttgtttttaccacttataacacttgctttttcactaactgcctatcccaatagagctattttatttgccattttgaacctgggcagtgctcaaaatcctcacgtactacgtgtacgctccggtttttccgcgctgtccgtgttcaaactgtctgcaacaattacgcctattgagataggctctaagtttaatcattatgagatatcgtactttacgtttacctaa

SEQ ID NO: 9376 - DNA, 150 bp, Photorhabdus luminescens
atgacgatggtatggctttggttgaaagataaaagcgataccaccaacaaaccaagagacgaccttaaaaagaatggtatttcactggattggattaatattgtcattaataccattcatacaacgatggtgaaagcgccaacggattaa

SEQ ID NO: 9377 - DNA, 753 bp, Photorhabdus luminescens
atgttacatctacttgcatggcctgatctgtttatttgcatttttgtcgttttctttgcttatctggtttttgggatggccgggtttggttctgctcttattgctagtccagttctggcattttatattcctgtagcgaaaattgttcctgtgctcgcgttggtagatttaaccgccgcagtgattaatattactagagagggtaaaaaatcagagtttagtgagatcaagttaattattccattaatggttgtcggtagcttgattggtgctgccattctattgatggcccgacctgatgttttagttctggtgttgggggtatttgttgttttctattcactttattcactatttttcagtaaaacctaccgtcaattccccgctaaagccgctattccatttggtctgagtggaggtattttcagtgcgttatttggtagtgggggttttctttatgccatttatctaaccgggcggatatcagataagcaaattttcaggatcacccagacgactttaattggtttcagtaccctgacgagagtgattatttttgttgtcatgggtatttatctggatacctcatttttgttattgatattggtatttattccagccatgttgttgggaatctattttggccgtcaggtgactctgaaaatctccagagaaacattcttgaagtttatcaatgttattgtattggcttcagggttaatgctgatatatcgctatatatttactttctga

SEQ ID NO: 9378 - DNA, 1197 bp, Photorhabdus luminescens
atgaacagtcgtgattatagaaataataatttttttgccatttttactattacctcaagtgtcgctgttattggcattgtcattggtttgactatcccaatgatagcgttacgcttgaatagccaaggtattgatgagttgtacattggtttaatttctgcggctccggcattgggggttcttttgagtgctccggtcgtccagaaaattgtagctctggtaggtaagaaacacgtcatgatgattgcaacaggggtttctgctggcagtttgctcccacttttgggctcgttgccgatggagttgctttttcctctgcggctagttactggtgctgctagcgggttaatgatctgtctaggtgaaacctggattaatgaactctctgaagagaataaacgaggcagggtactggctgtttatacgacggtttttactgttagtcagttgcttggcccttctattattgctttttatggtatcgcagataaaacgccgatactgatttgtactctgattcatatcttttcactggtgctctttgtcatggtagatcagaagaaaggcgatgagttaccgcaatacggtaagaaatccaatttctctattgttcaatttgtgaagattgcaccggcgatctgtggtggtgtgctatttttttcctttttcgacgggactattctttctatgtttcccatctacgggatgagttgtgggtataccgaagcggtagctgcattgatgataagtgtcgttcttgctggtgatgcagtgatgcagctcccgtttggttggttggcggatcatatgaatcgtatgcgcctataccagatttgtggtgtagcaacgctcggagcaagtgcattattaccgtttgttatgacatatcagtatcttatctggcctttgttgattgttttaggggcaactgccggggctatctacaccattgcattagtccaaattggtcagtatttttcaggaaatgatctgatagtggctaatgccgcggcggctatgttgtggggtattgggagtttgtttgggccactgcttgccggtatagcgagttcagtgacgccatcaggtttacctattctacttgtcgtcattgcagcgctatttctgatttcaacaatggatcggtttaatccacaaagtaataaaagtgataaaagtgaagtgttcagtcgatag

SEQ ID NO: 9379 - DNA, 1371 bp, Photorhabdus luminescens
atgaacataatgcaggggaacgacatgtttggcattcaggcaccagttaaatgcaaactggacaagtattttaaattgactgaacgtggcacaacggtacgccgtgaaattctggcagggatcacaactttcttggcgatggtttattcagtcatcgttgtaccgggaatgttagggcaggcggggtttccccatactgctgtctttattgcgacttgtttggttgccggttttggttctttgttaatggggctgtgggttaacttgccaatggcaattggttgtgcaatttcgttgactgcatttaccgcttttagtttggttttaggacagcaaattactattccggttgcactcggtgcggtatttttgatgggatgcttgtttacggtgatttctgttaccggtattcgttcttggattttacgcaatataccaatgggcattgcgcatggtgcagggattggtattgggctgtttttgttactgattgcgtcaaatggtgttggtctggtcattaagaacccgctggaaggtttgcctgttgctttgggttcgttcacctcttttccggttatgatgactctgcttgggttggctgttatttttggcttggaaaaattgaaagttcccggtggggtgctgttggtgatcgtggtgatttcagttattgggctgatttttgatccggcggtgaaatatcaagggttctttaagataccaagtctgggagatgatggcctgtccttgatttttagtatggatattatgggggctttgcagccaattgtgttacccagcgtgttggcgttagtcatgactgcggtgtttgatgcgaccggtaccatccgtgcggtagcagggcaagggaacctgttggataaaggtggacagattattaacggcggtaaagcgctgactgccgattctgtcagtagtatttttgccggtgctatcggtgcttctccggctgcggtatatatcgaatcagctgcgggtaccgccgcaggtggcaaaacaggtttaaccgcaacagttgtcggtattctgttcctattaattttgttcttttctccactttcctatcttgtaccagcctatgctactgcgccagcgctgatgtatgttggtctgctgatgctgagtaatgttagaaagctggatttcgatgattttgttggggcgatgtccggtatgctgtgtgcggtctttattgtgctgacctgcaatattgtaaccggtattatgttgggtttcagttccctagttgttggtcgtatctgttccggtgaatggcgcaaattgaatatcggtacagtggtaattacgatcgctttagtagcattttatgctggtgattgggctatttga

SEQ ID NO: 9380 - DNA, 1650 bp, Photorhabdus luminescens
atggaaatattctttactattctgatcttgattttggtggtttcagtttctggtgttctgactaaagtgattccgttccgcatacctctgccgttaatgcagattgcaatgggagcattgctagcttggccacactttggcttacatgttacttttaatcctgagttatttctcgttctgctaattcctcctttgttattcgttgatggctggaaaatgccaaccagagagtttttccagtatggacgggaaatttttatactgatgctggtattggtgctggttactgttgtcggtattggttatctgatttactggctgatgccaggtattccgttaattgctgcttttgcccttgctgctgtgttatcgccaacagatgcggtggctttatcatccattgttggaaaaaggcgtatgcctaagcgcatgatgaatgtgatggaaggggaagcgttaatgaacgatgcttccggcctggtagccttaaagttcgctgtcgcgatagcaatgggaacgatggcattttctgttactggcatgaccatagaattcttcaaagttgctattggcggtttgttatccggtattgcagtaacctggttgtacagtaaatccctgcgcttaatgaatcgttggagcggtggcgatccggcaacccaaattgttttcatgttgctgttgccgtttgcttcttatctgattgcagaacatattggcgtttccggtatccttgcctcggttgccgcaggtatgacgatcagtaaatctggggtcatccgtaatgctccgttggcaatgcgtttgcgtgctgatagtgtctggtcaatgctggcgttcgtgtttaacggcctggtgtttatcatgttgggcctgcaattgccggggatctggcaaacttccgttatacaggcagaaattgatccaaccgttgaaacctggatgctgttcgccgcggtggcagtgatttatggcgcccttttattactgcgtttctgctggttatggctgatgaagaatatcagcaaagtttttatgagaaaaaatccactgaattttgcgacttataccacccgtgaattgtggctggcatcttttgccggagttcgtggtgcaatcactcttgctggtgcactgtctgttcctctgtttttggcggatggtacgccattcccggctcgttatcagcttatctttattgccgcaggggtcatcctgttctcgttgttaattggtgtcctctctttgccattcctgttacggggaatgcaaacttccgataaggaggcagatatcagtgaggtacgaatggcgcgggccgctatggcggaagtggcgattgtcagtatgaataagatggaagagcgtctttctgctagccccgaagagcagttggatgctgaggtgattactgaggttgcttccagggtcattggctatttgcgtcgccgtactgtggggcaggatgagatagaacataatctgctagtggaagatttggaacgtcgttttcgtctgacggcattaagggcagagcgtggtgagttatatcatctgcgtgcaactagaaaaattagtaatgagacacttcaaaccttgctgcatgatttggatttactggaagcgctactggtacagaaagagcattga

SEQ ID NO: 9381 - DNA, 936 bp, Photorhabdus luminescens
atgatcgaaataaaacatctaaaaacattacaatcattgagtcattgtggttcattagcggcagcagccaatcatctgcatcaaacacaatccgcgttgtctcatcagttcagcgatcttgaacatcgccttggcttccggttgttcattcgtaaaagtcaaccgcttcgtttcacgccacagggtgaagttttattacgactagcagaacaagtgctccctctggttcaaaatgcactgcgcgaatgtaaagagccgggccaaacaaatctgcgtatcgctattgaatgtcatagttgtattcaatggctgacacctgcactcaagcatttccgagaaacctggccacaagtcaatgtggatttcaaatccggcgtcacttttgatccacaacctgcattactgcaacgagaattggatgtcgttttgacatcagatattctccctgagagtcatttacactacacaccgctatttgattatgaggtcaaactggttgttgctccggatcatcctctggccaataaactgcacatacagccaaaagatttaattgatgagacattgatgatctatcccgttcaacgtcagagattcgatatctggcggcgtttcttgcagccggcgggggttgtccctacgttgaaaaatgtggataacaccctgttactgatccaaatggtcgctgcccgcatgggaattgcggctctgccacattgggttgttgagacatttgaaaggcaagagttagtggtcactaagacactgggagaaggtttatggagcaggctgtacgctgccgtccgtcaaggcgaacagcaccagcctgagactgacgcatttatccattccgcacgtcaacacgcgatggataatctgccattcgtaaaaggaatttcaaaaataagcgtcgatgacctcataacaacacagtaa

SEQ ID NO: 9382 - DNA, 2277 bp, Photorhabdus luminescens
atgacgactattaatcacacacttggctttccacgtatcggtttgaaaagagaactcaaaaaggctcaggaaaattattgggcagggaaaatttctcagcaagaattattggaaactggccgtgagttacgtgcccgtcactgggaacaacagaagcaggctggtgttgatttagtgccggttggtgatttcgcttggtatgatcatgttctaaccaccagtttactactcggtaatgtgccaccgcgtcaccagaatccagatggcacgattgatctagatacactgttccgtattgctcgcggtcgtgcgccaacgggtgaacctgctgccgccgccgaaatgactaaatggtttaatactaactaccattatatcgtgccggaatttcagcaagggcaggaatttaagctgagttggactcagttactagaagaagtggatgaagccttatctctgggccatcaagtgaaacccgttttactggggccgataacttatctgtggttgggtaaagtgaaaggtcaggtatttgatcgcctctctttattgcaagatattcttcctgtttatcagcaagtattagctgagttagctaaacgtggtatcgaatgggttcagattgatgaacctgcgctggtactggaactgccagcagagtggttgacagcttatccgattgcttatcaggcacttcaaggacaggttaaattattgctgactacctatttcgatagcattggtcacaatctagaaacgattaaatccttgccggtacaagggctacatgtggatctggttgctggtcaggatgatatcgcgcaactgcatgaatcattgccgaaagagtgggtgctttcccttggtgtgattaatggtcgtaatgtatggcgtgctgatttaaccgctaagcatcagctaattaagccattggtaggtagccgcacactgtggatcggttcttcctgttctcttctgcatagccctattgatctgagtgatgagactgcgcttgatgcagaggtgaaaagctggtttgcgttcgcattgcagaaatgtgaggagttagctttgctgactgcggcattgaatcagccagatggcagtaaacaagcagaattggatgcttacagtgcgccaatccgtgctcgtcgtgaatctaaacgggtgaataatcaggctgttactgagcgccttgcggcaattaatccacaggacagtgagcgtaatcagccatacctacagcgtgcggaaatacagcgtcagcgctataacttgccattgtggccgacaacaaccattggatcattcccgcaaacgacggaaattcgtggcttgcgtttggatttcaaaaaaggtcgggtagatggcaccagttatcgtaccaatatctgtgaacatattaagcaggcaattaacgaacaagaacgtttaggattagatgtattggttcatggcgaagctgaacgtaacgacatggtggagtacttcggtgaacacctcgacggttttgtctttacgcagaatggttgggttcagagctatggttcccgttgcgttaagccaccagtgattattggtgacgtcagccgtcctgaagctatcacggtagaatgggctaaatatgctcaatcgttgacggagaaacctgtcaaagggatgttaactgggccggtgacaattctctgttggtcattcccaagggaagatgtcagccgtgagacgattgctaaacagattgcattggcactgcgtgatgaagtggacgatttgcaagaagcgggtattggtatcatccagattgatgagccagcattgcgggaaggtttaccactgcgccgggaagagtggcaatcctatcttgattgggcggtagaagcatttaaattgaatgctgcaattgccaaagatgacacacagattcacactcatatgtgttattgcgagttcaatgacatcatgccttccattgcagcattagatgcggacgtgattaccattgaaacttcccgttcagatatggagctgctggattcatttgaaaacttctcttatccgaatgagattgggccgggtgtttatgacattcattcacctaacgtaccgagtgttgaatggattgaagcactgttacgtaaagcggctgatcgtattccggtcgaacgtttgtgggttaacccggattgtggtctgaaaacccgtggttggactgaaactcgccagtcactggcaaacatggtacaagcggcgaaacgcctccgtgaatcagtgaaataa

SEQ ID NO: 9383 - DNA, 834 bp, Photorhabdus luminescens
atggatgttaataagttgcaaggtaagaaaagtagctctcgaagaaattttttaaaaagtagtgctgttattacggcgacagctgcacttgctccgatgaatttagctcgtgcagaagaaaagttatccccacaacatggaataggcgtatgtacgcttgcgccagagcagatatcagggccatatttccgaaatgacaaaattgtaagaagggatattactgattcagaattaggaataccttttttattgaagattactgtcatagatgaaaaaacatgtaaacccgttgataatttatttgttgatatttggcattgtaatagtcgggggaaatattctggttggagttatattagccccgatgtagtccctaacgttgctggagtagcttctatcaatagaactgatgataaaaattttctaagaggagctcaaccatcggataaaaatgggatagttaattttacgactatttatcctgggttttatgcgggtagagcgactcatattcatattgcaatcagaaaattaagcacaaatgtggatgacaaagagcactttgcttttgttggtcaaatgtattttccagaaggaatcaatacagaggtttataaatatgatctgtattcaaagcggagggtaatcagaactaaaaataatgaggatgaatattttaaaaatatgaatggtcatctttcagaaataaaagtaacaaaaatagatgaatatgatattaaccgtgggatactaggtgaaatagttctatcaatagacttggaaagtatatctaatttcataactaaagatgacttatattcccatacggtataa

SEQ ID NO: 9384 - DNA, 657 bp, Photorhabdus luminescens
atgacgacacaaaaaacagttttaattacaggtttcgaacctttcggtaaagaaacgattaatccatcctgggaagctgctaagcaattacaggggcgagaattatgcggagcccgcgttgaagcgcgtcagcttccatgtgtgttcgacgtctctctggcttgtctgtatgctgctattgatgatgtacaacctgatctggtcattgccgtgggacaggcaggcggcagaccaaatattactgtggaacgcgtggcaattaatatcaatgatgctagcatccctgataatcaaggtaatcagcctatcaatacccccatcgtcgcaacaggccctgccgcctacttcgccacgttaccgatcaatgcgatagtcaagggtttgcgtgatgcaggagtgccagcctccatttcacaaaccgcaggcactttcgtctgtaaccacgtcatgtatggcctgttgcatcatttggcatgcatctatcctgaaatacgcggtggagttctccatatcccttatctgcctgagcaagcagctcggtattcaggaacgccaagtatggccctagaaacagttataacagcgctggaaattgctatcgatgaagcattaaaaaacagtgaagatatcgccaataatggagacacagctcattaa

SEQ ID NO: 9385 - DNA, 756 bp, Photorhabdus luminescens
atgtctgatgtatttcacttaggtctgaccaaaaacgatctgcaaggcgcaactttagctattgttccgggtgatccgaaacgtgtggaaaaaatcgcaagattgatggataacccagttcatctcgcttctttacgtgaatttacgtcatggcgggcagaaattgatggtacagcagtcattgtatgctctacgggtattggtggcccgtcaacctctatcgcggttgaagaattagcgcaattgggggtacgtacttttttacgtatcggcacaacaggcgcaattcaggaaaatatcaatgttggtgatgtgttggtgactaccgcagctgttcgtttggatggtgccagcctgcattttgctccgatggaatttccggcggttgccgattttgagtgtacgacggctctgtacgaagcagcaaaagatttaggtgtaacagtacatgtgggggtaacggcctcttccgatactttttatcccggtcaggagcgttacgatacctattctggccgtgttgtgagccgtttcaagggctcaatggctgaatggcaggcaatgggggtcatgaattatgaaatggaatcggcaactttattaacgatgtgtgcaagccaaggtctacgtgcgggtatggttgccggtgttattgttaaccgtactcagcaggagattcctaatgttaaattacttgagaaaacagaaagtaatgcattggggattgtcgtagaagctgctcgccgtttgctgtaa

SEQ ID NO: 9386 - DNA, 783 bp, Photorhabdus luminescens
atgatcacaacatctttattacatccatcagtgcttcctctcaatggagggattaattttcgtgatttaggcggtaaaaaagtcgcgagtggtggaaaaatcaaatcaggtttacttttccgttctggttctctggatcgcttaacagaaaaagaccaatctttcctggcaaataaaaatctctttcaaatcatagattatcgtgataccagtgaaatagaggataaacccgatttggtatggaatggtgctaattatcatcatgctccggccaatcccttatctgatgaagtgaatgcaaatctggaaaaattggcgtcagagatgttggagcaatttaatcctcaggcatttatgtttcgtctttatgaattattgccgctaaaaaattcagcctataagacattagttaacttactgcaacaaccggaaaaaggtgggatagtccagcattgtgcggtaggtaaagacagaaccggtgtaggttctgcgctggtattatttgcattgggggctgatttggatacggtaatggaagattatttagtgactaattgcactctggctccttatcgtgaatatttgttaaatgagcatgcgaaaactatgagtgacgatgtggttgataaattcgcttatgtttattccgtgagagaagagtttttaatgacggcattaaacagtattaaccagcattatggcagtgtagatatatggctggagaaagatcttggtcttgattttactgctcgtaagaaattacaagattatttccttgaataa

SEQ ID NO: 9387 - DNA, 591 bp, Photorhabdus luminescens
ttgccgtcgcgatgcatcttgaaatccataggggatattgatcaatataggaatatgaatttgagtcttcatgaaatagttgatctggtaatcgcttttgttaaagctcatgatacctggatcatgccgattgttttcttgcttgcttttggtgaatctctggcttttttctccttgttattaccggcaacaatcatattgcttggattgggggcattaataggtgaaagtggtcttaatttctggccgatttggttggcggccgcagcaggggcttttttgggcgattgggtatcttatattgtaggtgcttattttaaaggtgatgttggtaaaatttggccgatttcccgtaaaccacaactactgacacgagtgcaccatttctttgagcgttggggtatttggagtattttctttggtcgattctttgggccattccgtgcaattgtgccattagtcgcgggtatttgtactatgccattgcgttattttcagatagcgaatatctgttccgcacttatctggtcttttggcgtattagctccaggcgcgtttggtttgcaatggttagtgaaatgggtgagctaa

SEQ ID NO: 9388 - DNA, 1356 bp, Photorhabdus luminescens
gtgggtatccagttgttatatgcgttgataggtgctcttggtggcctattgggcggtggtattctcgtttggttctccgttcatcaacgtattcaacagcaagagctggaattacggaaattggacagccagcttgccgttgctaatgagaaaattgaacaatccgcttattggcgggttgaatgcgaacagttaaaccaagagttgcgggctcagagagaagtcaatagcgtacaagaatccgaactgcgtgaagtgacgacacgcttggaagagagtcgccttgcggctgaagagaaacagcggttgctgatcaacagtgaactacgtttgaatacgcaatttgagaatttggctaatcgtatttttgaacaaacgggtcgccgtactggtgaacaaaatcagcagagtctcaatacgcttttagcgccatttcgtgaacagcttgatggtcttcatcggcaggtacaggagagttttggtcaggaagcccgtgaacgtcatactcttgcacatgaaatccgtaacttacagcaactgaatgcccagatggcgcaggaagcgattaatctgacaaatgcccttaaaggtaataataaaattcagggagattggggagaagttgtgttatcccgtattctggaagcctctggtttacgagaagggcatgagttttgtactcaggtaagtatcaaggtagagggtaaccgccgtttccaacccgatgttattgttcatttgccacaagggaaggatgtggtcattgatgccaaaatgtcgctggtcgcttatgagcgttattttaacagtggcgatcggcatcagcaggagttagcccttcaagaacatatcgattcaattaaaggccatattcgtggtttgagccgcaaagattaccaacagttgcctgggctgaaatcgttggactatgtattgatgtttattccggttgaacccgcttatttggttgcgctgaacaaggcacctgagctgcttgatgaagcacttaaacacaatattatgctagttagtccatcaacattgttggttgctgtgcgtactattaataacttgtggcgctatgagtatcaaagtcaaaatacgcgcttaatcgccgataaagctgctcgcatgtacgataaaatgcgcttgtttgtcgatgacatgcaaggtttggggcaaagtctggataaagctcaacttagttatcgactggcaatgaaaaagctgactgaggggcgtggcaacctgataagtcaggcagagagttttcgtaatttaggtgttgaggtgaaacgtccgattgatcccgaattggttgataaggccagccaaccattctgtgctaatgattaa

SEQ ID NO: 9389 - DNA, 756 bp, Photorhabdus luminescens
atggtagaccaaacgaaacaaaccacacattttggtttccgtactgtagcaaaggatgaaaaagcaggcatggtggccgaagtgtttcattctgttgcagcgaaatacgatttaatgaatgatttaatgtcgtttggtatccatcgtatatggaaacgtgtggctattgatgctagtggggtgcgccgaggtcagaggatacttgatttagctggtggtaccggagatttgaccgccaaattttctcgtatagttggtgaaaaaggcgaagttgttcttgctgatatcaatgaatctatgctgaaggttgggcgtgagaaattacgtgatgttggtattgttggtaatgtcagctatgtgcaggctaatgcggaagcgttgcctttccctgataactattttaattgcatcactatctcttttggtttgcgtaatgttactgaaaaagaaaaagccctgcgttctatgtttcgggtgttgaagccgggtgggcgtttattggtacttgaattttctaaacctttgttcgcgccattaagcaaagcgtatgatgcttattctttccatgtgctgccaaaaattggtcaggtttttgtgcaggatgctggcagttatcgttatttggcggaatccatccgtatgcatcctgatcaggatacgcttaaaacgatgatggaagaggctggctttgaacaggtgacttataccaatatgactggcggcattgttgcactacacagaggttttaaattttga

SEQ ID NO: 9390 - DNA, 636 bp, Photorhabdus luminescens
ctgagtacagttattaattccacacttacgccggttttaaccgcagtgatggaaacatcgttgaattacctgttgtaccgtgaacctgtgttaaggccagcccgtatgcggctggtggacaaagttttgtcgatcgaattaaaagaaatgaatacaccactcacgttggtattcagtgaaaaacaggtggacgtattaagccaatggagcggatctgccgattgtacggttaaaactcacttttctgctttgcttaaattacgggatcgccaacaaatttccaaattgctcaatagcggtgaaatggttattgaaggggatatgcaggttgttcagcaatggtctgctttgttagatatggttgagtgggatttggcccattatctttctccttatttcggggatatcgctgccgaaagtattagtcaagtccttaaaaaaggatttcagtgtgtttccagttcaatggaatgccagaaaaattatctggcggaagcgttaacggaagaatggaaactggccccaaatcagcttgaagtggcttatttcagtgaagaagttagcatgttggccaaagatatcgagcaaatagaacaacgattggcagtattagagggaaaatatgactccaggtga

SEQ ID NO: 9391 - DNA, 1638 bp, Photorhabdus luminescens
atgactccaggtgaattaaggcgcctttatttgatcatacgggtttttctttcttacggattagatgagctaattcctcggattcgcttaacctggcctcttcgttttggtcgttatttattgttctggatcccaaatagacataaagataaatcacttggggagagactacggcttgccttacaggaattagggcctgtttggattaaatttggacagatgctttcaacgcggcgtgatctgtttcctccagcaatagcggatcaactggcattgttgcaagaccgggttgcctcttttgatggtgctctggcgcgtcaatatattgaaaccgctttagggggggcattggaaacttggtttgatgattttgaacctattgctctggcctctgcttcaattgctcaggtccatactgctcggttaaaagagaatggacaggaaattgttatcaaagtcatccgccctgatattttgccgattatcaaagcggatatccggttaatgtaccgtctggctaattgggtaccaatgttattacccgatggacgccgtttacgtcctcgtgaagtcgtgcgggaatacgaaaagacattaattgatgaactgaatttgctgcgtgaagcggctaatgcaattcaactacgccgtaatttcgaaaatagctcaacgctttatgtaccggaaatttattctgattattgccgtgaaaatgttctagtaatggagcgggtttatggtatccctgtttctgatattgaagcattggaagcgcagaataccaatatgagattgctggctgaacggggcgtgcaggtcttttttacacaggtttttcgcgatagcttcttccatgcggatatgcatccgggaaatatttttgtcagctatgaacatcctgaagatccgttttatattggtattgattacggtattgttggttctcttaataaagatgataaacgttatctggctgagaattttattgctttctttaatcgtgattaccggaaagttgctgagcttcatgtggattcaggctgggtgcctagtgataccaatgttgaagattttgaatttgcaatccgtacggtttgtgagccaatatttgagaaaccacttgctgaaatttcatttggtcatgtacttctgaatctatttaatactgcacgccgttttaatatggcagtgcagcctcagttagttcttctacaaaagacacttttgtatgtagaaggcttaggacggcaactttatccacagcttgatttgtggaaaacagcaaaaccgtttctggaggagtggttgcatagccaggttggattgcccgctgttatccgggcgttgaaagaaaaggtgccttattgggcagaaaagttgccagagctacctgaattagtgtatgacagtcttcagcagcataaacatttgcaggtgagtattgagaagttatcaggtcatttgagagggcaacagataaaacagcggcagtcacagtatttacttggtgttggtgcgacattgtttctctgtggcagcttgtttttgctatctggcttagcaaatattccctggttgtttataggcgcgggtaccgtttcatggttgtttggctggtgtcggctgtgtaaaatttag

SEQ ID NO: 9392 - DNA, 261 bp, Photorhabdus luminescens
atgggcggtataagcatttggcagttactcatcattgcggtcattgtggtgctgttgttcggcacgaataaactccgtactttaggttctgatcttggggcatctattaaaggttttaaaaaggcgataggggatgataatcagcctcaacaggctcaaaaaaccagtagtgatgccgattttgagactaaaaacattactgaaaaacaatctgtagctcaatctgaaacatctgagagcaaaaacaaagagcaggtataa

SEQ ID NO: 9393 - DNA, 444 bp, Photorhabdus luminescens
gtgtttgacattggttttggtgagttgctgctggttatggtcattggcttggtggttttggggccagagcggctaccggtggctgtaaaaacggttgctggttggatcagggcactgcgctctttagctgctaacgtccaaaatgagttggtccaagagctgaaattgcaggagctccaggaaagcctgaaaaaagttcaagaagaagcggggttgcagaatttatccccggaactaaaagcttcgatggatgaactaaaagaagctgctgagtctttgaaaaaagcataccaaaatgaacctgatgcagggagcatgaaagcatcagaaataaatgaggtggcacaaaagccggcagcgtctcaggttgtggcttcatctggaccttctgctctagtggatgatcaagcggcttctgcaacgaagaaaaaaacttccgattaa

SEQ ID NO: 9394 - DNA, 783 bp, Photorhabdus luminescens
atggctgttgatgatactcaaccacttatcagtcaccttattgaactgcgtaagcgaattctaaacagtttacttactgtattagtggtttttttagcgttggtttatttttctaacgacatctatcagatgatttctgcacctttgattaagcagttgcctcaaggtgccagtatgatagcgacagatgttgcttcccccttttttacgccaataaaactgaccattatggtgtcaatattcgtatctgcacctatggttctctatcaagtgtgggcatttattgcacctgcgttatataagcatgaacgccgcttgatgatccctctgcttgtttccagtagcctgctattttatttggggatggcgtttgcttattttgttgtatttccgatagcttttggattctttgctaaaacggcacctgaaggagtgctgattgcaacggatatcagtaactacttaagctttgtcatggcactgtttatggcctttggtgtctcttttgaagtacccgttgccattattttattatgttggagtggggtagttacacccgaatctttgaagaaaaagcgtccgtatattttggtcggggcctttgttgttggcatgttgttaacgccgccggatgttttctcgcaaaccttgctggcgattcctatgtatttgctgtttgaactggggattttgctctcccgtttttataccgggcagcggaaattgggggatcgttcagaggaagatgagcaggaagcgccagaagtgaatacggaaaagtga

SEQ ID NO: 9395 - DNA, 1014 bp, Photorhabdus luminescens
atgagctatgcatttccaggaactttccctggtcgacgtatgcgccggttgcgctgccatgatttttcccgccgtctggttgctgaaaaccaattaactgttaatgatttaatctatcctgtatttgtgatggagggcattaatcgtcgtcaagaagtgccctctatgccaggagtgtatcgtctgacgatggatctgttgctgaaagaagctgaagagattgcccggctggggattcctgtattgtctctgttccccgttattgaagcagataaaaaatctctggatgcggaagaagcttataaccctgatgggttggttcagcgtacggttcgtgcgttgaaagatgccattcctgagctaggattgctgactgatgtggcattagatccattcactacacatggtcaggatgggatcatcgatcaagatggttatgtgatgaatgatataaccaaagagatcttggtcaaacaggcattgtcacatgcagaagctggtgctgagattgtggcaccgagcgacatgatggatgggcgtattggtgcaatccgtgaactatttgaaacggaaggacatgtaaatactcaaattatggcttactccgctaagtatgcttctgggtattacggcccattccgtgatgcaatcggttcaaatcgtaatctgaaagggggcaataaaaaaacctatcagatggaccctgcgaatagtgatgaagcattgcaggagattgcacaggatttgcaggaaggcgctgacactgtaatggtaaaaccaggtatgccctacctggatgttattcgcagggtaaaagatacatttggtgtaccaacctttgcttatcaagtctctggcgaatatgccatgcacatggctgctattcagaatggttggttacaggaacaggtaattgtggagtctctgttatgcttcaagcgtgcaggagccgatggtgtactgacctattttgcgaaacaggttgctcaacagttatatgaacagaaacgttaa

SEQ ID NO: 9396 - DNA, 489 bp, Photorhabdus luminescens
atggaaaactggtacctcatttactgtaaacgtgggcaaatttcacgagcaatagaaaatcttgaacgacaggatgttgcttgcctgactcctaccgcgagaattgaaaaaataacccgtggtaaacgtactgtgaatatagaaccactttttcctcattatctgtttgttcagtttgaccctgaaattattcatactaccactatccattcaacacgcggtgttagccattttgtccgttttggtgtacaccctgccatcgtaccggaaacgctgattaaagagatcgtatcagccactgagcaagaatatgtatcaccagatacacctgtggctggtgataccgtattaatcaccgcaggaatttttgaaggattgcaagctatctacaatgagccagatggagaaacccgttctattctgttacttaatattctgaataaacaattacctaaggcacttgataataagcagtttgtaaaaatttaa

SEQ ID NO: 9397 - DNA, 1482 bp, Photorhabdus luminescens
atgaatagtatgaaataccgtgacttaagagattttctaaccttattggagcataaaggtgagttgaaacgcatcagttttgaagttgatccttatttggagatgactgagattgcagatcgtacccttcgcgctggtgggcctgccttgttgtttgaaaatcccaaaggttattcgatgcctgtattgtgtaatttgtttggtactgctgaacgtgttgctatggggatggggcagaaagatgttaaagctttgcatgatgtaggtaagctgctagcttttttgaaagaacccgatcctccgaaaggttttcgtgatttactggataagctaccgaaatttaagcaagtccttaatatgccaactaaacggcttaatactgcgccttgtcaggaacatgtttcggttggtgacgatgtagatttaacccgtattcctatcatgcactgttggccagaggatgctgcgccattgattacttggggactgacagtaactcgtggcccgaataaagagcggcagaatcttggtatttatcgccagcaagtattaggtaaaaataagctcattatgcgctggctatctcatcgtggcggtgcgcttgattttcaggaatggtgtcaggcacatccaggagaacgtttcccagtggctgttgccttgggggctgatccagcgacaatattgggggctgtgacgccaattcctgatacattatcggaatatgcatttgccgggttattaagaggatataaaacagaagttgtgaaatgtctttcaaataacttggaggtaccagcaagtgctgagatcgtattggaggggtatattgagcctggcgagttagctccagaagggccatatggtgaccatacgggctattataatgaaatcgatatgttcccggtgttcactgtgacacatattactcagcgccatgatgctatttatcactcgacttatactggccgcccgccggatgaacctgctgtgttgggggttgcattgaatgaggtgctggtaccgattttacaaaaacagtttcctgaaattgtcgatttttatctgcctcctgaaggttgttcctatcgccttgccgtcgtgacgatgaagaaacaatatccgggtcatgccaagcgggtcatgatgggggtttggtcatatctacggcaatttatgtatacgaagtttgttatcgtttgtgatgatgatatcaatgccagagactggaacgatgtcatttgggcaatcactacgcgaatggacccggtaagagataccgtattaatggagaatactccgatagattatctcgattttgcatcacccgtttcaggattgggttcgaaaatgggaatggatgcaacgaacaaatggctgggagagacgcagagggaatggggacgtcctattgtgatgagtgaagaagtgcgtacccgcgtcgacaaaatctgggatgaattagatattttaggaccataa

SEQ ID NO: 9398 - DNA, 702 bp, Photorhabdus luminescens
atgacaacactgagctgtaaagtaacctctgtagaggctattactgatacggtttatcgggtacggttacttcccgattctccgttctcattccgcgccggtcagtatctgatggtggtaatgggtgagagagataaacgtccattttcaatggcatcaacgccttcagaaaaggcgtttattgaattacatattggtgcttctgaactgaatttatatgcaatggctgtgatggatagaattctggatcagaaagtgatcgatattgatatccctcatggtaaagcctggtttcgtcaaagcagcattaatccgctgttattaattgcaggcggtacggggttttcttatacccgttctatattactgacagcgttggaagaacaacctgaacgccagatctctatgtattgggggggcagagaaccacaacatttatatgatcttgctgaattacagttacttacagagcgctaccctaatttgacggttgttccggttgttgaacagtcagagaatggttggtgtggacgtacaggaacagtgcttaaagcggtactagaggattttggtagtttggccaattatgatatctacattgcggggcgatttgaaatggcaaaaattgctcgcgagcgcttttgtggtgagcgtgatgcttctactgacaacatgtatggtgatgctttcgaattcatttaa

SEQ ID NO: 9399 - DNA, 1167 bp, Photorhabdus luminescens
atggaaaatgtagtcattattgatggcatccgcaccccaatggggcgctcaaaaggtggtgcattccgtcaggtccgggctgaagatctctccgctcacctgatgaaaaagctatttaaacgtaatccggcaatacagcaacacgaaatcgatgatatctattggggctgtgtccaacaaactctagaacaaggtttcaacattgcccgtaatgcagctttactggctgatattcctcactctgtaccagccgtgacggttaaccggctgtgcggttcatcaatgcaagcgctgcatgatggcgctcgtatgatcatgaccggagaagccaatgtcacactgattggtggtgtagagcacatgggtcatgttccaatgacacatggcgtggatttccatcctaaaatgagtctgagtgttgccaaagccgcaggagtcatgggcttaaccgctgaaatgttggcaaagattcaccatatcagccgtgaaatgcaagatgaatttgcgcttcgttcgcaccaacgtgcaacacaagcaacgcaatcaggtgcattcgccaatgagatatcaccaatttatggtcacgatgccgatggcatattgaaacggtttgattacgatgaggtaatccgttcagatgctaatctgaaagatctagccgccctgcgccccgtattcgatccggtaacaggctcagtcacagcaggcagctcttctgctttatccgatggtgcgtctgcaatgttgataaccagtgaaagttatgccaagaatctggggctgaaacctcgtgcccgtatccgttctatggcagcggttggttgcgatccttccattatgggatatggcccggtccctgctacacaaatggcgctcaaaaaagcaggtttagtactaggtgatattggcgtgattgaattaaacgaagcatttgccgctcaatcacttgcctgcctgaagggcctaaatttgttggacagtatggatgacaaagttaacctgaatggtggtgcaattgctctcggtcacccactaggctgctcaggtgctcgcatcacaacaacattgttgaacctaatggaacgccgcgatgttcagtttggcctggcaaccatgtgtatcggtttaggccaaggtatcgccaccattatagaaagaatggattaa

SEQ ID NO: 9400 - DNA, 2187 bp, Photorhabdus luminescens
atgctctatcaaagtgaaacaattcaagtaagctggctgaaagatggcattgctgaactggttttcaatgccccagccgcgattaataaactagataccaaaaccgttgcatctctcgacaaggctattgccagcctagagcaacaaactggattgaaaggcgttttattacgttctgaaaaaaccgcatttattgttggtgcagatattactgaattcctctctttattcgattcatctgtagaaaaactgcaagaatggcttaacttttcaaatagcatttttaaccggatagaagatttacctgtaccaaccatttcagcaataaacggttatgctcttggtggtggttgtgaatgcgttctatctacagatttccgtgtggcctccccggatatacgcattgggttaccagaaaccaaacttggtattatgcctggtttcggtggctcagttcgccttccacgcctgatcgggactgataatgcattggatatcattgccgcaggtaaagacattggtgcagaagaagcattgaaaaacggtttgattgatgctgttgttcccaaagaaaaactggttgattccgcagtatcaatgctggaacaagcaattgcagggaacctcgactggaaagccgcacgccagccaaaattagagcctttgaaactcaatgaaactgaacgaggcatgagttttagtgtggcaaaaggtatggtgatgaaagtcgccggccctcattatccagctcctatcaccgcagttaaatctatagaaaaagccgctacatttggtcgcgatgaagcattgaaacaagaaaccgccagcttcattcctttagcacagacaaatgttgcccgtgccttagtgggtatttttcttaatgaccagtacgtaaaaggactggcaaaaaaacatctgaaagaagtcacaatacctgaatatgccgcagttctaggtgctggaattatgggtggtggtatagcctatcaatccgcccgcaaagggattcctgtcatgatgaaagacatcagccagcaatcccttgaattaggtatgaatgaagccgcgaaacttctaaacaagcaatttgaacgtggccgtctagatgctataaaaatggcgagaaccctctcttctattcaacctaccttaaattatgccggtatcgaacaggcccaaatcgtggttgaagctgtagtagagaatcctaagatcaaagcggctgtactatcagaaactgaaactctggttaatgaagattgtgtcctagcttccaacacatcaacaattccaatttcagaattagctaagtccctaaaacgcccggaaaacttctgtggtatgcatttcttcaacccggtacaccgcatgccgttggttgaagtcattcgcggtgaaaaaacgtctgaaaagacaatttcaaccgtagtcgcctatgccagcaaaatgggtaaaaccccgatcgtcgttaacgactgtccagggttctttgtaaaccgagtactgcttccttatctccttggcttcggtctactattgcgtgatggtggtgatttccgccaaatagacaaaatcatggagaaagaatttggttggccaatgggccctgcttaccttatcgatgttattggtcttgatactgcacatcattctcaatccgtcatggcccaagggttcccagatcgtatgcatcgtgattataaagatgccattcatgttttatatgacaatcaacgttatgggcagaaaaacggccttggcttctataaatatacgcaagataagaaaggtaaacctaagaaagagcaagacgagcaaacagaccaactgctggcaactatctgccaacagaagagtaatttctccggtgaagagatcattgctcgtactatgatcccgatgatcaacgaagttgtccgttgtctggaagaaggtgtcattgccagcccagcagaagcagatatggctctggtttatggccttggcttccctccattccacggtggtgttttccgttatctggaaacaatgggaactgcggcttacgtaaaaatggctgaaaattatgctcacctaggtgcgctttatcaggtaccgcctggtctgaaagccaaagctgaacgtaatgaaagttactactctacagcagcaacgattgctgtcagcaccggaaaaacagcgtga

SEQ ID NO: 9401 - DNA, 1335 bp, Photorhabdus luminescens
atggaaaagttggcatctctgtaccacgaacatatctctacattgcagcaacgtacctgtgaagcattggcccgtaatcaatttgatgctttgcttattcactctggtgagttacagcatatttttcttgatgatagagattaccctttcaaagttaatgcttgcttcaaagcttgggtaccagtaactaaagtgcctaattgctggttgtgggtagatggtattaataaacctaaattatggttttactcgccggtagattattggcacagcgtagaaccgctgccgactagctactggactaaagaagttgaaatgattcatctggcaaatgcaggagatattaattcagcgttaagcacttatgtaaaacagaatgttgcttacatcggttgttcaccgcaaagagcaaaagagattggtttctctgaacgcaatattaatccaaagtctgttcttgattatttgcatttccatcgttcatacaaaacagattatgaactagtctgtatgcgtgaagcacaaaaaacggctattgtcggacatttggcagcttatgaagcatttcaggctgggatgagtgaatttgatattaatatctcttatcttatggcaacaggtcatcgtgatacagatgtgccttataacaatattattgctatgaatgagaatgcggctgttttgcattacactgcattgcagcacaatgcaccttcggatattcgtagtttcctgattgatgctggtgctgaatataatggctatgcagcagatatcacccgcacttattcagcaaaaagtaataatgaatttgcttctttaattaaagatatggatgctgaacaaaaagcgttaattagtacaattaaagtgggaactcgctataccgaatatcatattcagatgcatcatcggattgctaagttgttgaaaaaatatggtatcgtgaaagatgtcagtgaagaagtcatggttgaagaagggctgacaacgccattctttccacatggcattggtcaccctcttggattacaggtccatgatgtggcagggtttatgcaggatgatacaggtacacatttagccgctccggatatgtatccttatctgcgttgtacccgtattctagaacctcgcatggtgctgactatcgagccaggtctttatttcatcgaatcgctgcttgcaccttggcgtgaaagtgagttcagcaaacattttgactggaataaaattgggacgcttaaacttttcggtggtattcgtattgaagacaatattgtgatccatgaaaataaagtggaaaacatgactcgggatcttcaattgccataa

SEQ ID NO: 9402 - DNA, 612 bp, Photorhabdus luminescens
atgaagccttatttgatacccgcagcttcagtgagttttactgaagagattaaaaaaagtcgctttattaccttgctggagcatactgacggggtggatgaggctaaagcgtttatccagcaaatcaaagctcagtaccctgatgcccgccatcactgctgggcatttgttgctggtgcaccggatgattcacaacagttgggtttttcagatgatggggaaccttcaggaaccgcaggtaagccgatactgtcccaacttatgggaaataatatcggtgaaataactgtggttgttgtccgctattttggtggaataaaattagggaccggtgggttggtaagggcatatggaagtggtgcccaacaggcgctgaaattgctggagacaaaatataaggttccacagaaactctgttccttgcagtgtgaatatgcccatatctctatgattgaacagttattacagaaatcatcagggcaaattatttccagtgagtatgcagagaatgttactttgcgaatttcacttccagctaccttagtgggggaagtcggtgataaattacgtgatctaagtcgcggtgtactgtatttaacacctgatctgtaa

SEQ ID NO: 9403 - DNA, 1452 bp, Photorhabdus luminescens
atgcattttcgtgccataacccgtattgtcgggctgcttgtcattcttttctctgtcaccatgataattccaggattggtagcacttatctatcgtgatggtgctgggcgtgcatttagtcagacatttatttttgccttaattatcggtttaatgctttggataccaaatcgggagcaaaaacacgagctaaagcctcgggaagggtttcttatcgttgctttgttttggacagtccttggcagtgttggggctttgcctttcattttttctgaacagccaaatctttctattacagatgcattttttgaatctttctccggtttaacaacaacgggtgctacgacactaattgggcttgattccttgcctaaagcgattcttttctaccggcagatgctgcaatggttaggtggtatggggattatagtgctggctgttgcaatactgcctctacttggggttgggggaatgcagctctatcgggctgaaatgcctggtcccttgaaagacaataaaatgcgcccgcgaattgctgaaacggcaaaaactttatggttgatttatgtgttactaacaatcgcctgcgctttagcgttatgggctgcgggtatgtcagtttttgatgccatttctcacagtttttcaactatcgcaattggtggattttctacacatgacgccagtattggttatttcaatagccccgcgataaataccattattgcgatttttctgctgatttctggttgtaactttggtttgcacttcgcggtattaacgggacgtagcctgacagtatattggcgggaccctgaattccgtatgtttatctccattcaattggtgcttgttattatttgcactctgatcttatggcatcacgctgtttataagtcggggatagagacactaaaccaagcttttttccaggttgtttcaatggcgacaacggcagggtttagcacagatagttttgctcgttggccatcatttttgccaatactgctgttgtgttccgcttttattgggggctgtgcaggctcgacgggaggaggactgaaggtgattcgtatcttactgctattcctgcaagggtcccgtgaattgaagagattggttcatccaaatgcggtttataccctcaagttagggcgaagggcattacctgaaaggattattgaagctgtttggggattcttctctgcttatgctttggtatttatcattagtttattattacttatcgcaactggtgtagatgaactttctgcgttttcggcaatagccgctacactaaataatctagggccaggattgggtgttgttgcggataacttcactgcaatgaatccagcagccaaatggatattagttataacaatgttgtttggtcgcttggaagtattcactttattagttttatttacaccaaccttctggcgtgaatag

SEQ ID NO: 9404 - DNA, 537 bp, Photorhabdus luminescens
atgcattgtttattactttattccagtcgggatggacagactaagaaaattatcacccgcattgctgaaaatctacgcagatcaggggagttatgtgagctcagagatttagcaacagtaaaaacgatcaatttggaatcttatgacaagattatgattggagcttcgatcagatatggtcatttcaattcggcactgaaaaagtttgcaatctgtcatcaacagcaacttaataaaatgccaaccgcattttttggcgtgaatttgacagcaaggaagccagagaaacgtacaccagaaacaaatgtgtatgttcgtaactttctgtttaataccccgtggaagccagatttgtgtggtgtttttgctggtgcattactttatcctcgttatcattggttggatcggataatggttaaaatgattatgaaaatgaccggtggggaaactgatacaactaaagaggttgaatataccgattggcagcaagttgattattttaccgatgacttccttaaaatagtgagtgaaaaataa

SEQ ID NO: 9405 - DNA, 930 bp, Photorhabdus luminescens
atgccaatttgtataccggatgaattacccgcagtgaattttttacaaaacgagaatgtgtttgtgatgacatctactcgtgcaaatattcaaaatatacgtccactaaaggtattgctgcttaacctgatgccaaagaagattgagactgaaaatcaatttttaagattactatccaatacgcctttacaggtagatatccagctattgagaatagataaccgaaagtgcaggaatacgcctgctgaacatttgaataacttttattgtgatttcgagcagataaaacaccaaaactttgatggcttaattgtcactggtgcgccattgggattagttgaattcgaagatgtggcatattggaaacagattgaaagaataattagttgggcaaaggaacatgtcacttctactctatttatttgttgggctgtacaagccgcgttgaatattttgtatggtttgccgaagtttaccagagaagtaaaactatcaggtgtttattatcactctactctgaaccctctagcattattaactcgtggctttgatgaatctttttttgctccccattctcgttatgcagattttcctgaacaggttgttcgtgaacatactgatctggatattctttccagttctgaagatgcgggagtgtatttactggcgagtaaagataaacgtatggtatttgtcactggtcatccggaatatgatgctggaacgttggctagtgaatatttacgcgatttagcagcaggtttggctccaaagatcccaataaattattttccagataataatccagaaagaaaaccactggcatcatggcgcagtcacgggcatttattgttttccaactggctgaattattatgtgtaccaaatcacaccatatgatctcacctacatgaatccaacactggattaa

SEQ ID NO: 9406 - DNA, 1599 bp, Photorhabdus luminescens
atgacgcagcaaactttagcgactgaattatcgtttattaaacgatttggagcagcagagcaggaggttttgatacctgaagcggtagattttctgaaagatctggttgttcggtttactgatgcacggaaaaaattgttagtcgagcgggatatttggcagaagaaaattgatgatggtgaattgcctgattttatttcggaaaccggttccattcgtgaaagtgaatgggaaattcaaaatattccagcggatctccgtgatcgcagagtagaaatcactggaccagtagaacggaaaatggttatcaacgctttgaatgctaacgtaaaagttttcatggcggatttcgaagattccttagcaccagcttgggataaggtgattgaggggcaaatcaacctgcgtgatgcggttaatggcacaatttcttacgttaatgagcagggtaaacagtaccaattgcaaccagacccggctgttctgatcgcacgggtaagagggattcatttaccggaaaaacatgttctctatcagaatgagccaatcgccggtggattgtttgattttgcgctctatttttaccacaaccataaacaattgctggcaaaggggagcggcccctatttctacttaccaaaaattcagtcttatcacgaagctcagtggtggagtgatgtattcagctttgcagaagatcgttttgatctgccgagaggcacaatcaaagcaacggtattgattgaaactctgcctgctgtatttcagatggatgagattctttaccatcttcggcaccatatcgttggccttaattgtggccgctgggattatattttcagctacattaaaacactgaaaaatcatagtgatcgggttctgcctgatcgtcagtctgtcacgatggatcaacctttcctcaatgcttattcccgtttgctgatcaaaacctgccataagcgcggagcatttgcgatggggggaatggcagcttttatccccagcaaagatattgagcgcaacaattgggtactagataaagtccgggcggataaagagctggaagcacgcaatggtcatgatggtacatggattgcccacccaggtcttgccgacacggtaatggacgttttcgatagggtcttggcagagcggcaaaaccagttagatattttccgtgaagaagatgcaccgattaccgcagctcaattactggaaccttgcccaggcgatcgtactgaagaaggtatgcgggccaatattcgtgtagcggttcaatacattgaagcgtggatttcaggaaatgggtgcgttcctatttatggtttgatggaagatgctgcgacagccgaaatttcccggacatctatttggcaatggattcatcacgaaaaatcattatctaacggtaaaaaagtgacaaaaagtttgttcaagcagatgttggcagaggaaatggaggttattaagcaggaagtgggagaaacacgtttcagtcaagggcgatttagcgatgcggccaagttgatggagcgcattacaactcaggacgagctgatagatttcctgacgttgccgggatatcaattgcttgattag

SEQ ID NO: 9407 - DNA, 1308 bp, Photorhabdus luminescens
atgacaatctccagaactcaacaaatcgctcaactggaacaagaatggaaaagtgaccgttggaatgggattattcgcccgtacagtgcggaagatgtggttaaattgcgtggttcggttaatccagaacatacattggcacagcttggtgctaaaaaactgtgggaactactgcatggcatggcaaagaaaggctatgtcaactcattaggtgcattgacgggtgggcaggcattacagcaggcaaaagcgggtattgaggcggtttatctttctggttggcaggttgcggctgatgctaacactgcatccagtatgtatcctgatcagtccctgtatccggtggattccgtcccggcggtggtaaaacgtattaataacagtttccgtcgtgcagatcagattcagtgggcaaatggtattggtactgatcatcaggaatatatcgattattttctgccaattgtggcggatgcggaagccggatttggtggtgttctgaatgcttttgaattgatgaaagctatgattgaagcgggtgctgcggctgttcactttgaagatcaactggctgcggtgaaaaaatgtggtcatatgggcggtaaagttctggttccgacacaagaggcgattcaaaaattggtcgctgcgcgtttggcggcggatgtttctggcgtaccgacgctgttgattgctcgtacagatgctgatgcagccgatctgttaacctctgacagtgacgcatatgacagtgagtttattaccggagaacggacttttgaggggttcttccgtaccagagcgggtatcgatcaagcaattagtcgtggtttggcttatgcgccgtatgctgacttgatatggtgtgaaacatcaacacctgatattgaaatggcccgtcgttttgctgaggcgattcatgctaaatatcccggtaaattgttagcttacaactgttctccatcgttcaattggaaaaaaaatctggatgataagactattgcgcgtttccaggatgaactgtcagcaatgggttataaattccaatttattactctggcgggtatccacagtatgtggttcaacatgttcgacttggcacatgcttacgcgcagggtgaaggcatgaaacattatgtggagaaggtccaggaaagagagtttgaatccattaaccgtggttataccttctcttctcatcagcaggaagttggcacaggttatttcgataaagtcacaacgattattcaagggggaacatcgtcagtaaccgcattgacaggttccacagaagagcagcagttctga

SEQ ID NO: 9408 - DNA, 1758 bp, Photorhabdus luminescens
atggggatagattcagcacatttgatagcacaaaccattttacaaggattcgatgcacaatatggtcgctttctggaagtgacttcgggtgcacaacaacgttttgaacaggccgactggcacgctgttcagcaagcgatgaaaaagcgtattaatctttatgatcatcatgttgggctggtggttgagcagcttaaatgtatacatagtgctttcggatatgatgaagagtacattgccaaggtaaaggttgtttataccggtttattaccggattatccccggtttgaaattgccgagagtttttttaattctgtttattgccgtctgtttgagcatcgtaatttgacaccggataaattatttatttttacctcgcagcctgcgcgcagatttcgggatattcctcggccgttatcgcgtgactttttccctaatgataatcttgcgttaatgttacggacaattcttaatgatctgccgctgcgtttaccttgggaaaatctggaaagagatatttattatattactgactatctacaacagacatttccagtcggagaattattacaggcaacttttcagatagctaatgaactgttttatcgcaacaaagccgcttggttagtcggtaagattcgcattggcggtcaggtttatcctttcttattgccgatccatcataacgaatctggtgggatttttatcgatacctgcctgactgattatgctgatgctagcattgtatttggcttcgcccgttcctattttatggtttatgcgcctttgcccgcggctttagttgaatggctgagagaaattctgcccgccaaatcaacgtctgaactttatatggcaatcggctgccagaagcatggtaagacagaatattaccgggaatatctggcgtttattaccttctctaaagagcaactgataattgctcccggtgttaaagggatggtgatgttggtatttacttccccttcatttgatcgcgtcttcaaggtaattaaagatcaatttgcgccgcagaaagaggtgactcaggagcgggtacaggaatgttaccgtctggtcaaggagcatgatcgtgtagggaggatggccgacacacaggagtttgaaaattttgttattgataaagcccgcatcagtcctgaactaatggaagagttgcagaaagaagtgccagaaaagctggaggatttgggtgataaaatcctgattaaacatctctatatggaacggcgcatgaccccgctgaatatctatatggaacaggtggaagaacggaagttgaaagatgtcattgaagagtacggtaatgcgattaaacaacttgctgcggcgaatatttttcctggagatatgttgtttaaaaactttggtgtgacacggcatggacgtgtagtgttctacgactacgatgaaatctgttatatgacagaggttaattttcgagacataccgccgccgcgttacccagaagatgagcttgccggcgaaccgtggtacagcgtggcaccaaatgatgtttttcctgaagaattccgacattttctttgcactgacagtcgtattcgtcgctattttgaagagatgcatagtgatttatttaaagcagactactggcgggcgttacaggagcggattagaagtggtcatgtggaagatgtgtttgcatatcgccgcaaacagcggtttagtcaacgtactgagatagaaacttattctattgctaaagtttcagcctga

SEQ ID NO: 9409 - DNA, 567 bp, Photorhabdus luminescens
atggctagtgtaattttatacggcgataacatttatattagaaataactaccttggaaatggcggctatctggatactaatggttatgcaaccgcacaaggcgcaaaatataacgtatacacggctaattcgccgacccgagctccgggtacaggtacgggtacgtggcaaattttgtctgcgagcggaaaagccatagggacacagatttacagtggtgatatagtctttcttttcaatctttaccagaataatggcggatatctcggcacaaatggttatgcgccatcacctgaactctataatgtttatacggcggataaagcagcacgtccggttgagaccctgacatggtacattttttcagatacaaccagtggatatgatggtaaagttcgtgaaagtgatgttatccgttttctgaatggttatgatagcgtacgtggaggatttctcgatacttgtttcaatgctactgttcctaacgaattatataatgtatatacttcacgtctttctaatcgaggcaatggcacaggcacttggaatttatcaaaagtgatttaa

SEQ ID NO: 9410 - DNA, 831 bp, Photorhabdus luminescens
atgagcactgccgttaccagtaaaaaaacaaaaaaaaccaagattacggcgaataatgctgttgctaatgggcaagtacagtcattaagtcgcggcctgacacttttggaatatatttccgagtcacccggtggtatcgccctgactgatttagcccaacaagccggattaccaaattccaccactcaccgccttttgactactttgcaacagcacggttttatccgtcagattggcgatttagggttatgggttatcggttcacatacttttattgtcggcagcagtttcttacagagccgaaatttattggcactcattcacccgatcctccgccgtttgatggaagattccggtgaaaccgtgaatttagctattcttgatcacagtgaatatgaagcggttattgtcgatcaggtacagtgtaatgcattgatgagaatgtccgcccctatcgggggtaaattgcctatgcatgcttccggggctggtaaagcattcctttcaacattatcagataaccaactggttcaattactgcataagaaagggcttcattcttacacacaacataccaagacaaccccttcgaatttaaaagaaaatctggagcaagcacgtaaacaagggtattcgttcgatgatgaagaacatgctttaggtctgcgctgtattgctgcctgtatttatgatgagcatcaccaagcctttgccgctatttccatttccggcccagtctcacgcatcactgatgatcgtatcaccgaacttggtgctttagtgatccgggcagcaaaagagatcagtaaagaatatggcgggattcgttaa

SEQ ID NO: 9411 - DNA, 1500 bp, Photorhabdus luminescens
atgaaacgcatttttttgattatctgttttttagcatctgtaattgtcgcgattattcagggtatcggtttggtacttcctgataaagtcccagttgaatatttcaaagaaagtggattcaagaatgtgatgagaacgcttggtgttattgccgcggaaccccatcctgcggcttcaacacagcaagcgttagttcgggcttacctgattaacgaaatgaatgatatgggatatagcgtcactgaacagacattttattacacggcggctgatttggccgctcggcagaagagaatatattcaaacttcaatagtcaacaacgccgagcttttgataaagagtttgccaggataaatacaggcaactttgcaaaacaagtggaggaacaatcggaattaactggaacgaatcttatcgcaaaattggaggttcctgcgccagaaggaactttattattcgtttcacattatgacagtgttagaactgcgccaggagccagtgataatggtatagccgtcgcctcggtactccaattaatgcgggatcttgctgaaagaacggatataaaaaataacgttatattcttattctctgatgctgaagagttgggattactcggcgcgcatcactttgttaagaatattaatgagatcgcgactcaaccaatagatgttgtttttaattttgatgctcggggaaataatggcgtgccactcttatttgagacatcagcaaaaaatcttgctcttgtttcagaatggaatcagaatgcttataagccggtagctttttcatttagtcccatcgtgtatcaaatgttgcggaataacacagattttagtgtctttctggatagagggtttaccgggatgaattttgctacgatcttgggttacgagcattaccaccgtatgagtgatactgttgagaatcttaaccttggaactttgtggcgatatcagcgaacgattcgggatttgggagcgcatttcgcggtaaaagatgagattaacttgtttaaagaaagtgtagatgcagtttactttcctgttccctatattgggcttattatcatatctatattttccgctttcgttataggtattttaacatttttactctctatctcattagcgataagaaatatatggttttcatcttcactccgaactgtatcaaatatccagagcattttaaggatacttgctggattatttagccttgtcgcagcattagttgtacccacagcatcttatcttattacattacctgttttgttgtttttattaacggatttgatgttgcgggagttcaataaatttagcgttgcgttgattttattaattatctgtacttacattacatctattctctatgttccaattatataccttgtttctatcggattacatgctcctgtagtggggggtgtactcgctattctgccaatgcttattttaggatttggtatagccggtttttggaaacgagtgatttaa

SEQ ID NO: 9412 - DNA, 837 bp, Photorhabdus luminescens
atgaaaaataatattaacggtaatcattttaaagtggctggcaatttcctctgtaattataaagtttatcagggagatagtaatggcagagttgttatattgttacctgctattggtgtggaaatcaggaaatatgacgctttaatacaacaactggtgaaagagggttttcaggttgtcactgctgatatgccaggttatggcgacaatcaacctaaaccaagtcgaaaaaatgactataactattccgatctgttgcaggattatcttccggccttgctagataaggctgttaaattaaatagcaataaaattcctattgtctttgggcacagtcttggggggcatattgcgacgctctttgccagctcaactgacaggccattttctctgttttgtgtggcaaccgggaacgtatggtataagaattggcagggaatggggagggtacagataataacagcagctattatttttaacattctgactgcgttatatggttatctccctgggaaaaagattggttttggcataagagaagctaagggattaatgcgggactggtccagaactgcttatacgggaaattattatcatgttcgtgcttataaggggaaggagaataagcatttatccaaggctgtttatatctgtgttaaagaagataattgggctccgttgaagtctactcaagtattagcaagtcttatacctaatgcagaagttagggaaataacattatctttcaaaggtaatcctcatagcgcctggattaaacagccaggagatattattgaaatcatgaaaaaagaaatgatggagaatagcgatgattaa

SEQ ID NO: 9413 - DNA, 384 bp, Photorhabdus luminescens
atgattaatacatttaaaattctgcgttgggaatttttgggattgttttttatcactttatttctgacttggcagcttgagagttatataaattggtggcagtttattgtgttattttttctgattgatattattggttattacccagggcggatctggagtttactgaataaaaaagaaactcctcctccagctttttacaccatttataatatttgccacaatttatttacactcagtgtgattagtttgctctggatctggttctttaaggacaattacagcgttattgcactatttgtccatatctgcctggatcgaggtgtactgggaaattttcctaagttatctattaatatatttaaacagcctactgttcattga

SEQ ID NO: 9414 - DNA, 897 bp, Photorhabdus luminescens
atgaatttaattaaacaggcatcggaagtagaaatgcgggcaaaagattggggcttggatgaatggttcactgaacagataagtgttgaacaaagcaaaagaacccattatgccaatgatcctaaattaacctatttgccgggtgatttacgggagtctctgatcagggaactttcttttaaatcgatttcggaatatgaggcaacgaaagcattattgttacttgcagataaggctcctgacaatatcaactttgattatatgctgactcagatatttgatgaaggtagacatgctaaattattcagagaacatctggtcagaataggctttgcggatatcgacaatgtggccggaaaaatggaaagcctcttacgaggaaaaatgaccaatatgttggaaacattgagaacttatttcgataagtgggtggtgttgaaaaatgactacattgcaggcgtgttaatcattacggttgttctggaaggcgtgcttgcgccaacgtcagagctcagcgaaatcaagtggcgcccttttgatattgttgccgccgagacacaagccagagccaatgctgatgaattaagacatctgacagtgtgtgcaaatatcgtcaagatggcgctcgaaaatgagagttctctaaagcaatcggctcttgagtgtatagaagaagggctggcgttatggaaccaagtatctgttgatgatttgtttgtggagcgtgaaatgttctatcaacggggtatgcagaactatttgcgctttattgaaggttatgaattagctcctgggatgttgttgtccgattctacggtggaatctcgccttgagctctctcattccttggttgaacagatgcagcagtcacgccttaagtacatgggtttagtgtag

SEQ ID NO: 9415 - DNA, 1047 bp, Photorhabdus luminescens
atgacaaatattgttgaagaactcaggaagaatagcgggaaataccaacatttgacaccagatagattgaaaagattgttattgggttctgaggctgcttcacaatgcctacgtttgatggctcaatccaatatggatgggcttcatcaagtcggtaatactatccgtgaagcctctgcatggcttcccgctattggtattgctctaacaatgcataatcatattgtactggcttgcagtaaatttcccgatatattcgaagacagcaacgtattattgaatgaagttatgacatcaaaagcgttggttgcttccgcttttgcggagggactacctggaacgaatatttttataccatcgcttaaaatgcattctaaagagggaaagttgtttgttaatggttcgaagaaaccttgttccttatcttcggttgctgactattatgtgttatcggtctgcgatactgataataataatgatatgaggatagtattggtttctaaatcagatcagaactttaaagttattcctttctggcgactggggattatggctgaaagtgataatcaagaagttaaattttcggataccgaaatttcattaacacgactttctcattataaagggctggagcagcaaataattctttcctatggtttatcgctatttaattactttgctgctaatacatactcaggtattcttgatgggctgactcgttttattcctgagaaagtagtagaacagcaaacaattaaatatactctgacccaagctgattataagattaatgttattctcggtcagatgttgattattgccttttatgctagccaggatgaaaacgccgtccataagattctcgcgttacgttatactttggaaaagatccttgaggaaactgccagtttcatattccgatgttgtggtggaattaaggtaatgacaacaccagaaattatgaatttctatttggcagtacagttatttaaatttcatccgataggagaattccaaatgattaaccagatcatgcagcaagcttga

SEQ ID NO: 9416 - DNA, 2568 bp, Photorhabdus luminescens
atgtttgttaatcaatatcgtgagagtttattaaactctgtgggccttgaactggatatcaagtctgctcaagataaccagcttacattatcggatggccgggttgttaaggattttttggctcaatatggtgccctgccatttgggcataatcctgatttcgctatcgctgaaattgacagattcactaaagataaagagcctatcttctttcagcccaatattcacaaaaaggtacggctattggctgaaatgcttgcggagcaaatagataaggaaaaatatacccactgtacttttactaacagtggtgctgaaaccgtagaagctgcgattaaatttacccgcctgtttactggtagaaagcgtattttgagtttgcatcgcagttttcacggaaaaacctattcggcattatccgctacgggatcaaaccggtttaaagctgatttcatttacgatgataaattatatgagcaggttgatagtgaagatttagatgaaataaaaagaaagctggagagccgggaatttgccgcatttatcattgaaccggtgcaaggagaaggtggaatgaaagtgattccaccagataccttgtccaatattttggcactgtgtaaagacaatggcacattgtcagtctttgacgaagttcagacgggtatcggtaggcttggggcattttgtgcggccacgctctacgctttgaaaccggatgttatcctgttttctaaagcgctgggggcaggtatctcgccgattggtgcgatgttatattcagatgagttttatttatccgagttcgacaggaaacatagctccacttttgccaataacgttctagccgcaacgatggggattgctgttatcgagcatctgactaaagaggagggtaaggcgttaacccacgttcaagaagtcagccgttatgttgatgaatgtcttgaacaattgtctgctaaatatccgcagcatttttactggcaaggggctgggttgatgcgtggccttgaaatacaggacagcaaagcggcttccaacatatttatcaatttcagtcaaagaagcggtggcctggcttatatcatttgtagtttcttattgaaacattatggtcttttcaccatgccgttaatgtctcgtccttgttctgtacgttttgagccaccgcttaacgtttccaaagaggatattaagacgtttttcaccgcttttgatgaggtatgccaactagttgaaaatggacgatatgacattcttttttcacacttgatagatgtacctgttgcggatctcccacccgcttcggtgagttatccaatttcaaaaaataacaacttggctcagattaaagcgcctatccctggattaattgagggtaagaaattcgctttcttgattcataccacttcggttaatgagctcgctcactcttattgcgtgtcaataaaggagaattacacgcaggagcagcagaaacagctcggtaattggatcacgcaggtttcttcaattgattttaatcctgatatcgccgttgagtttggtgtcgaaagttcaacggcatatgctaatggtatgctccttttctcacccattagtcccgaagatatgatggcattgtcagcgaaagaacgggcggtattgatgaaggaatatctcgatgtggcagagaaaaatggcgctgaaatcgttggcttaggggcttatacctcggttattactaatggtggtactagcttggtgaataatcggcagggtcggatattgactaatggcaactctctgacagcggtggcggtgattgagggaatacgctcaatgttggttgagaatgcatcccggcaaacattggcggtagtgggtgccagaggctccgtaggcagactttcagttattggcttagctcataactttggccggattatcttggttagccgccctaataaagcacgcatattactctctgaactgaccaaggcgctgctttccgcagtgttaaggactcatgatgttatccagccagattcggtcatggataagatgagaaaatggctttttaaacaaaatccgggtgtgacagatgcacaaacattacatcagcaagttcttgacgttgttgatacctttggtttggaagcgatagagagttatgaatattctttgagtcaggctgattttattgtttcggcaaccagtgaaggtaagcctttcttgaatacaaattatttgaaagattccgccatcgtttttgatgcggccagacctttcgatttcattcgtgatggcaaccatcaaatttacgaggggggattagtctatcagcctgagaaagtgacctatagcgattgcaacgtgatcgatgtacctgcgggggtaaatctcgcctgtttatcagaaactgtcgctgtggcgcttgaaggggtgagtgttcatcaaagcatcggtaaatctattgattataacgatgcattggcgattcgggatattgccaggaagcatgggttcatccctgtccagtattcccgaaataatcaaggtgagcgttatgagcatgttgcttga

SEQ ID NO: 9417 - DNA, 1038 bp, Photorhabdus luminescens
atgagcatgttgcttgatgctccccagattattgccaccgggaacgctcaagatgttcttggcaacagtcacctcagaaacgtgctttgctattcaaagcacccgttgagtagcctgttgttcaatagtgaaacatattggtttactaatcaaaagggggcgattggtttctttcaggacaaaaatctgcatatgtgtgtaggcggtattttggctcctgacgaagaacgtgctgcacttttgcactcttttctcaacttcaccagagaaaagcgggctttcccggtttttctgcacggtgatgagagcgattttgtattgttgaaaaatagcggcttttctgtgaaccagcttggtgcaagttattcattgagccttgatggatatgacatgaaaggcaaacggtttcagcagcttagaaataaaatcaataaatctaaaagagcggggatttctgttcgagagatctgctcacaagaggaatattatcgatttaaaccacaactagaacagattaatcagctttggctgaaagaaaaacatgcgaaggccctgaaaaaattggtgattgatttcaataccgtggaagtgaattcaggccagcacagagtctatattgcaactcagggagaacaaattcaggcatatattgtttatagctacacttggggggaaacatcgggatggtttcataatctatctcgaaaaaaaccggatatacccgacggcacgatgcagtttattaatgaaacggcgattaatgacttcctgaaagagggtgtagtttcctaccttcatttgggcttcacgcctttggtggagttcggcgaggagggatacattaatgactcggcaatcttttataaagttgccaaatggttgtcatcaaaaggcggcattgtttatcctgctgcttcgcaacgtcaatataaaatgagctggcggccgtcgttgattgaaccggaatatattgctttccccagaggaaaggccatgaaggcattatggtcaacattgcgaacgactaatagtatctaa

SEQ ID NO: 9418 - DNA, 1464 bp, Photorhabdus luminescens
atgaaatatctcaacgagtatagtgaatcaaactttgatttattgattaacgatagaatcatagcgccttctcatccagagaatcccgtcatagtcggctcagataaagtcatttattggcgtgatttatattatgaaattaaaaagtggcattctaaatatttagaattaaatttaaaccgcaacacgccgttgatcttatacggacacaaagaggctaattttttagtttcaatttatgcatgtataacttataaaatcccatttattccagtcgatataatttatccaatacaacgtttgttagaaattgcatcactatccaacacgccttattactacgatgtgattaacaatcaatttaaaacaacaaatgttgattatattgagtttgatgaagataatgttgcctatatcatgtttacatccggtagcacaggaaaacctaaaggcgtcgtcattggacgtgaaagtgtttatgatcttatgcgatggatgtacaatgatttcaagcttggtgaaaaacctgttttcatgaatcaagcgctatttaattttgatttatccatgtatgaaacatttggtacattggtatacggtggcacatgtctttgtatttctcaagaaacagcaactgattctgaaaaattttatcaagttttaaatcattaccaaccaacggtatgggtttcaacaccctctttttcctataagcaattactctcgcagagttttaattattccttgttaaaaaatctaaaacattttctattttgtggtgaaattctaagtaaaaatctcgttaaacatttaaggaaaagatttccatctgcaattatctataatacttatggtcccacagaagctactgtagcaacaacgttaattgaaattagcgatcaacaccttcattctgatatggaattattgccaattggcgagtcaagatcgggctctactctgacattagaaaatggtgaaattgttatttctggcgctcatgttatgagaaaatacattggcgctaaaacggaagataataatagattgacaattaatcaacacggaacgagaagtttccgaactggagatatcggcaaattaattgacaatatctggtattgctttggcaggaaagataaccaaataaaactaaatggctatcgcattgagctacatgaaattgaagaaaggctgatgaatattcctattgttgatagcgctgttgttttgccattaaaaaaagaagatggttctattgttcgcttggttgctttctgtaaattcaaaactattactaataaggagaacttagttaacctgcttaaaaataatttaccttcctatatgatacctagtgaatttatcaacattgataacttcccagtcacaaataatagtaaaattgatacaaaatctctattgtcaatatataacaataatgaatgtgaagtagtaaaataa

SEQ ID NO: 9419 - DNA, 1125 bp, Photorhabdus luminescens
atgtttgcaaattttaactttttcatttatctattttcagcctcatttgttttttctttattttttctattctttaataaaagaataaattctaaaattgcattaagtgtgctttctattatttgctggtgtattattttcagatataaaatttatatccctatagcattatctgtttatttctatttaataactctaattttcaaaaagaatataattaataaattagtatcttctctgctaataatttcacctttatttttagttaaattaaatttggaatttagtcatctattgagtgttatcggtttatccttttttacattcagagctatagatgtcattttattctctagcaagcaacagaaaatagtaatttatgaatatttttcctatttattcttaccattagtttggctggctggccctatgtatcgatggaacagcttcaaacgtgatttacttgaattacaagtgccagtctctttagaaaaatggttttccggcgctggacaaatattatatggtatcgttcagaaatttttattcgccgcccttatctataacgtatttttatctgactatattaataaagatacgattgaatcatacttagtagttgctataagttatagtttttacttatattttgattttgccggttataccaatatggcttgtggcgcgggcaagttattcggcataaacttaccgattaattttcattatcccattttagccaaaaacccacaggatttttggcgtagatttcatattagtttatctgaatggttaagagacgtcatctttatgccattatataagacactaatggagaaagcatttttcaaaaatcatagactttttgcccagaatatcagtatttttatcacattattttgcatgggtatttggaatggactggagcttaattacattataagtggtgctttatttggttcttactcagtaatgcataactgtttaattaattatactagagataaagaaaatatcgctaatatcctaaatacaaaaatcatctccttctttggcagactgacaacgttaactttcatttgtttttctttatatatatttagtggatacagttttataaaatga

SEQ ID NO: 9420 - DNA, 1203 bp, Photorhabdus luminescens
atgatgttaaaaaagatatctattaatattgcagcattattattcgcagcaattactttttcatttattatagtatttgttaatagttttaatcagaaactagtagaatacaaatatattgaagatgatagtaaatcgatcaactatatacctacgattacagaccaacacaatgctattgatttcttaaaagaaaaatctcttgaatatggatttaaacataatcatgtcattttgtttggatcttctgaattaacaaacagaacgcataaattcattccatatgattttttaacaaaaaatttaaatattcctacaataggtattggtaaagcacattttgaattattagcaatttatggttatttatcagcttatcaagaatatttaaataaggatagtagaatagttattattctatcaccaggatggtttgaaaaaacagatctactaccacaagcatacaattctcattttccatcctatatcgcaaataaactcgcaaatgatgaaagtgcaaaaaatatattttctaattatctcaatgaaaaccaagataactttgaaaatctaaacgcaacccaattaaagttgattcataaagacaatataatagcatcgtcagttaccaacattttaaactatatagcagaggcaagagtaaatatcaaaaatataataaccgacaatcatgaaattaaagctgacaatatttatgtccttcatgaaggtcctttaatgaaaaaacaatttcaaattgctaataccgaagttcaatggctagatctagctaatgatgctaaaaacattgaacttaaaaacatgagcaaggagacacaatgggtaaataaaaaatactatgaaaagtatgtaaaggataaaaaaagtaaaaaagcatttcctaatggaatcaagtacagtaaagaaatgaacgcctttgacaatatattaaatttattgacgaaatataatgtcgacgctctgtttattatgcagccattaaatccttatgtatacacagatacaaatgattttaaactagttgaaaatattatatcagagaaaataaaatcgcatggcatgggatatttaaatcttattgaagaacaatatcagccaggagtattaactgatattatgcatatgggggaatatggttggttattaactgataaagctattgtggagcattttgcgaaatga

SEQ ID NO: 9421 - DNA, 312 bp, Photorhabdus luminescens
gtgaccggggtgagtgagtgcagccaacaaagaggcaacttgaaagatgacgggtataaatacaatcttggtataaaaggacaatatatggaacttgaacagcaagtattatcaatagtcaacaaaattgccagaaaaaatgttgaattaggtgatgagcttttgaagaaaaatctaatagattcaattactacagtagatctgatcctggaattacaagaggagttcgattgctatataccggcaactgatgctgaatctattctcgaaacccctaagtcaattatcaattatttgaacaacttgaaatga

SEQ ID NO: 9422 - DNA, 1380 bp, Photorhabdus luminescens
atgagtgctgtttcatcccaatgcccagaaattggcgggcatgtagtcgcaaaatttggtggtaccagcgtggcaaatttcgatgccatgaataacagtgcagatatcgtactggcaaataaagcagtacgtgtggttgtattgtctgcttctgccggtataaccaacttattagttgcattagcggcaggctgtgatgcagataagcgggctgactacttgaaacagatccactccattcaatacgcaattattgatcgtttgcatgaatccgatacgattcgtcaagagattgatcgtctactggaaaatattaaaaccctggctaaagccgcatctctggcaacctctgcggctctgacagatgaattagtcagccacggtgaattgatgtccacacgattgtttaccgaattgcttcgccaacgcggtaaagatgccgaatggtttgatatacgcaaagtgatgtataccgacgagagttttggccgtgcagaaccaaactatgaacaacttcaatcgttggcaacggaacatctcttaccacagctaaaaaatagcctgattgtcacccaaggttttatcggtcgtgaagagaacggccgtaccactacactgggacgcggtggcagcgattatactgcggcactcttgggagaagcccttggcctgaaacgcgttgatatctggacagatgttccgggcatttacaccactgacccacgagtcgttcccgccgcccaacgaattgataagattgcttttgatgaagccgcggagatggcaacatttggtgccaaaatcctacatccggcaacactgtttcctgctattcgctgtggcattccggtctttgtcggttccagtaaaaacccacaggcaggcggtacgctggtctgtgataccacagaagctccaccacagttccgcgctatcgccctgcgccagaaacagacgttactgacactacacagcctgaaaatgctgcacgcacagggatttttggctgaaatatttaccattctgtcacgtcataatatctcagtggatttgatcaccacctctgaagtcaatgtggcattaactctcgacaccactggctccactagcacaaatggcagcctgctgaccaatgcactgatgacagagctttcgacgctgtgtcgggttgaagtggaagaagatctggcgctggtggcaattattggtaatcagctttctcaaaccaacggattaggaaaaaaggtttttagtgtgctggaaaaattcaatcttcgtatgatcagtcatggtgccagtaaccataacctatgcttgcttgttcaaggcaaagatgcagaacaaattgttcaaacgcttcatcaacgtttgtttgaataa

SEQ ID NO: 9423 - DNA, 1647 bp, Photorhabdus luminescens
atgaaaaatatcaatcctagtcaaacctcagcttggaaagcgttagaacaacattttgcacagataaaggatattcacctacgtgaattgtttgaacaggacccagatcgttttgctaagttctcagcgacattcgatgaccagatcttggtggatttttcaaaaaatcgcatcacaactgagacattaaaaaagttacaggcacttgctaaagagacggatgttgccggggctatgcgcagtctattttcgggtgagaaaattaattgtactgaaaatcgtgctgtactgcatattgcgctgcgtaatcgcagcaacaccccgatgatggttgatggggaagatgttatgcagcaggtcaacgcggtgttggcaaaaatgaaagatttcagtgagcgcgtgattcatggtgagtggaaaggttataccggtaaggggattactgatgttgtgaatatcggtattggtggttcagatcttggcccttatatggtgacagaagcgctgaaaccttataagaatcacttgaatatgcattttgtttctaatgttgatggaacccatattgcggagactctgaaagcacttaacccggaaacgacactgtttcttattgcttccaagacgttcactactcaggaaacgatgaccaatgctcactctgcccgtgactggttcctaaaaagtgccggtgatgaagggcatattgcaaagcattttgcggcgctttccacaaatggacaggaagttaagcaatttggtattgataccaaaaatatgtttgagttttgggattgggttggtggccgttattcgttgtggtcagcgattggtttgtctattgcactctctattgggtttgaaaattttgaacaattgcttagtggtgcacatgcaatggatcagcatgttgccaataccccatttgagcaaaatattcctgtattgctggcgttaatcggtatttggtacaacaacttttttggcgcagaaacggaagcgattctgccatacgatcagtacatgcatcgctttgcggcctattttcagcaaggcaatatggaatccaatggtaaatatatcgatcgcaatggtcatcccgtggattaccaaaccggcccaatcatctggggagagcctggaacgaatggtcagcatgcgttctatcagcttattcatcagggaactaaactgatcccctgcgattttattgcaccagccatcagccataacccattgagtgaccatcacagtaaattgttatccaacttttttgctcagacagaagcattagcctttggtaaatctcgtgagcaggtggatgctgaatttgccaccagtggtaaaacggtggttgaagttgaacatgttgcaccttttaaagtgtttgaaggaaatcgcccgactaattctattctgttacgtgaaattaccccatttagcttgggggcgttgattgccatgtatgaacataaaatatttgtgcaaggggcgattctcaacatctttacttttgaccagtggggagttgaattgggtaagcaattggctaaccgtattttgccagaacttaaggatgacaatagggttgtcagccacgatagctcgacaaatgggttgattaaccgttttaaagcatggcgttag

SEQ ID NO: 9424 - DNA, 519 bp, Photorhabdus luminescens
atggaaaagcgtatgtcaactgactcaatattaacaacggtgcctattcagtggctttcggtggattcacccgttttgcctgatgaggttttagactggttgatggaattgggctcaatgacccgccgttttgagcaatactgcaacagtgttcgtatcataccattcagagaatgttttattaccgaagaacaactttctgatgaaaatgagcgtttgctaacgggtcaacgatattggctgcgtgagatcgtactgtgcggtgataatatcccttggctattggggcggacgttaatccctgaaacaacattaaccggtcctgatgaaagtttggttgatttaggaacagtcccactggggcgatatctttttagtggtaataaattgacgcgggactatattcatgtagggcagcaggggaaccgttgggcaagacgatcattgctgaggttatcaggcaagccattattattaaccgaagtctttttacctgaatcaccggtgtataaaaggtaa

SEQ ID NO: 9425 - DNA, 867 bp, Photorhabdus luminescens
gtggcgggaagtatggcgcaaagtaaatggctggcctattgccgtttaatgcgtattaacaaacctataggtgcattattgttgttgtggccgactttctgggctttgtggatggccggtaaaggtatcccggatatgcatatattattggtctttactgcgggtgtatttctgatgcgtgcagcagggtgtgcaatcaatgattttgctgacagaaaatttgatggttatgttgaacgtacaaaaacacgtcccctgccgagtggtgctattagtgagaaagagagcaagatcctatttgtcgtactggcgctgatttcttttggtctggttttaaccctgaataaaatggctatctggctgtcagccgttgggttggctctggcttggctttacccctttgttaaacggtttagccattttcctcagtttgtactgggggccgcttacggttgggctattccgatgggatttgcggcagttagtgagtccttaccactagagtgttggttgttatttctggttaatatcttttggtcggttatttatgatacacagtatgcgatggttgatcgaaatgatgatctaaaaattggcgtgaagtctaccgccattctgtttggtcgtttcgacaagttgattattgggttattgcaactcgctatgctattgctgctggtgctggtggggtatctgataaatctgggcggtatctactactggtcactgttgcttacgggcactttatttatttatcagcagaaactgatcgctggtcgggaaagagagctttgttttcaggcattcctcaataataactacgttggtctggtgctatttcttggtatcttcttcagctatgtctga

SEQ ID NO: 9426 - DNA, 2457 bp, Photorhabdus luminescens
atgtcaagttggcgtaaaatatattataaattattgaatttaccactaaaaatactggtaaagagcaaacttatccctacagatccgatcactgaattgcggctcgatacgacacgcccgattctgtacgtgctaccgtatcactctaaagcagacttactggcattacgtcagcaatgtcttgagcaggatctgccggacccattaaatttactggagatcggtgacactgaacttcccagttatgtatttatcgataatggcccacgtgtattccgctattgcgcaccaaagcaagaatccgtaaaaattttccatgcttatctggatctacatcgcaataatcccaatctggatattcaactgctgccagtttctgtcatgttcggccgttcccccggacgcgaagggcagaacgctccacatttacggctactcaatggtatccaaaaattctttgccattctctggctaggccgagatagtttcgtgcgcttttcaaacacagtatctctgcgctatatggcaactgagcatggcactgacaagactattgcccataaactggctcgtgtggcacgaatgcactattcacgtcaacgcctagccgccgtcggaccacgcctgccggttcgtcaggagctgtttaacaagttgctggcttcaaaagcaatagaaaaggcagtctctgatgaggcccgtaccaagaaaatctcacatgagaaagcccgacagaatgccattaacatgatggaagagattgcggcgaatttctcttatgaaacggtacgactgtcaggccgtgtactgggttggacctggaaccgcctgtatcaagggatcaatgttcacaatgctgaacgcatccgccgtttggcacaggatggccacgaactggtttatgcgccctgccaccgtagccacatggattatttactgctctcttatgtgctctaccatcaaggcttggtaccgccccatatcgccgcgggcatcaacctgaatttttggccagcagggccaatattccgccgccttggtgcatttttcatccgccgcacgtttaagggtaataaactctacgccacgatattccgggaatatctaggtgaattatttgcccgaggttattctgttgaatactttatggaaggcgggcgctccaggacaggtcgtttactcgatcccaaaacgggtactctctccatgacgttacaggcgctgttgagaggcgaatcacgcccaattaccattattccgatttatatcggctacgagcatgtgatggaagttgccacctatgccaaagagctgcgtggggcaaccaaagagaaagagggctttttccagatgatacgtggtttgcgcaaacttcgtaatctggggcaaggctacgtcaactttggcgaacccatcccgttgatccaataccttaacaaccatgttcctagctggcgcgattctattgatccaatagaattccatcgccccgaatggttcaatccgacagtcaatcaactgtctgagaagattatggtaaacatcaacaacacggcggcggctaacgcaattaacttgtgttcaacggccctgcttgcatcgcgtcagcgagcactcactcgtgagcaactgcttgagcaactggattgttatatacagctcatgcgcaatgcgccctacgctactgatgtcaccgtaccaaagaaaaccgcggaggagttgctagaacacgctctgcaaatggataagttcgaggtagacaaagacagtatgggtgacattatcattctgccacgtgatcgtgcagttttgatgacctactaccgcaacaatattcaacatctcttagtactgccatcactgattgcctgcatcgttattcatcatcgccgtatcagccgcgaagcgctgttaagccaggtcgcaatcatttatccactccttaaagccgagctgtttatgcgttatagcaaaacagagctgccagaagtggttaatacgctgatcaacgaactgactcgccagtgccttatctgcaacaaggagcatggcatgctggtgctgaatccagcacgtatccgccccctgcaattgctggcagccggcatccgtgaaacactgcaacgttatgccatcacactctctttactgaacgccaacccagtaatcagccggggagtgctggaaaaagagagtcggatgttagcgcaacgtttgtcggtattgcatggtatcaacgcacctgaattctttgataaggcggtatttactacgtcggtcaatacactgcgtgaagaaggttatatcagtgacagtggtaatgcgattacagcaaatacccaagagctgtatcaggtattaggtgaactaatgtcacctgagattcgtcttactatcgagagcgtcagtttgccaccagagcataacgataccgaagagagtgccagggaaggataa

SEQ ID NO: 9427 - DNA, 372 bp, Photorhabdus luminescens
atggcgaatcaatccaagggcttagcccgtatcattaaagcaatcgtatattcagtgaagggtattagggcgacatggcaaaatgaagcggctttccgtcaggaaataattttagcgatattggctatgatggttgcattttatctggatatcggcgctattgaacgcattttactgattggttcagtgatgctggtgttgattatggaaatcctgaatagtgctattgaagcaattgttgatcgtattggcagtgagttccatgaattgtccggtcgcgcgaaagatatgggatcggcggcggtctttctgacgatgatgttgtcattaattgtctggggaaccatcctttggcactattttatggcctaa

SEQ ID NO: 9428 - DNA, 606 bp, Photorhabdus luminescens
atgaaagcacttaccgcaaggcagcagcaagtttatgacttggtgcgtgaccatatttcgcaaacaggtatgccgccaacgcgtgctgaaattgcagcccgtcttggctttcgttcacctaacgcggctgaagagcatttaaaagcattggctcgtaaaggggtgatagagattgttgctggggcatctaggggtatccgtttgctgttggaagaatctggtttaccgttaattggtcgtgtcgccgcaggtgaaccactgttggcacaggagcatattgaaagtcattatcaggttgatcctgcattgtttaagccaagtgcagatttcctgctgcgggtcagcggaatgtctatgaaagatgttgggattatggatggtgatctgctggctgtgcataaaacacaaaatgttcgtaatgggcagattattgttgctcgcattgaagatgaagtgacggtaaaacgttttaaacagaccggaaataaagttgaattgttggcagaaaaccccgaatttaagccaattgaggtggatttgcgtgaacagggcctgacaattgaaggattggcggttggggtgattcgtaacggcaactggtcctga

SEQ ID NO: 9429 - DNA, 513 bp, Photorhabdus luminescens
atgaaattgattaatcaaaaaaaattactggaacaggccgaagttatttgccaggctcgtggagtccgctttactcctcagcggcttgaagttttgcgtctcatttcagagcagccaggggcaatcagtgcttatgatttactggatttgctacgggaagcagaaccacaggctaaaccgccgaccatataccgggcactggaatttctgttggaacaggggtttattcataaaatagaatccaccaacagttatgtcctatgtcaccatattgaacagccaagccacacttcagcaatgtttatttgtgatcgttgtggttctgttaccgagcgagatggtggaaccattgaatccgccatccaacagttagcaaaaacagccgggttcagtttacgccatacagtcatcgaagcgcatggcttatgttcaccttgtgaagagatagaatcctgtattaaacgagatgaatgccagcatgaccacagaattgaaggaagtaaaaagaaatag

SEQ ID NO: 9430 - DNA, 1143 bp, Photorhabdus luminescens
atgaaagagcttttacaaaatcagcctcattatagacagttccccgttaaaggctatcaggtaatgaagcatattatctctgaaaaaagaaagttaccttttctaagtgcattatatgcgttgattaatattttatttgtaattgcggtatgtatgggtattgtattatctgtagcaattgttttatttataataggtaatgtatctgtccctgatacggactatttacttctggcacaagtaggtggtgtagcattatttggcgtaatgttactcttggttattatttatcgcattgttaagcgtcctgaatgggaacaacggcgttattatcaacaagcaggtttatctcttttacccgaagataagcgtcaggtattacgactcaatattgttggtgactattggctaggtttttggagtgaaactctagagcattatcctctacagtcacgggttgcccatgatagctatcgttactgtctgctgccattatctccgactcaggaacatcaatcccaattatacagcgactggggaattattgatgaagaagggtatatgaaaatgctaacgggtttgtgggagggggtacattcaaaacattttgctattgatgctgctcttagtgatgggaaaatgtttaaagtgcttgccaaattagttgaagtaacacccgactatattcataaatgtgccaaacctattaataagcgccctcctgcattagtgtggggatttgatttatggcttgcaatcgttttaagtcgcaactgtttttgtgccggttatatcagtgaagaaatggcatggaaaaatatgctgaaaaccgctgattatatttatgaaatcttcggtagttttgatgagttttatacaaactttcggctaggcaatgcttactggagtaatgattttgatcggtctaaagagcggctggaacaatttaattattataagtcacattgtgactggccaattgctagtttgccgtggcctgaaccaaaaggcattattatggaaaggcagatgatgacaggtttttctgcattagtagaagatgttttacgcagtaacatggaagaacaacaaagttatgaatttgatattactgagctgtcagcgtctcgtgtactccattaa

SEQ ID NO: 9431 - DNA, 1089 bp, Photorhabdus luminescens
ctgacaggagcctataaaacaaatagtgcagaaaaatccctcgatatcattaatctttatgacttggaagaagaagcacgtaaattgattccaacgccccaatttgactatatcagcggcggttcaggtgatgaatggactctacgtgaaaacaccagagcctttgacgatttccaaattattccccgctatctcgcaggagtaaaagagcctgacacaacaaccgaattgctcggcagtaacgtggatatgcctatttttattcctccaatagccgcacatgggctggctcatactaccgctgaattgggaacagcgagaggcgctgcctctgccggtaccctgtttactgcacaaactctgtctaattcatctcttgaagagatagcaaaagtgagtaacggacccaaatggtttcaaatttatttaaccaaagatatgggtattaaccgtgaactgatacgccgggccaaagcgatgggagcaactgccatcgtctttacagtcgatttagagtggagtggtaacagagaagcagataaacgtaataaatttattttcccacactcactgccattccctaatatccctggcgctcccgtaggagcaaccttatcagaaattacagagctatttaaacgggatcttaatttcagtgatttggagttcctcgccaaagaatcgggcctcccaatcatcgtgaaaggcattcaatctgccgaaaatgctaaagagtgtgttaaccacggtgccgcagcgattcaagtttctaatcacggtggtcggcagttagatactgtcccggcagcaattgcctcattaccgcacattgttgaagctgttggatctaaaattccagtctatctagacggaggcatccgccgcggtacccatgtgtttaaagcactcgcattgggtgccaaagctgtcgctatcggtaggcccattttgtatgcgctggcattaggtggagcaccaggcgtaacttccattttaaacctacttaaggatgagctgaaacttagcatgaaactggcaggatgtgcagccattaaggatatagagagaaaatttattagtttgatttaa

SEQ ID NO: 9432 - DNA, 837 bp, Photorhabdus luminescens
atgagtaataaaaatgactttaaagctttttctgttagtcaggatgctaatgttgtttctcaaggagaatatgaaaaaagtcaggaattgaatacgggaattccccctaatattatttccattggtttattaaataaggttttgcgtcaatcgtcaacgatatcatcggtggtggctaattttatctctacacaatgtagtgatgatgttttggatgatggcgatatagataagcttaccgctcaattaaatatcgctttagagcaaaaagctgtaacagagattccaagtgcttcattaacacaaaaaggtgttattcaacttaccgatgtgctgggtgatagtaatacgttggccgtcacgcaaaagcttgtccaagaaatgataactttgttaagtgaaagtattaatagcagagtacctaatattcggcaggtgaatggtaaggagttgtctgagaatattgatctggatgccgtggatattggggtatacacaaaagaagaagtagacaatgaagttaatgccaaaggtaatcggaatagtgccagtaaagcgattaatggttggtggagatgtggagatacaggcgttatctatcaatgggggcgtactaaggtcattgatgctggctatatagaacgtattcaattaccaattagtttttccaatacacattacgctgtcaatattaatgctattcaaagtaaaatgggttttatgggggcatctgttggctatgtaaatgtaattaataattcatctttcgatttattaaattcttgggtaaatgccaaatgggatagcccattcttttggatagcgataggatattaa

SEQ ID NO: 9433 - DNA, 450 bp, Photorhabdus luminescens
ttggatagcgataggatattaattatgtattattatagtgcgaaaacaaatgctttctatccggtagaattgaaacgaaattatattgctgctggttcactgccggatgatattatagcagtcagtaatgatatttatcaggagtatgctgctaataatgcgccagaaggaaaacaccgtgtagcaaataaaaacggtttgccggaatgggcagatattcctccgccaacgaaagatgaattacggcaatatgctgagctccaaaaacaacagctcatcgctgaggcaaccaatcaaattgtaccattgcaagatgctgttgatttaggtattgcgactgaggaagagaaaatagctttattggcatggaaagaatacagggtaattctgaatcggatagatgtttcacaggcaatggatattgattggcctgaacagccacggggataa

SEQ ID NO: 9434 - DNA, 591 bp, Photorhabdus luminescens
atggggaaaataatgatagactttaaaggattaggccatattaatattgttgtagatgatatgacggcggcaatagatttttataaaaatctatttggggcaataccaagacaattctttcctcattttaaaaataaaggttttgcaaagtcagcgggttttattgataaccctgaacaggttgatgtatcaatggcatttttggaaattcctggagcgagggtttttattgagttaatggaatatcacagcccaattggaataaaaagggttgaaataaaagaagttaatgatattggtggtattgggcatatttgcctgagagtacaaaacatagatagtgtatttgagcatataaaaaattctcctgatgtcagattgataaattcatcaccattatataagccatataaaatagatgaaattacccgtgatgaatttatgttctttaacgaggaggatgaaaaaaactctgttttaaaacaagaaacttgcgagattatgggcaagataagatatttttattttatcgacaaatataatattcaatgggaatttgaagaagggcatgatgatattggcactgattaa

SEQ ID NO: 9435 - DNA, 297 bp, Photorhabdus luminescens
atgaaagatgaaatatttgccgatctgctggccagtgtagaagaaatggtgaaaatcgagaagggtgagctgacaccgaaaccggaacatgttcatactttcaccgaaattgatgttaaagcaatacgcgaagctaccggcttgaagcagcaagattttgctgtggcggtcggggtaagttatgacttggtgaaaagttgggaaagccaacgccgttatcccactggcgcatcaagaaaactgttgttgttgcttcaggctaacccttttattatcaaccagcttaaaatgatttaa

SEQ ID NO: 9436 - DNA, 120 bp, Photorhabdus luminescens
ctgtatgcgtatgcaagaggtcagaatatctatctgctacatgcattcgtgaagaagactgagaaaaccccggcagcagccatcaagacagcccatgcgaggcttaaggagttcaaatga

SEQ ID NO: 9437 - DNA, 285 bp, Photorhabdus luminescens
atgaaaccaatatcactgaacgaattgaaggagttgatgttgaatgacacggagtctatcgctgcgtataaggaagccgacaaggaattggaactgatacagatattgtttgagatgcgtgagcgttctggcatgtcaaagactgagctggcagataaaatcggtatcaaaccatcaggtatcaatcggcttgaaaaaaatcctcttggcgcaagtatgaagactttggaacgctatgcagcagcgtgtggcgcggttattaacttcaacgttcaatatcagtaa

SEQ ID NO: 9438 - DNA, 1038 bp, Photorhabdus luminescens
atgtaccaaagtaaagaaattgaaaaaacgtttaaattcagcgagaaagacaaagaaacggttaaatatagccttaaccgtttctccgttgccccaatgttggactggacagatcgtcattgccgttattttcatcgtttattaagccggcaaacgctgttatataccgaaatggtgacaaccggcgcgattattcatggtaaaggcgattatctggcatacagcgaacaagaacatccgatagcactacaactgggtggcagtgatccgcaggcgttggcgcattgtgcgaagattgctcaggaacggggctatgacgaaattaacctaaacgtcggctgcccttctgaccgggtacaaaacggtcgttttggtgcttgtctgatgggggaagctgaactggtcgctgattgcgttaaagccatgcaggatgtggttaatgtgccggtgacagttaaaacccgtatcggtattgatgaacaggacagttaccaattcctatgtgattttattgatattgttgtgcagcacagtggctgcaatatatttaccatgcatgcccgtaaagcgtggctttctggtttgagtccaaaagagaaccgtgaaattccaccgctggattacccacgagtttatcaattgaaaaaggattttcctcaattaacgattgctattaatggcggtattaaatcgttggaagaagcgaaacagcatctacaacatgtggatggaattatgattgggcgtgaggcttatcagaacccgtctattctggcacaggttgatcatgaattatttgatgcttcaatgccggtagttaataccgttgcggtggtcaaagcactttatccttatatagagcaagagctatcaaaaggaacatatttgggacatattacccgccatattttaggtatttttcaagggattccaggggcacgtcagtggcgtcgtcatcttagtgagaatgcccacaaaccgggcgcagatatttctgttgtggaacaggcactagctatggtgactgagcggatgtaa

SEQ ID NO: 9439 - DNA, 447 bp, Photorhabdus luminescens
atgtttatggatagtttaagatatgaaaaattcagctatttcaatcataatgacgcttttttcgactcattaaaagaaagttatattgaatttccagattggttaaataagaaagctagaaataatgaatcagcttatgtattgtatgatactactggtaaaatagaagggtttctttatttaaaacttgagaataatgtttcagatgttgatcctcctttacctggtaatactcatcttaaaataggtacatttaaatttgaatcaaaagggacattacgtggacagcgttttataaagaaggtattcgatacagcaatagtgatggaagttgataatatctatgtgactgtttttgaaaaacatgattaccttattcgcttatttgaaaaatatggtttctataagcatggcgaaaagcgtacagataatggtatatacccgtaa

SEQ ID NO: 9440 - DNA, 1026 bp, Photorhabdus luminescens
atgaaaatatttattacatcagaacaaaaaatcaaacttgaacgtcttcatgacaccactcgtgatggtcaggtacgagacagaataaaagctatccttctggcttctgaagggtggagttctgtgatgatagcccaggcattgcgactccatcagaccaccgttgaccgccatatcagtgattacctcaatcaggggaaacttcaatctgataatggggggtctgatagtttgctttcccgagaacaaactgactttttaatcaatcacttatctcaacatcttttccatcacacccatgaaatcgtggcctatgttgctcagctctggaatattacctttagcattcccggcatgaataaatggctacaccgtcagggtttttcttataaaaaaccgggtggcgtccctcataaattcgacgcagaaaaacagcgacaatttattgaatattatgagaatcttaaagtcacagcgaaagacgaacccatcctttttcttgacgctgttcacccgactcaaggtaccaaactcggttatggctggatgcggaaaggcgagaaaaaaacagtcaaaacaacaggaagccggactcgcctgaatatattgggcgcgctcaacctgaatgccattggtcgtaccgtgttccaggaatatcagaccatcaatgactacaacatttgctgttttttcaatgaaataaggaagtcttatcctgactatcatcaaaaaattcaccttattgtggatggagcgggttacaacaaagctcatcttgttaaggagtgggcttatgttagcaatattgagttacattaccttcctccctatagcccaaatttaaacccaatagagcgattatggaaggtcatgaatgaacaggttcgaaataaccgttatttcgctgataaacatgaatttcgagacaacgtcttcaaatttttcaccacaacgctaccggatatagcggactcgctgatgtctagaattaacgaccattttcaggtgctaaaaactgcatcttga

SEQ ID NO: 9441 - DNA, 378 bp, Photorhabdus luminescens
atgaaagttttattatcaattaagcctgaatatgttgatagaatacttgatggttcaaagaaatttgaatttaggaaaattgcttttaagaataatcaagttcaatctgttgttatatatgcaactatgccgataggaatgattgtcggtgagtttgaaattaaagagatcatttctaactctccttccgttgtatgggaaatgactcataaatttgcaggtacaacgaaggatttttttgatagttattttgagggaagagaaaaggctgtcgcaattagtattggtaatgttaaaaaatacgataagcctttgcctttaaatatgcttggccaagggataacagcgcctcaatcttatcgttacttatctgcatga

SEQ ID NO: 9442 - DNA, 984 bp, Photorhabdus luminescens
atggcaaaacatatcgaattttcctctattggcggccccgaggtcctgcaatattgtgaattcacacccagagctcctgctgacaacgaagtccaagtagaaaatagagcgattggaatcaattacatcgacacttatattcgtagcgggctatacccaccagcacaattacccagcggcttgggcactgaggccgcaggcatagtcaccaaagtgggttctgccgtcactaccataaaagtgggtgaccgtgtagtttatgcacaatcaactttaggcgcttacagtgaagtacataatgttgcggaaagcaaagtcgctgttctgccagataccatctccttcgaacaagcggctgcttcttttctgaaagggctgacggtctattatcttctacgccgtacctacaagatccagtcgggcgaaccctttttgtttcatgccgccgctggtggcgttgggctaattgcctgccaatgggcaaaagctttgggtgcaaaactgattggcacagtcggctctgaagagaaagtacaacgcgctaaagatgctggtgcatggcaggttattaactataactgtgaaaatattgtcgaacgaatttatgaaatcaccaacggtgaaaaagtcggtgtagtttatgattctgttggtaaatcgacctggctgcactcgctggattgcctgaaacgccacgggttgatggtgagctttggcaatgcatccgggccagttaccggtgtcgatttagggattttaaatcagaaaggttcactgtttgttacccgcccttctatcgccggctatatttcaacgcgcgaagagttggatgaggcaagcaaagaattatttgatctgattgccagcggcaaaattaatgtggacgtaccagaaaatcagaagttctcgctaagtgaagcaataagggcacatcagattctggaaagtcggacaacgcaaggatcaagtttactgatcccttaa

SEQ ID NO: 9443 - DNA, 1410 bp, Photorhabdus luminescens
atggcgggaaaaaaatcaactcacaacaaaatggctgaaccgaaagatcgccaaatggaagggctgaaacttccgccacactctttggaagcggagcagtctgtgttgggcggtttaatgctagacaacgaacggtgggataatgtttccgaacgtgttactagcaatgattttttcagtcgtccacatcggcgcatttttgctgaaatgcagcggttgctggagatgggcaaccccatcgacctgattacattatcggaatctcttgagcagagtggggagctgaataatgtagggggttttgcttatctggctgaattgtccaaaaatacgccaagtgcagctaacattaatgcttatgcggatattgtccgcgaacgtgctgttgtccgcgagatgatcgctgttgcaaacgaaattgcagatgcgggctatgatcctcaaggcaggagcagcgaagaattgttggatctggccgaatctcgcgtgttccagatcgctgaaaatcgagccagtaaagatgaagggccgaaaggaatagagcagatccttgaagaaaccgtcgagcggattgagcaactctatcagcgccctcatgatggtgtaaccggtgtttcaaccggatatcaggatctggataagaaaaccgcaggcttacaaaaatcagatttgatcattgtggctgctcgcccttctatgggtaaaaccacttttgctatgaacctgtgtgaaaacgcagccatgatgcaggataagccggttttgatttttagtcttgagatgcccggcaaccagatcatgatgcgtatgctggcatccctttcacgggtggatcaaacccgtatccgtaccggtcagcttgatgatgaagattgggcgcggatctccagtacgatggggatattgctggaaaaacgcaatatgtatattgatgattcgtctggcctgacacctaccgaagtccgttcccgggctcggcgcgtcttccgcgaaaatggtggattgagcctgatcatgatcgactacttgcaattaatgcgggttccggccttatccgataatcgtactttggaaattgcagagatttcccgttcactaaaagccttggctaaagagcttcaagtgccggtggttgcactttctcagctcaaccgtagccttgaacaacgggcagataagcgcccggttaactctgacttacgtgaatccggctcaattgagcaggatgccgacctcattatgtttatctatcgtgacgaggtttaccatgagaatagcgacatgaaaggtgtggctgaaatcattcttggtaagcagcgtaacggtccaatcggtacagttcgcctaacgtttaatggtcagtggtcgcggtttgataactatgccgggccaagttatgacgacgaataa

SEQ ID NO: 9444 - DNA, 1080 bp, Photorhabdus luminescens
atgaaagcggcaaccgcagttattgaccgccgcgcgctgcgacataacttgcaacgggtaagggagattgctcctaaaagcaatttgattgcagttgtgaaagcaaacgcttatggccacggtttactggagacagcacatacgctggacgatgccgattgtttcggtgtcgcgcgaattggtgaagcattgacgttgcgtcatggtggtatcgtcaaaccgattctgttactggaaggatgctttgatgcggctgacctgctagtactggttgctaaccatattgaaactgtggttcacagtgttgaacagttgcaagctctagaacaagctaagttatctcatccggtaaaagtatggatgaaattggatagcgggatgcatcgcttaggtgtaaggccggaagatgcggaagaattttatcaacggctgagtcgttgtaaaaatgtacagcagcctgtcaatattgtcagccattttggccgggctgatgaaccaacggtagacaccacttgccagcagatagcctgttttcaggctttctgtgctgacaaaccgggagaaaaatctattgatgcatcgggaggtatcctgttgtggccggaagtccatcaagattgggttcgtcccgggctgatgatgtatggtgtatcgccattatctgataaaacggccgtggattttaacctgatcccagcgatgactctaaaatcgagcttaattgctgttcgtaagcataaagctggcgaatcggttggctatggtgggatctgggtcagtgaacgtgatacttatcttggggttgtagctatcggttatggtgatggttatccgcggagtgcgccttcaggaacgccaatacatattaatggtcgtgaagtgccgattgctggccgtgtttcaatggatatgatctctgttgatttggggccagaggcgacagataaagtgggtgatgaagtggtgctctggggagatgtactgccagtggaacgggttgctaagcacactggtatcattacttatgagctggtgactaaactcacttccagagtggtgatggaatacttggacgaataa

SEQ ID NO: 9445 - DNA, 1200 bp, Photorhabdus luminescens
atgttccagaatgttgatgcttatgctggtgatccgattctttcgctggctgaagaatttaaaaaagatcctcgtgcggaaaaaattaatctgagcatcgggctttattacgatgagcagggagtgactccgcaattgcaggcagtggctaccgcagaagaacaacttagagcgttgtcacagactgcttctctttatctgccaatggagggattggaatcctatcgtcttgcggttcaggaactgttatttggtaaagatcatccggtgttgaaacagcgggtggtggcaacgattcaatcattaggtggttctggcgctcttaaaattggtgctgactttttgcatcgttatttccctgattcagaagtgtggtgcagtgatccaacttgggaaaaccacgcagctatttttgcgggggcaggtattaaggtgaactattacccttattttgatacacagaccaaaggggtaaaattcagtgaaatgctggaaacattcaggaaactgccggcaaaaagcattattgtgatgcacccttgttgccataacccaaccggatcggatctgacctatgatcaatgggatcaagttgttcaaattgttaaagagagagagctcctgccattccttgatattgcttatcaggggcttgcggatgggatggaaaaagatgcttatgccattcgtgctatggcgacagccggtttgccttgtctggtgagcaactctttctccaagatattttctatgtatggtgagcgagtgggtggcttgtctgttatttgtgatgatgagcagaccaaagaacgggtattggggcagttgaaagcaggtgtgcgtcgcgtttactctagcccaccgagttttggtgcacaggttgtggcgaaagtactgactgatcctgctttgaaggcacaatggttaacagaagttgagcatatgcgcttgcgtattttggaaatgcgcacggtgctggtggatgctctgaaaacggcattaccagagaaaaactttgagtattttctgaaacagcgcgggatgttcagctataccggttttagccagaaacaggtggatcgcttgcgccaagaatttgctgtttatctggtcggtaatggccgagtctgtatggcgggcgtcaaccatcgtaatgttgcacgtattgctgaaacatttgcggcggtaaataagtcataa

SEQ ID NO: 9446 - DNA, 1014 bp, Photorhabdus luminescens
atgcctatcatagcacctataccccgcaatgaacgacgccagatgaaaaaaattatccagaacacccgagataaagattatgctcgcaggctcatggccatattgatgctgcatcgaggcgagtctgtctctctggtcgccaaaaccctttgcgccagtcgttcttctgtctatcgctggataaactggttgactttatatggtctggaaggactcaaaagcctgcctgtgggcagacccgctgtctggaatttaatcccgctttatcctttactgtcttttttattgcaatattctccccagcaattgggttgcctgcgttctcgctggagtcttgagttttttataattaaaatcaatgaattattaaacataaaattatccatcagtaccttctatcgttacttacataaaatgggtatcgtgtggcgaagggcagccccgacgcttaaattacccgatcccgagtaccatgaaaaaatggcgaaaattaccgaggcattgtcaacgtgttcagaaaaacatcccgttttttatgaagatgaagtcgacatcgagctgaatccaaaaatcggggctgactggtatttaaaagggcaacagaaacgtatagtgacaccaggaaaaaaccaaaaacattattttgcaggttgcctgaatgttcaaacgggaaaagtgacttatgctgacgggttaaataagaattctcatttatttatcaatgtattggaagaacttgaacgccagtattgtcatgctgaaaccctcactttgattttggataattacagtatccataaaagccgacgggtcagagattggctggcttgtcatcctaaatttaatctgttgtttttacctgtttattcaccctggctgaataaaattgagcgtctgtggcaatccttacatgaaacggtgacacgaaatcatggctgtcagtatatgtggcaattgcttgagaaagtgaaaacgtttttaaattcatgtctctacaggaatagcagagaataa

SEQ ID NO: 9447 - DNA, 255 bp, Photorhabdus luminescens
atggggttaaagttaaatattgcgtggtttgataaaaaaacggcagagtttattggtgaggaatattctggagatctgggagatgatggttcagtaatagaaaaattagggcttactattgaagataatattaataatggtgcgttcgatgtaaaaaaagaatgggtgccaacacttgaatcatgttttaaaaataaaattgaaacagataaatattggtataaaatatcatttgactatcgagataaatggtaa

SEQ ID NO: 9448 - DNA, 420 bp, Photorhabdus luminescens
ctgagtaaaaatatgcgatatccagtaaaattcgaacatgacgaaacaggttgggctgtgatgttcccagatatcccagaagccttaacaggcggagataccagagaagaagcattagctatggcgcaggatgctctggttactgcgtttgatttctactttgaagaccggcgcgaaataccaacaccatcgactaaaggtgaagcttttgtcgaagtaccagccagtatagcggctaaggttttactgttgaatacgatgcttcaaacaagaacaagcaacgcagaacttgcacggttactgggaactcgaccgcaagaaattcaacgtatagtgtcattaagtcatagcactaaaattgacactatcgcgaatgcgttaaatgccttgggtaaacatctggaacttgttgccatttaa

SEQ ID NO: 9449 - DNA, 177 bp, Photorhabdus luminescens
gtgaagcaaagcgagtttcgccggtggcttaaagctcagggagcagaattcaaagatgggactaaccacttgaaagttttcctgaacggtaagcaaaccacgatgccaaggcaccctagtaaagaaatcccagaaccactgaggaaattaatattaaaacagccaggcatcaaatga

SEQ ID NO: 9450 - DNA, 1086 bp, Photorhabdus luminescens
atgacgaatcgggaaaaacaaatattgcaacttctgagacgagatccgttaattccacagcaggaaatggccgatattttaggtataagtcgctccggtgttgctggtcatattatgaatttaatgaataagggatatataaaaggcaaaggttatattttatctgatcaccattatgtggtggtggttggttctattaatatggatgtttacggttattcatcgaataaactcatttatcaagactctaacccaggaaaaataaaatgtacccccggtggtgtaggcagaaatattgcccaaaatatcgctttattaggtaaagaatgtcatcttatttctgttgttggcgatgatttctatggtagcactttactggatcaggccagatgtgcaggtgttaatgtcgactattgctataagctttatggtgaaagtacctcgacatatatctctctattagatgacggcggtgagatgctggttgccatcaacgatatgcatattttggaaaaactgacgccatcgttgttagcgaatcattgtgatcttattcagcacgccggcgtgctagttattgattgcaatttatctgaagaagctttggtttggttgttgactaatgccggaacggtgccggtatttgtggatacagtatccgcatttaaagcacctaagattaaaaactggctttcctatatccacaccttaaaacctaattgtctggaggcggaagcgcttagtggaatgaaaattacccaacctaccgatgttccggcagtggcgcggtggtttcacgatcaaggtgtgcagcggttagtactcagcatgggcgtagagggtgtctactttagtgaaagcgatggtgtggcaggctggtcacttcccatcagtatcaagattgtcaatgtaacaggtgccggagatgccatgatggccggattggtgaactgctggctagaaaatatgacgctggcagaaagtgttcgctttgctcaagggtgttccgcgctcacgctctcttgcgaattgaccaataatccaaatctgtcaaatggcagtgtccaaaaactgttggaattataa

SEQ ID NO: 9451 - DNA, 939 bp, Photorhabdus luminescens
atgaaaaatcatgctattagcaataaatatttggatatttccccagaagttacagaggctttagagaataaccgaccggttgtggcgttagaatcgaccattattgctcatggaatgccttatccgcaaaatgtaaagactgcgctacaagttgagcagaaaatcagggaaaatggtgctgttcctgcaacaattgctgttatcaatgggatgatgaaagcaggtctgtcgcatgaagaaatagcgtttttggctagaaaaggtgatgaaataactaaagtcagccgtcgtgatttaccctttgttatcgcggctggaaaaaatggcgcgacgacggttgcttctaccatgattattgcggcaatggccgggattagaatcttcgctaccggcggtattggcggtgtgcaccgtggggcggaacagacttttgatatttctgccgatttacaggaattagcgaaaaccagtgttgcggtagtctgtgctggtgctaaatccattttggatcttggcttgacaacagaatatcttgaaactcacggtgtgccactgattggttatcagactcacgctttaccggcgtttttctgtcgtaccagtccattctccgtcaatattcgtctggattccccagaacagatagctcaggcgatggcagtaaaatgggatactggattacagggcggtttggtagttgctaatccgattcctgagccatacgccatgccggaagcggagatcagtgctgctatcgaacaagcagtacgcgaatccatagaacagagagtaaatggaaaagcgtgtacgccgtttttgttagcaagagtctctgagttaaccgggggcaatagcctatcttccaatattcagttagtgctcaataacgctgaactggcagcgaaaattgcttgttgttattgggagcgccacatgtga

SEQ ID NO: 9452 - DNA, 2835 bp, Photorhabdus luminescens
atggataacatcgaagttcggggcgcacgtacccacaatctcaaaaatatcaatctgataattccccgagacaagctgatcgttatcacgggcttgtccggctcaggtaagtcttctctggcatttgatacgctttatgcagagggtcagcgccgttatgtggaatcgctttcagcttatgcgcgccagtttctgtcactgatggagaaacccgatgttgaccatattgaaggattatccccggccatttctattgagcagaaatcgacttcccataatccacgttcaaccgtggggactattactgaaattcatgattatctacgtttgttgtttgcccgtgtaggggaacctcgttgcccagatcacgatattccattaaccgcacagactgttagccagatggtagataatgtgctaacactgccagaaggtcatcgtctgatgttgctggcaccgatcgtcaaagagcgaaaaggcgagcatactaaattattggataatctggcagcacaaggttatatccgcgcacgcattgatggtgaagtctgtgatctatctgatccaccgaaattagaattacagaaaaaacataccattgaagtggttattgatcgctttaaagttcgtgccgatctggcacaacgtctcgctgaatcttttgaaacagcgctggaactttcaggcggtaccgctattgtcgccaatatagatgataataccgccgaagagctgattttctctgctaacttcgcgtgtcctacatgtggctacagcatgagtgagttggaacctcgactattctcttttaacaacccagccggtgcttgcccaacttgtgatggtttaggcattcagcaattttttgatcctgatagagtcattcaaaatggtgatatctcccttgccggcggtgcaattcgtggttgggatcgccgtaatttctactattttcagatgttacgttcattagcagagcattataaattcgatatcgaagcccccttcaattccctcagcgccaatattcagcaagtggtgttgtacggctccggtaaacaatccatcgaatttaaatacaccaatgaccgtggcgataccacagtgcgtaaccatccgttcgaaggtgtactgcataatatggaacgccgctataaagagacggaatccaccgccgttcgggaggaactggcgaaatatattagtaatcgttcatgtatttcctgccacggaactcgcttacgtaaagaagcccgttacgtatttattgagaataccaccctgccagagatctcagatttcagtatcggccatgcgatggattttttccaaaacattaaactcagcggtcaacgtgcgcaaattgctgaaaaagtactgaaagagatccgcgaccgcctgaaattcttggttaatgttggtctgaattatctgacgctctcccgttcggccgaaaccctgtccggtggcgaagctcaacgtatccgccttgccagccagattggtgcgggtttagtgggagtgatgtatgtacttgatgaaccttctatcgggttgcatcagcgggataatgaacgcctactagaaacactaatccacttgcgcaatctgggaaataccgtgattgtggttgagcatgatgaggatgccatccgggctgccgaccatatcattgatatcggccccggtgcaggtgtacatggcggtgaaatcgtcgcggaaggctcagttaaagatattatggtgagcaaagattcactaacaggtcaattcctgagtggagagcgtgaaattgccatcccagagaagcgtatctcggcagatccgaaaaaggtgctgaaactgatcggagcgaaaggtaataacctgaaaaatgtgacgttcaatctgccagttgggttatttacttgtattaccggggtttctggttccggtaaatcaacgctaatcaatgatactctgttcccgattgcccaacgccagttaaatggcgcgaccaatatcacccctgcaccttatattgatattcaagggctagagcatttcgataaagtgattgatattgaccagagcccgattggccgaactccccgctctaacccagcaacttataccggcgtatttacaccagttcgtgaattattcgcaggcgtacctgaatcacgcacccgtggttatacacctggacgattcagttttaacgttaaaggtggacgctgtgaagcttgccaaggtgatggcgttattaaggtagaaatgcacttcttgcctgatatttatgtcccttgtgatcagtgcaaaggtaagcgttataaccgtgaaacactggaagtcaaatataagggcaaaaatatcaatgaagtattggatatgacgatcgaagaagcccgtgaattctttgatgcggttcctgctctagcccgtaaactgcaaaccctcatggacgttggactttcttacatccgtctgggccaatcagcaaccacgttatcaggcggtgaagcgcagcgagtaaaactggcgcgtgaactatccaaacgcggaactgggcagacgttatatattcttgatgagccaacaacaggtttgcattttgctgatattcaacagctattaacagttctgcatcagttacgcgatcaagggaataccattgtggttattgaacataaccttgatgtgattaaaaccgctgactggatcgtggatcttggcccagaaggaggtagcggcggcggtgaggttctgatttctggtactccagaagaggtcgcggaatgtgaaaaatcacataccgcacgtttcttgaaacctatattgaagaaagaagcataa

SEQ ID NO: 9453 - DNA, 537 bp, Photorhabdus luminescens
atggccagcagaggcataaacaaagttattttaatcggtaacctggggcaagacccggaagtccgctatatgccaaacggcggtgcagtgactaacattactctggcgacttctgaaagctggcgcgataaacagaccggcgagatgaaagagaagactgaatggcaccgggttgttttgtttggcaaactggcggaagtcgcgggtgaatacctgcgtaaaggttcacaggtttatattgaaggttctctgcaaacccgtaaatggcaggatcagaacggtcaagagcgttacaccacggaagtagtggtaaacatgggcggtaccatgcaaatgttgggtggtcgtgctggtggtggtagtttccaggatagccaacaatcacaaggcggaggttggggacagccacagcagccacaaccacagcaacaatctcagcagttcagcggtggtggcgcaccttcgcgtccagcccaatcttccgctccacaaagcaatgagccaccaatggattttgatgatgatattccgttttag

SEQ ID NO: 9454 - DNA, 189 bp, Photorhabdus luminescens
atggcggcaccccaatgtgaatactgtagtgccagaatagatccttttgaagttcatcatgtaagaaaactcaaggacataaaagcggatacggctctttggaagaaattaatgattgctcgtaataggaagacattagtgctctgccagacatgccatatcaattttcacaggggaacattgccttag

SEQ ID NO: 9455 - DNA, 1083 bp, Photorhabdus luminescens
atgttaaggttgaaggtactaaaggcaaaaaatggtgattgcattttattgtcttgggaaaacaatggagtcactcgcaatattctaattgatggtggaaaatcatccgtatacaaaactggtccgttaaaaggtgaactttataaaacattaaagttaatagaagagcgcaatgaacgggttgataagttgattcttacccatgtcgatgatgatcatataggtggaatactaaatggattcaggtcaggagagcttctaatttcgctgtgtgacaaggtatggtttaactctggtaaattgattaaagaagcatttgatagtgacgtactaccagaaaacgaattggagctggagcggatcaatgttcaagacggaaagaccagtattcaacaaggagtctcgttcgagaaacggatatcagagttaggtatttgggagaactggctcattgaaagtggatatacttgtgagttttttggtgcaaaaatcacagtgctatctcctaaaagagaagacttagcaaggttactttgcaagtgggaaaaagaggtcccgcaaagcataacatcaggaaagaagactgattatggcaagtcattagaagagcttaatctaaatgataaatttttaagtgataaatctattcataatggaagctcgatagctattttgtttgagtacaataatcataagattttgcttttgggtgatgcacatgatggagttgtatgtgacgcaatatcgagcttaaaagacgaacaaggtcagaatataagttctagtaataaactgaaagttgattatataaaactatctcatcatggtagtgagtttaatacaagtgcccgatttctaaatttaatagattgtaaaaattttatcatatctacagatggaagttctcatgaattgccaaataaaaaaacaatagcaagaatagtgaaaaatgtagataacgcaaacattattttcaactacccgactctattaaatagaatctttagtgttaaagagatagaagagttgaaaaatataggtataactacagataattgtgatgaattgatccatgttaaatga

SEQ ID NO: 9456 - DNA, 933 bp, Photorhabdus luminescens
gtggaagaaggaagtggtgtattaataaatccatactcaactcaatattcatacatattgacagcaaagcacgttgtagaagatataagcgttgataaaatagaagtgaaaaatattgaagggcgaaatatatctgttttagacaaagtagaacacccagtgattgatgtagctattcttaaagtcgaacgtttagatggtgtcgaaatatctcacattgaaaacttttataaccaagaaaaaaaattaaagttttacggttacccaaaaaacaagagacataatcacatatttagagagcaattatattcttatgattgtttattacacgatatccaaggcaatacatccgtattcaccattaatgagctaactcaatatgaagatattgaaggtttttcaggtggtggtattttttttattaatgaagaaaaccaagatgtatctcttgtagctatcgaatttgaagtcagtaatactcaggctgctgatagtaaaattaactgcattagaattgatgcttatcttgattttcttcaagataaaggttgggatgaaattaagcccattcatttatctagttttaaattttatcgcgataatatctttgaaaatcttgatttagaaaatgaggatagtcttgatgttgtcaagaatttactaaaaataacactaaataattataagatctttaactcttattatgtgacaccaaacaaaatagtcgaagagtttgcgaatcgaattctagcgcataaccaagacttaaaaaaactatatgataaagaactttggtgtgcattcttggagttttttgctatttatttgtcaattttcgctccagatgatgaagactcttgtaattctaattatttagaacggttgtttttgaactttagattcatttacgatcattaccaatttaaaatttag

SEQ ID NO: 9457 - DNA, 561 bp, Photorhabdus luminescens
atgaacagtaagaatttctcaataaataataagtttcaggaactaaattcagagttaggcgtagaattctttgtcctatctgtttgtatatttgattctgcaatgataaatgcattttgttatgtaactcctaccacgagtattctaaaggaaaggtggagagagatttccgataacttaaattatgaatatttaagtaaatatgaaccatctgaatttgagcgttggaataattatcttgtttttatttgtcaggatgctattcctgataatataaagtatgagatagagaatgataaattttatatgagaaaagttgcactagaattaaaagggttagaaaagacagatatagaaaaagaaaccaagaagatactagatgaaaagttactcttgtccaatatacgtttgagcaataatgttgtttttgatagaagttgggaacaatttctaggtgatcattcaaaatctattcttttggctgggttgtctggaggaagagatggaaaatcaaagtctatgcgagaaaactggatcaataaactattgagtgatgaataa

SEQ ID NO: 9458 - DNA, 3159 bp, Photorhabdus luminescens
atgaaaataaaaaaagttgaaatacaagcatttaaatcatatttagagaagaaggatggtacttttgactttattcatagtacatcgggagagcctgcgaactttgtatcactattctcaccaaacggattcggtaaaacatcgttctttgatgcaattgactttgctatcacaaaaaaaataagccgatatgtgagaaatgaaaggttagagaaaattaatttagaagaaagtaatcaatataacattaaaggtgaatctcaactgataataagaaataaaaatgctcctaaaaatattgagacgcgagtggaggttattactagtaaatctgaaaagccatttatttcatcatataagaaaggaagaaagggaagttcagactggagaattcaatcaaagagtataacaaataaatattttgaatcctctatgttgtatcaagaatctattgattcttttttaagagaaaccgactctgaaacaagatttaaaaaattctccgaggtagatgatgaattagtaaacattaatagtgcacgttctacgctcttatcattgaaatcagacgtgtctaagaaaaaacaagaactagttgacaccaaaaataaactatcaagtgaaataaataggcaaaaagataacaaggattacgttcatagcattaatataataattaaagatgtaaatgagtacttagatgaaataaaaattgatgaggtaatagcaccatttactaaaaatgaacattttcacctttcagctcgtttaaaagaagctgaaaatataattaaaaatagagttaaagaaaatgatgaaaagctttctaaaatagaggttaatttatctcaattaaaacttggtgcatcgatctattataaatacaaagagtgtattaatgaaaggtcattaattttagacaaaattaagttttatgatgaagttggtgccctcaaagaaagttttaatacgttagagaaagagttattattaaatcaggatgttattttaagcctcagagaattaaacaaaaatgcccatgaatattttacctataagttaaagttagatagtactctcaaagagattgaagaattaaagctgaagttaaaaatgaatgatgctttaatcaaaagtttaaatgattcactcaatgaaaaaatcatttttcaccaaaaggtttgtgagaatattgaccaattaggtaaagagcaagccaacttatattttgtgtttaatactataaaagataaatcaacaagtttagatggtgttgaaaaagaactagctaatatggaaatagagattaaaaaaaataaaggccagaaggatgtggcagacatatgtttatcatcattagagaagttgaccctttttgattttaaatggctgcctgaattttttattatccatgaagataataaaaatgagttatctgatatttatgctaagtattgttacgtttacaaaagtaaggttgagattgatggtaaaataaaatcaataaataaagagttagaaagtataaatcaacaacaaactgacatatcttttttaatagataaagcaagtagtattgtcataagtacaaaacaatctcactgtcctttatgtgagcgagataacgaaacctatgatgagcttatttctagaattaataacaattctatgctatcagatatagaaaagaaaaaaaatgcctcgaaaagttcattgatggaagaactagaacaattatctatgaagttggatagatttaatgttgaatttattgaaaagaaaaaatcaatatcaaatggtttaaaagatgaaatttcttccttggagaatttaataaatgaatcttctcagaaaaaatctactcttgtagaaagtaaaaatatctttatatctgaaataaataaatttaactcatctgtaatgtttatgtcaaagtatgactattcaaaacatttgatttcaaaagtgcaatgtgaaagagatagagagcattctatatctaaagagattgaggacataaaagagtcgataaagtcaagagttaatcaaatagagcttaataagaaaataattgacctagaaaatgaacgttttaaattggtggtacatttatctaagtattctgattttattaaatctaatcaattaagtgaaggcgtaaataaggatgactttatttcttttgttatgcttaaaactgacaaattaaatgatagtcaaaaggggctaaaggatagaatcggaaaaattgtcattaaaattaacaagcttgaaagtgagaataaagattcacaatttaaaggtgttagtaaggaaaagatgaacgccttattggttgatttggaagataagatgtctttattatctaaggaaaaccaatggtttattagtgtggcagactcatttgataatgaggataactctgtggtttacacaaaagtgaaagattctctagagttacaagtcactggtatcaatgttaaaaacagaacgttatctgattgcttggccaaattttcatctattgagagcatttcatcaaagatcgttgattactctgataccagcttactagagaaagaactttatagtatatcctctaaagtttctaaattgagtgaagtaattgttgaacttgacagtgatataagaaaactcgggaatgaaataaaattaagagttgattctttcttcaatacagaattgataaataagatatatagcagcattgatccacatcctgagtataaaaaaattgtttttacttgtacgtctgatgataatccaaggttattaatatctgcacaaagtgaaaaaaatgacaaactaatgtctccaactttgagttttagttctgctcaaattaatgtcttagctttgagtatttttcttgcgagagccttgtcttcaaaggacgatgaaggcaatcctgttgattgcatactgatagatgatcctgttcagtcaattgatgcaatcaatactttaggtttgatcgatactcttcgaatgctttctattatgttcaataagcaaattatagtgacaactcatgatgagaattttcatgagttgctcaagaaaaagatgccaagcgatctattttcttctaaatttttgagattaagctcttttggaaaagtaagttccgatgcatag

SEQ ID NO: 9459 - DNA, 927 bp, Photorhabdus luminescens
atgaatcctgcgctacttaaacacgttactcagataatggagcaaggctcaaaaagttttgccagtgtcacccgacttttcgatacagcaacacgacacagcacaatgatgctgtacgcctggtgccgttattgtgatgatataatagacgggcaagagctggggagacaaataagcagtgttgataagtatagcgcccgcgagaaacttcaaatgctgcaatacctgacaaagcaggcttacgacggtttgccgatgaccgaacctgcttttgcagcctttcagacagtagctctgagtaatgaaatccctcagcaacaggccttcgaacatctggaaggattcgcaatggatgtactctgtgagccttacagaacgttggatgatactctgagatattgctaccatgtcgcgggagtagttgggctgatgatggcaagggttatgggggttcgcgaggcgagtgtgctggatcgggcctgcgatctaggaattgcttttcagttaactaacattgctcgggatattattgaggatgcgaaggccgggcgttgctatcttccgctagaatggcttcaccaagaagggctaatgccagacacacttatttataccgaaaaccgtcctgcgctagctcgggtggcatcccgattgattgtggaagcggaatcttattatacctccgctctgacagggcttgttggtttacctttgcgttcagcctgggtcatcgcttctgctcatggtatctatcgtgaaatcggcattaaagtgcaacaagcaggagtacgggcctgggaatgcagacaaagaactaatcgtggagagaaggttaccttattaatggctggcgcaatgaaggcgcttatatctcgggtggcgataacaacgcctcgcgatcccaaattgtggcagcgacctcattaa

SEQ ID NO: 9460 - DNA, 1482 bp, Photorhabdus luminescens
atgattaaagcgctggtaattggtgctggttttggtgggctggcactggcaataaggctccagtctgcggggattccgacatgtattttggagcaacgggataaaccaggtggacgcgcttatgtttataaggaacagggattcacctttgatgccggccccaccgtaatcaccgctcctaatgtcattgaagaattgtttacccaggctggtaaacgtatggctgattacgtcgatttacttcccgtacaccctttttatcggctctgttgggagtcgggtaagatgtttgattacgacaatgatcagcaacatctggaagcacaaatccatacgttcaatccaagagatgttaacgggtatcgacgctttctagactattcccgggaagcctttaatgaaggctacctgaaacttggaacggtgcccttcctctcttttcgcgacatgttgagtgcggctccacagttgatacgtctacacgcatggcgtagtgtttatagtcaggtggcacgctttatcaaggatgagagcctgcgccaggcattttcatttcactcgctattgataggaggtaacccctttgctgcatcttctatctatactttgatccacgcactggaacgagaatggggagtctggtttccgcgaggaggaaccagcgctctggttgaggcaatggtgaaattgtttactgacattggtggagaaattgagcttaatgcaaaggtaaaacgcttcaccacccatggcaatcgggtcacaggtgtccaattagctgatggacgaaatatgacatgtgacgttgtggcctcaaatgccgatgttattcatacctataagcacctgttaggtcagcatccggtcggaatagcccgcgctcgaacactggtgcgtaaacgaatgagcaactcactgttcgtgctttatttcggtctgaaccatcaccatacgcaattagcccatcatacagtttgctttggtccacgctataaggaactcatcgaagatattttttatcatgaccgactgtcagaggatttttcactctatctccatgccccctctgttactgacccatcccttgctccccgaggatgcgcaagttactacgttctggcccctgtaccacatttggggacagctaatttaaactgggatatagaggggccacgcttacgtgaccgtattttcgcgtatctggaaaagtactatatgcccggtctgctcaagcagttagtcgttcatcgtatttttaccccatttgattttcgtgaccaactcaatgcccatctcggttcggccttctcctttgaaccgttgctgacacaaagcgcttggttccgaccacacaatcgggacaaccgcattgataatctgtatctcgtcggcgcaggcacgcatcctggagcaggtattcccggcgtgattggatcagcaaaagccaccgccacattgatgttagaggatatcgctaaatga

SEQ ID NO: 9461 - DNA, 1176 bp, Photorhabdus luminescens
atgatgtacgactgggatctgattctggtgggaggaggattggccaacggactgatcgcaatgcgtttccagcagtgtaaaccacatctgcgagtgttgcttattgaaaacacagaaacaataggaggcaatcacacgtggtcatttcatcaacatgatcttactgaggcggaacatgagtggatagcaccgctgattacctatcgctggtcaggttacgacgtcatttttccagcatttcaacgcacattgccacattcatatttcagtatcacatcccaacactttgcaagcatactccatgcatatttgggcgaacgtatacagactcgtttattggtacaggagctgactccacagaaagtttacttacaggacggctcgtctctaagtgctggcgcagtcattgatgggagaggctggcgaccaggaccatttatagggagtggcacccaggcattttttggtcaggaatgggagctggaagagtcgcactctttaacccacccgattttaatggatactagtgtgggacaggatacaggttatcgatttatctatgtcctgccgttctcctcaactcgtctgctgatagaggacactcattacgttgatcgggggccacctgataaggctttgtcgcaggctactatcgcagagtacgcgaagaaacatggatggaaactgggtaaactcattcgagaagagagcggttgtcttccaattacacttacgggagattttacctctttctgggcacagctagcaggacagcccacctgtgggttacgtgcagctttgtttcaccccacaacaggctactctctgccacacgctattcggttggcagatcgtattgttgctctgccggagcttaccgatacctccttattcattaccctcagggattacgcacgacaacagtggcaacaccagcgctttttccgtcttctaaatcgcatgctcttcctcgctggggatccacaacaacgttggcaggtaatgcaacgtttctatcaactttccccaaatctgattgcacgtttttatgcggagcaacttaattccgtcgacaaggcccggattctcataggtaaaccaccagtgccgataaagggtgctctaaaggcaatgtttaaacaacacaagaagcttcagggtttttattatgattaa

SEQ ID NO: 9462 - DNA, 717 bp, Photorhabdus luminescens
gttgtccatagcctgttcccccctcggagctgtttttggtgcacaccaaaactttgctcctggaacaggcttctcgtcaatttcttatccagaattcgggttaattatgctctgcgagcagtacagatgattgaagccgatgctctaattatccatctgaatccgctacaggaggcgctgcaacagggaggagaccgtaactggtgccatattctatatgctattgaacaactcgtaacaaaacttggggttcctataattgttaaagaagtaggttcaggcttatcgcttcctgtcgcacgccaattggcagaagctggcgtcagtatgctggatatagccggggctgggggaaccagttgggcagcgattgaagcagaacgagcatccacaccgtatcaccgcgcattggccatggcatttgctgactggggaattccgaccgcgacagcactgcgtgaaatacgcgaggcacttccaaatatgccactgatcgcctctggcggtatcagaaatggtgttgatgccgccaaagcttattgcatgggggcacaattggtcggccaagccgctgccgtcatacatagtgcagccctctccacagatgcagttatagaacatttccaattaattattgagcagataaaagtcgcctgcttttgcacagggagcgccgatattgctgcgctgcgtacagctgttttgctaccaacatga

SEQ ID NO: 9463 - DNA, 885 bp, Photorhabdus luminescens; identical to SEQ ID NO: 7045

SEQ ID NO: 9464 - DNA, 423 bp, Photorhabdus luminescens
atgaaaaagatcgatcacactcagcgcaagaatgagcatctggatattatattccgtcctcctcaaacggagtcccaagtaagtacggggtttgctgagtggcgatttcagcattgtgctctgccagaattggatctagacagtatagatcttaagtgttccctctttggaaaaattttgcaggcaccactgctcataagctctatgactggaggggttcatcgtgctcatgcgattaatcatcatcttgcagaggcagctcaagtactgggcatttcaatgggagtcgggtcgcaacgtgttgctcttgaaaatgaagcaaacgatgggcttagtcgctcactacgccagatagctcctgatattctccttttcgctaatctcggggcagcccaaattcgtggcgagcgcgggtttaattaa

SEQ ID NO: 9465 - DNA, 903 bp, Photorhabdus luminescens
atgaacgtcagtactgcacgagctatgaattacgaagagacattactggagctacagagtgcactacaacaacacctagaactggtacttccttcaggagccccagatgataaagtctgcgcagccatgcgagaaagtacactggtgtctggaaaacgtatccgccccctcttattgctactcatagtcctggatcttggagaaaacccctggaagactgactttctacagctggcatctgcaattgaaatagtgcatgccgcctcattaattttagacgatcttccctgtatggataatgcggagtatcggcgcggacgcccggctattcatcggcagtatggtgaaagtgtagcgatcctagcggctgtagccttgctgagccgggcttttggcctcattgtagaaacaaacctttctgaatacgataaatctgctgctgtcgccatactttcccatacagtgggtttaaacggtcttgtccaagggcagtttcgcgatctgaacaatacattatgtgctggtaattatcatgccattgctaccaccaacgatttaaaaacgggtttgcttttcgacacaacatttcagttagcggcaattgctgtgaatgcacctgatataattcgccaggcattgcgtcatgtatcacaacatctggggcaagcgtttcaattactggatgacttgagcgatgacctgaataatacagggaaagatatgtatcaggataaggaaaagttaacaatggttacgctgctcggaaaatctaaagtgcataaacaattacgcaggcacatcagatacattgataaatatttggcaatagtgtatcgcagaaatttagcttcacgatattttatacgacactggtttgataaaaatattgcgatgtttaattaa

SEQ ID NO: 9466 - DNA, 1473 bp, Photorhabdus luminescens
ttgagcgacgttgtattatcgaaaaaccatattaatccctttcaatctcagctggaggaacttgattcaaaattagttcctattgagggagaggctccttcagagttaaaaggtactttctttagaattggtcccggtcgcctgcataggggagacgaatattataatcatccatttgatggggatggaatgatatttaaagtaacgttcagtgataatgggatattctatagaaacagacatgtgttaacaaaggaatacttaaaagaggaagaagctcaaaggttactgtatcgctcggttggaaccgtccccaaaaaactaaaactcaggatgagattttttattattaaaaatccggcaaatacaaatattgtatatcattctcataagcttctggcgttgtgggaaggagggatgccacatttaattaatccggtaactcttgagacaatttcaaaatatgacttttctggaaagctaaaagcacgattttctttccttcccaaacttaaccttcgtgaagtaccatttacagcacatcctaaaaaaataccaaatgatgataatttatatggatttggtgtgacatatggtattggatctaagttaacgctatacaaaatagacagtgccggcgatatgatggttatacgcaaaatttcgcttaagaaaaggtatttaattcacgatttcatagtgacaaaaaattactttttattttttttaggtgggccgcatataaatcttaagttgagcaatgtaattggcaatgaaagcatcattgcatccatgaattcacgtgaaagtgaagatggccgggttcttttagtttcaagaaaatgccatgatgtgaaattctatgatgcagttcctggatttatttttcattttgcaaatggttatgaagatgccgatgggaatgtgattttcgacgcctcattttggcggtcattcccagtatttacacagaatatatttaaaaataatagttcagaactttgtcgttttactttatgcacagcatccgggaatgttgataaagaaattttattcagggggaatactgatttcccagccataaaccctacagtctgtggtagacagcacagatatgcctggttcgtttgctgggaggattctgacagtgaagggagatcaataattaaatttgattgttttgataagagtgtattaagccacagttttgataatgatttgccggaagaacctgtttttgtagccaaaccgggtgctgttaaagaagatgatggttggcttatttttaaggtttatgtcgaaaaattgcactgtacagatatcgtagttttaaatgctgatgatctctcaatggtgtgcagattacgtttgccgcaccatattccaatgggaatgcatcactgctggataaatgaagttatgctataccctatggatttcaagatgcatcgcgacggcaaagaagcaacttga

SEQ ID NO: 9467 - DNA, 195 bp, Photorhabdus luminescens
atgcttgcactctctcacgttccaagcctgagtacacgtttatctggcgttgctcctaatgtttcagtcacccttctacatgtacgccatcacatcaaaggtgtgttactgtttatagttatagaaaaattcttcttcgtgatttcagttacaaaaatccctttggaaaaaaatagttctgttcatcttcaataa

SEQ ID NO: 9468 - DNA, 330 bp, Photorhabdus luminescens
atgacattgcaagaaattggcaagatgagtcttaaaaactcaggtggattcgttgctagaatccaatttagttatatggatggcgacggtgaaaagcatttaagtcagcaaggtaataatattactcttggattaacagatactgttgaccctggcgatcttggcgttcctgatggctcaacagtttttatgcatgtatttgtagtatggggaaatgataatgaagcccgtaaagcttttttatacaaaaaaggaagtcaagtacttgccagctacaatatcagtggtacgacattaagcaatgatcttggtttgattgatatctcgtaa

SEQ ID NO: 9469 - DNA, 849 bp, Photorhabdus luminescens
atggagaggattgaacgccacacttgttttgggggatggcaggatgtttatcagcatgaatcgaccgtgcttgactgcaccatgaattttgctgtctaccttcctcctcaggctgaacatcagaaattaccggtgctgtattggctctcaggtctaacatgtaatgagcagaatttcatcacaaaatcaggcgctcaacgctacgctgccgaacagggtattattctcgttgccccagataccagccctcgtggtgagaaagttgcagatgatgacgcctatgatttaggtcagggagccagtttttacctcaacgcaacacaaaatccttgggcgccgcactaccgtatgtatgattatgtggtgtcagagctaccaatactgattgaagcacactttccggtaacaaccgctcgggccattagtggtcattcgatgggaggccacggcgcactgatgatcgcactacgcaatccagatcgttaccacagcgtatcggccttttcaccgattgttgctccttctcaagttccttggggagaaaaagcttttcgcgcttatctgggcgaagatcgtgacacatggaaagcctatgacacaatcgagctgctggctaataacgccgagccattgcatatgttaattgacatcggtaccgatgatccgtttcttgaagagcaactacgtcctgaactgctgaaggatgtatgcgaaaacacaggacatccctacacactgaacctgcgcactggttatgatcatagctactatttcgtctccagttttatcggtgaacatatcgcatatcatgccaatgtattgaaggagatttgtattgataatcaataa

SEQ ID NO: 9470 - DNA, 1110 bp, Photorhabdus luminescens
atgaaatcaagagctgctgttgcattcggaccgggccgtccccttgaagtcgttgaaatcgatgtagccccgccccaagccggtgaagtgctggtcaaaatcagtcataccggtgtgtgtcatacggatgccttcaccctgtcaggggatgatccagagggcgtttttcctgtcatactcgggcatgaaggcgctggcgtagtcgttgaggttggtgaaggcgtcactagcgtcaaacccggtgaccacgttatccctctttataccgcagaatgcggagagtgcttgttctgcaaatcaggaaaaaccaatctgtgtgtggccgtacggacaactcaaggaaaaggtgtaatgccggacggcacaacccgtttttcctacaaagggcagcctatttatcattatatgggatgctccacattcagcgaatatacagtcgtagccgaagtatcactggcaaaaatcaacccggaagcaaatcatgaagaagtgtgcctgctaggctgcggtgtcactaccggcatcggtgcagtgcataataccgctaaagtacagtccggtgattccgttgccgtctttgggctcggcggcattggccttgccgttatccagggcgctcgtcaggcaaaagcaggcaagatcattgccatcgatacaaatccggcaaaatttgagctggcaaggcagttcggtgcaaccgactgcctgaacccaaatgattatgacaaacctattcagcaagtcattatcgagatgacggaatggggagtggatcataccttcgaatgtattggtaatgtcaatgtgatgcgtgctgcgctcgaaagcgcacaccgtggctgggggcaatcagtgattattggtgtggccggtgcaggacaggaaatatcaacccgaccattccaactggtcaccggtcgttcatggcgaggcaccgcctttggtggtgttaaaggccgcagtcagttgcctaaaatggtggaagaggcaatgaaaggtgaaattgagttaaaaccttttgttactcacaccttgccgctcgaacgcattaatgaagcattcgatctaatgcatgagggaaaatccattcgcacagtcatccattactaa

SEQ ID NO: 9471 - DNA, 159 bp, Photorhabdus luminescens
atgagggcttgttcagtgaataactcccaagaatctcattacttaaccgatactttaccagccagtagaactatgttggatattatggaactcgcaatggttggtgcaaagttaggttatttctccacaacccgccttttcctgaaaggacatctgtga

SEQ ID NO: 9472 - DNA, 306 bp, Photorhabdus luminescens
atgcaactttctggtatctacggctgtagtactagaatccaatttagttatatggatagcgacggtgaaaaatatttaagtaataaaggtaatgatattaatcttggcgcaacaaaaactactgacccaggcgatcttggtgttcctgatggagcgatgatttttatgcatgtgtctgtagtatggggaaatgataatgaagctcgtcaaacttttttatacaaaaaaggaagtcaatcgactgcgagttatgttatcagtggtacaacattaaataataatctcggcttgatcgatgttgcgtaa

SEQ ID NO: 9473 - DNA, 258 bp, Photorhabdus luminescens
atgcttattttcgctaacatattggcacatattgttgtgccagctcatcactggtactggaagctggcagagtcggagaacaatcacagaatactgaaatcatttatggctattgacactaatggtcattaccacataactgaagatatacccgtcatctttcaagttgcctctttgttggctgtactcacttactccggtcacatagttatctatgctcccgaggattcacccccttgccgccgcgatgcattttga

SEQ ID NO: 9474 - DNA, 1209 bp, Photorhabdus luminescens
atgattacccaagatgctagttcaaaacttatcggtttcctgtatcagttcgagcgtgccttatatcgcatattctcaagtgaacataattctgttgtatttgggatagaaacagtagatgatgtggtagaggaggctatattagctagtggattaccaagcattactttcgaacaggataaacatagtttagataccagagctcagccttatcaggacagtagcaagaatttgtggcataccttgcatatctggctggatgctatgaaagtaacccgtgaaagatatgacgaagttacctattgtttagtcacgaaccgaattattgataaaaaaaatcttgtagtatttctttctgaagcgaaaagtgaagagcagattaatactgctttagcaatgttaaaagaacaggcgaaaaaaattacggggaaagttaaatctattgcagaggaagtgttaacttattctgatgaagagttaatattcctgattaaaaatatagaacttcttgatagtcatggaacggcttctggtatttccccaaaggaagctacaattcagttactacatttaccatctgaagtaaaggaacatggagataatatctatcagacgttgtttggatttatgatcgacaaatgtaatactgcttggaaagttaaacaacctgtcgagctgactaaagaaccttttgctaatctcttgaattctgaaataagtctaattaaacgtaaaaactttactgagcaaccttttttccaaaccgctttcaaaaattatcttaagcaagataatgcagagcatttatttatcaaacaacttcaacatattgatataagtacaacgatgtgtaatcgagcattagagcactattgggcattttatgctgaaagggtcagattacaacaggcaggtgaaattcctctttcagcatggcgagcccgtgatgatgtactttataatcgttggttacaaattaaagattgcattgaacttggactggaatcagaaggaaatagccaaaaattgaatatgttgaagaaaatttatactgatacaacggatcccaattatacggcttcactggctggtcaacgaactgagaacctttattttacgacaggaaattaccacgatttagccaattccccttcaaaggaaacatttatacactggcataatgatttcctgaagattaaggagaaataa

SEQ ID NO: 9475 - DNA, 483 bp, Photorhabdus luminescens
atgatttataaagatagcaatataattaataacagttcactcgcctgttttctgcttgtctattttgtagaacaatatgagagctgttctgtgaatgatgatcatcctgatttaatgaaactattacttgtacttcctattgtatggcataaagtcagtcgggaatcaatcaaaaaaaagaaaagaacaacacctctaattgccgtagtacaggaatcacttttgattaaatctaacttagcgcaacgtgtttcagaatatgcaggagcctccattcaggggctgaatttagctgtttcctctggtttgctaatgcgattgattgaacacggtgaaacgcggtttgcaacaaacttctcaaaatggccgggaggaataaataagttgcttcctaaagaaatggttcaaaccataacacgattggcaaactggttttcttgtgtagatacaccttccatttatcgtcttcttctgggtaactaa

SEQ ID NO: 9476 - DNA, 1986 bp, Photorhabdus luminescens
atgaaattcactattgatgcattaatactttggcctgttaatcccaataataatcttcgggtaatcccctttaaaagcgataaaataaatatagttcatgggattagcggcacaggaaaatcatcaattatatcaataattgattattgtcttggagcaagcaagtgtgctattcctgtaggtattattcgagagtctgttatgtggtttgcgattaaagctaatattcgagggtataaatatcttatagcaaggaaaacacccagtaaaagatcggttagcaatgagtaccatctttccccttatcctgaagaacttcctttgactcttacttcaactcattcagatgctgtttttaaaaataaatttaatcaacttgttaatctgactgatctccctctgtctgaaaataacgaaaaaactggatttgatggaagagcttcctacagagatatggctgcttttaattacttgccacaacatattgtggctaatccatatactctattttttaaagccgactcttaccagaataaagaaagactaaaaagggtaatgccgtttgcattaggcattattgatcgtcaatatatgattagagagaaagagcgtatagatatacagaagcagcgagattcactatataaacagcaagaggtaaacaaaaaagcgttgtcaagttgggcttttgatgttgatcgcctatggaaggcatgtgtggaattggggttattatcagaaacagaaaatcaggatactgatgctaaagtaaaatcattaaattacattaatgatatatatactgaagggcgtatcggtgatctattgggtactcctaattatgagtataccaataggcgtttaaaagcacttgttgctcaaggagaggagatccaacagcatattgatacattacggatccaaatcagaaactatgagcaactattttccagaggtcaaggttttacacaggcaatacagaaagaaaaagagcatattgttggatttgactggcttaagaataatttgtctccaggaggtgaatgtatcgcatgtggatcaaaaacaaatatattatcaacagttgttgataatcttgaaaaacaaatttcccggattaactctatctccgaggttctttttgaaaaccccatagcagataaagaaattgataaattaaaaaaagaattacgaattcagcaagataaacttcaaaaaatccgcaaggaaaaatttaatctagaaaaaatagataaatctaccaacaattccatgaataaagtatatgttttaattgggcgtatccaagaaacattatcatcacttaaaaaagtaaataacactgatgatataagtgagaaaataaaagaattagatgatcaattcaatgaaatagagaaattcttttttcagtctaataaaagcagaacagaatatattgtttaccaagagataaattcacttatagaaaagtatgctgataattttaggcttgaacgtcgaggcaatattaaacttgacaaaaatgagttaacattatgttttaatgtagataatgatagaagaaatgaatttttatgggaagtcggcagtggagctaattggatgggatatcatttatctgtctttttagctttgcatgaatttctatctcataaagatcgtactcgtcttcctccgtttagctttttagtgattgatcagcctagtcaagtttatttccctagtgctgcttccggagataatatattagatgtaatggcagaagatgaaagtctccagataaccagacaaaatgatgttgtcgctacacggagaatttttgaaatgttggcagtcgcaattgaagaaaataactatttttttcaagtaatagtgcttgagcatgctgatgaatcaatatgggggcaagtaaaaaatacatgtgaagccgcgtgctggaaggatgaaggagatggcttgatacctcgctcttggagtttgtaa

SEQ ID NO: 9477 - DNA, 873 bp, Photorhabdus luminescens
atgacttcactcgcagcactgcaaacagcgatatcaaaactcaccgtctggcgtaaaggcgatcaacgcgcaccacataagccattactgctattgtatgtgttgtctgagtacaaaaaaggtcatgggcaattgtttaaatacggtgatgaaatccatcaaccactattacaattactcactgattttggccccagccgcaaagaacactatccttcaatgcctttctggcgtttacggagagatggcttttgggaactgaaaaatgcagaacattgcacaccacgtcggggaagcaaggaaccgccaaaacgagagctgattgagtatcaggttgccggaggttttgattcagacagtttccagttactgcgccgtcagcctgcgcttgttgatgaactggcacaacagatcctcaatgaacatttccctgaaagcgttcaggtaagtctggttgagcgactaggttttgatattaacaagaggttaaatagccgtgatccacgttttcgtgatgtggttttacgcgcttatcactaccgctgcgccgtttgtggctatgatttacgtctggatggctctctggtcggtctggaagccgcccacatcaaatggaaacagtttggtggcccttgccttgtggagaacggtttggcactttgcacacttcatcattccgcttttgatagaggtgcaatcggcatagacgagaatctgaagattaaaatttctgatggggtcaatcgtagtccggttgttgagcaattgttctgggccagagatggcgaaagcctttatcttccgcgtaatcgtcagtactatccggcagatagatttattgaatggcatcagactcaggtgtttaagacatag

SEQ ID NO: 9478 - DNA, 1626 bp, Photorhabdus luminescens
atgtctgactctatttttaactttaaaaattatccaatagtatttattggatctggaatgtctaaaagatacttggaaaattctccaacatggcctgagttgctggaagaatactggaataaaattgataacaatggtcaaggtttttataattacttatcggaaataaaggataaatataaagaagaacaaaatgactctgatttaaatcataaagtatattcggacgcagcaacttacattgaaaaaaaattcaaggaattatttaattcagggaaaatatcattagaaggattaacatcaaaaagagtttttgacgaggatatatcaccatttaaatattctttatgtcaaagattcaagcaagataaattaagacaaaatattaaaaaagatgaatttgaatcatttaagaagtttttaaaaaatgcaaaaatgattattacaacaaattatgattcatttattgaaacacttttgtcagaacaaaatgttgaacctaaaatgtatattggcaatgaaggtttttttgatgatactattggatggagtgagttatataaaatacacggagatatagaattacctaattcaatagtaattaatagttatgattatgaaagatatgatgataaatctatactgattagcgcaaaaatattgtcaagcatgataaaaagctcgataatttttattggatattcattaacagatagaaatgtaaaaaaactactgactgatttttcttcacaacttccgaaagaagacaaaagaaaatctgctgaaagaattattctgattgagttcaaaaaagatgaaatggatattataaaaacgcatagaacagatgataaatcacaaataacgtatacatctatagaaacagataattataaaaagatatatgatgaaataagtaatatagatgaagggttgccgccatatgatattcttagatatcaaagggtaataaagcaacttatactagaagaaggggagaaaggaaatctaggtagtctattagtcacaccttctgatttggatgaattagagaaacatgccaattctggtaaaaatttagttgttgccttaggtgataaacaacttgtttatattagagtaaaagaaatggaatatttagaagattatatctttgataaaagtgaaataccaaataaatcagctattgaatttcttatcgattgtcctcctcatgccagaactcctttctcaaagttaataaaatcttgtgatttccataatataaaaatatcaaaaaaagaaatgaaaaaaatagaaacaagaataaatatgcatggaaaaatagataacttagttaaatctgttaatctggataaaaaatactcaagtattgggtttagatcaattgaagatatcaaagccgagaacttattaaaaaacaaagaattattggttataataaagaacataaaatcaataagtaaagatgaattaaggaaatatatccaagaagaagcctttccattatttaaaataaatggaaaggatgatcatttaaaatcaaacttaagaaagttatttttagcttttgatttattaacatatggagatgtaagtttagatttgctaaataaaggtgactaa

SEQ ID NO: 9479 - DNA, 153 bp, Photorhabdus luminescens
atggaagggataacaggaataaataatgttagaaatggctggcatcaagcggatataattgctgcattacgtaagcgtggaacaaccttagcgactgtttttcgtgaagcgggactcagttcatcattagccaatacgctcagtcggccttga

SEQ ID NO: 9480 - DNA, 3117 bp, Photorhabdus luminescens
atgtacgaatacaaaactgttgctgaatcaaataactttatcgtactggataaatacactaaggaattgcagctaaatgaaacctaccaaagcgaaggtgatttagaacgggaattaatcgacgatttagtcaaccaaggttatgaatatgtttctggcttaaacacgccccaaaacatgctggccaatgtgcgtgagcaactgcagatactgaataatgttaatttttcagaaagtgagtggcaacgatttgttgagcaatacttagataagcccagcgataacaacatagataaaactcgtaaaattcataacgattatatccacgactttgtttttgatgatggacatatcgagaacatctatctcgtggataagaaaaacattgcccgtaataaagtacaaatcattaagcaattcaagcaaacaggggcgcaagcgaatcgatacgatgtaaccattttggttaatggcctgccattggtacaagttgagcttaaaaagcgcggagttgctattcgtgaagcctttaaccaagtgcatcgttatagtaaagaaagctttaatacagaaaactcgctgtttaaatacttacagctttttgtgatttcaaacggtacagacacgcgctattttgccaatactaccaagcgtgataaaaacagttttgacttcaccatgaattgggccaaatctgataatacgctgattaaagacttaaaagattttacagccacattttttcagaaaaataccttgctgaatgtgttaattcattattctgtatttgatgttagcaatactttattagtgatgcgcccctatcaaatagcggctactgaacgtattttgtggaaaattaaaagtgcatatcaggctaaaaattggagtaatactgaaagtggtggctacatttggcataccacggggtcaggcaaaaccttaactagtttcaaagcggcgcgtttggctactgagttggattttatcgataaggtgttttttgtggtcgatcgtaaagatctggattaccagaccatgaaagaatatcaacgtttttcacctgacagtgttaatggttcggagagtaccgcagggctaaaacggaatattgaaaaagatgacaataaaattattgttactaccattcagaaatttaataacttaataaaaagtgaaagcgatttaccaatatacaataagcaagtagtgtttatttttgatgaggcacaccgcagccagtttggtgaagcacaaaaaaacctaaagaagaaatttaaaaagtattatcaatttggttttacgggcacgccaattttcccgcaaaatgctttaggagcagacaccaccagtagtgtatttggccgagaattacattcgtatgtgattaccgatgccattcgtgatgaaaaagtattgaagtttaaagttgattataacgatgtaagaccacagtttaagtccattgaaaccgaacaagacgagaaaaagttaacagcggcagaaaacaagcaagcttttttacatcctgttcgtattcgtgcaatttcccagtatattttaaataacttcaggcaaaaaacacatcgtctccaagccggtggcaaggggtttaatgccatgtttgctgtcagtagcgtggatgccgccaaagcttattatgaagcgttcaagcatttacaaaaagagactgaagaaaataaagcaaataaaaaaccgcttaatattgccactatcttctctttcgccgctaatgaagagcaagatgctattggtgagcttattgatgaaagttttgagctcaccgcaatggacagcagtgccaaagaatttttaagcgcagccattgatgattataatgcagcgttcaaaatgaattttggtgtagatagtaaaggtttccaaaactactataaagacctcgctaagcgagtgaaaaatcaagaagtagatttactgattgttgttggcatgttcttaacaggatttgatgcgccgacattgaatactttatttgtcgataaaaatctgcgttaccacggcctaatgcaagctttttcacgtactaaccgtatttatgacgccacgaagacctttggcaatatcgtcaccttccgtgatttagaacagactacggttgaggctatcactttatttggtgataaaaacaccaaaaacatagtgctggaaaaaagctataaagaatacatggaaggctttaccgatttaatcaccggcgaagcacgtcgcggatttttagaggtagtgacagagctacaaagacgctttcctaatcctgatgatattgttaaagaacaagataaaaaggactttgccaaactatttggtgaatatttacgtgcggagaatgtactgcaaaactatgatgaatttgcaggattaaaggctctacaacatgtagatattagtaatccggaggctgttgaggcatttaaggctaaatactacctgagtgatgaagatatcgccgcgatgcaagcgattgagatgccaactgagcgtactattcaagattatcgctcaacctataatgatacgcgtgattggttacgccgtgaaaagtcgtctaacgagaaagataaatctactattgactgggatgatgtcgtctttgaagtggacttgctcaaatcgcaggaaattaatctagattacattcttgagttgatttttgaaaacaataaaaagaataaaaataaggcagagttaattgatgaagttcgccgtttaattcgttccagccttggcaatcgagcaaaagaaagtctaattgttgatttcattaatcaaactaacttggacgaaattatcgacaaggccagtattattgatgaatttttcaaatttgctcaagctgaacaaaaacgtgaagcagaagagttaattagctcggagaaattaaatgaagatgcggctaagcgctatattacagcatcattaaaacgagaatatgcaagtgaaaacggcacagagctcaattccactctacctaagttaagtccacttaacccggaatacagaacgaaaaagcaggctgttttccagaaaattgctgcatttgttgagaagtttaagggagtaggtgggcaaatatag

SEQ ID NO: 9481 - DNA, 1155 bp, Photorhabdus luminescens
atgagcaaaacgctaacgggaatagcccagcagctaaaagatgccaacaagaaagtacaactgatctatgcctttaatggtacgggtaaaacccggctttcacgggaatttaaacagctaattacgcctaaaaatgataatgataaaggtggcaataatgaagaactatcattgacccgtactaattttttgtattacaacgcctttaccgaagacttgttttactgggataacgacttatctgagaataccgagcctaaactcaaaatccagccgaattcatttacagattgggtgctgaaagatcaggggcaagaccgaaatatcattgctaactttcaacactatacggatgaaaaattaactccacattttagtgaaaatggttcggaagttacattttctttcgaacgtggcaatgaagcaccaactgaaaatgttaaaatatcaaaaggcgaagaaagcaactttatctggagcgtattttacacactgattgagcaagtcatcagcgtgctgaatgttgctgaacccggtgagcgagaaacagatcagtttaatcaattgcaatacgtctttattgatgatcctgttagctcgttagatgaaaaccatttgattgagctggcagtacatcttgctaaacttattaaatctaacgagtctagcgttaaattcatcatcacgacgcataaccctcttttctataacgtgctacacaatgagctaaacagtgatgataaaagctataaaaagaaatggtttgagaaatacaggctgacaaagcatgaagatggcacatatcagctagcaatccaaccgaatgattcaccattttcatatcatctttatctgaagtcagaactcgaaaaagccattgaaaacggtcagttgagcaagtatcacttcaactttctaagaaatatattagaaaaaacctctacttttcttggctataaaaagtggggtgatttattgccaaaaaccggtgatggcagacctaacccttatgaagccaggattattaatatctctagtcattcaaaacatgcaggtgaagaggtcgctgagcttacggaagatgacaagcgtgttttgcgctatctggttaatgaaattaacactatgtaccgcttccaacaggcagaaaattag

SEQ ID NO: 9482 - DNA, 1098 bp, Photorhabdus luminescens
atgagcaatatgagttttatggagaaactgcttcaaggggctgaggtagtatgggaatctttggagcaagtggcgaaaataaaacatggcaaagattggaagaacttgaatgctggcgatattccagtttatggttcaggcgggataatggggtatgtcgatacttattcatataatcagccaacagttttaatcccccgtaagggctcgataacaaatattttttatattgagtcaccattttggaacgttgacacaatttactatacagaaattgatgctaagaaaatcatccctaaatttttatattattttatcaaaactatcgatctgttggcgctagacacaggtgcagggagacctagcctgacacaggctatattaaacaaaatacaaattcccatcccatctctcaatatccaaaccgaaatcgtccgcattttggacgcctttaccgagcttaccgctaagcttaccgctgagcttaccgcacgccaaaaacaatatgaatattatcgcgaccaattgttaagttttgaagaaaatgaagtggagtggaagactttgggggaaattgcaaccattggaacgggcagtcgtaatacaaatgaagctgttttagatgggcaatatcctttctttgttcgctctcaggaaccacgggcgatagatagttttgagtttgatgaaactgcaattattactgccggagatggagtaggtgtaggtaaagtttttcattatgtttcaggaaagtatgctctgcatcaaagagcatatcgtattgttgttagagacgaccgttttaattcaaaatttctattttattatattagaaataattttgctcattacttaaccaaagtatccgtccacgcttcggtgacatcacttagaaaaccaatgtttgagaaatatccaattcctatccccccacttgtcgaacaagaccgcatagtagctatattagataaattcgacactttaaccagctccatcagtgaaggtctaccacgagaaattgaattacgtcaaaagcaatatgaatattatcgcgatctgctgttgagtttccccaagccagaggtagaagcataa

SEQ ID NO: 9483 - DNA, 1557 bp, Photorhabdus luminescens
atgacaagtacccaacaacgcgccgaactacagcgtcaaatctggcaaattgccaacgatgtgagaggttcagttgatggctgggatttcaaacagtacgtactaggtacgctgttttatcgctttataagtgaaaactttgcaaactacattgaaggcggtgatgagagcattaactatgccgagctttcagatgctgttatcactgacgatattaaagatgatgctattaaaaccaaaggctattttatttatccaagccagctgtttgctaatattgccgaaaatgctaataaaaatgataacttaaacaaagacttaaatagcattttcgtcgctattgaaagctcagccaacggctacccatctgaagccgagattaagggtctttttgccgattttgacaccaccagtaaccgtttaggtaataccgttaaagacaaaaatacgcgtttagccgcagtcttgaaaggcgtggcagggcttaaatttggtcagtttgaaagtaacaaaatagatctgtttggtgatgcttacgagtttttaatctctaactatgccgctaatgcaggtaaatcaggcggtgaattttttacaccacaacacgtttccaggctaatcgctcagctcgccatgcacgggcaaaccagcgtgaataaaatctatgatcccgccgcaggttcgggctctctgctattacaagccaaaaaacacttcgatgcccacattattgaagacggtttctttggtcaggagattaaccataccacctataatcttgcgcgtatgaatatgtttttacacaacattaactacgacaagtttaatattatgttgggcaacaccttaaccgaaccgcattttggtgatgacaaaccgttcgatgccatcgtctctaatccaccgtattcggtgaaatggattggcagtgatgatccaacactgattaacgatgaccgctttgctcccgctggcgtactagcgccgaagtccaaagccgactttgcctttgttctgcacgcattgagttacttatccagcaaaggccgcgcggcaattgtttgcttcccgggtattttttaccgtggtggagctgagcagaaaatccgcaaatatctggtagataacaactatgttgaaaccgtgatctcattagcacctaacctgttttttggcacgaccattgctgtcaacattcttgtgctgtctaaacacaaaaccgacaccactactcagtttattgatgccagccctctgtttaaaaaagaaaccaataacaacatacttaccgacaatcatatcgaacaaattatgcaggtgtttgatagcaaagatgatgttgagcattttgctaaatcagtcagttttgaagccatcgccgctaacgattacaacctgtcggtgagtagctatgtcgaagctagagacaaccgcgaagtaattgatattacaaaactcaatgctgaactaaagactaccgttaaaaaaatcgaccagcttcggatggatattgatgccattgttgctgagattgaaggaacggagaataaagcatga

SEQ ID NO: 9484 - DNA, 300 bp, Photorhabdus luminescens
atacgcaaagttaagctttcctttgcttatacttatacttaccggaataccatcgaattgagagaatcagaatggactgaattcgattttgataaagatatctggcaaatacccgctgaacgaataaaaatacgtcaccctcacatcgtcccgctatcaaatcaggttaaagccattcttatcaagctgcacaagcgcaggaaatacgttttccccggtcataacgatgcgggtaagccaatgagtgaaactgctattaatcaggttattaagcgtattgtctatgatgattcgcagtaa

SEQ ID NO: 9485 - DNA, 876 bp, Photorhabdus luminescens
atgccagcaaaaattattgatgggaaaacgattgcgcagacaatcagaagtgaagtcgcagtgcgtgttcaacaacgtgttgctgcgggaagacgtgctcccggtcttgccgttgttttagtcggcgaaaacccggcttctcaaatttatgtcgcaagcaaacgtcgtgcctgtgaggaagtcgggtttgtttcccgttcctatgacctgccagataccaccagcgaagcagaattgttgaatcttatcgatcagcttaataatgattcagatattgatggtattttggttcagctccctttacctgccggtattgataacgtcaaagttttggaacgtatccagcctgataaggatgttgatggcttccatccctataatattggtcgtttgtgtcaacgcgcgccaaagctgcgtccctgtactccacgcggtatcgcaacgttgcttgagcgttgtggaattaatacttatgggctgaatgctgtcattatcggcgcttcaaatattgttggtcgtccaatgagcttggagctgttattggctggctgtactaccacggtgactcatcgctttactaaagatttacgtcaccatgtggagcaggcagatttactcattgtggcggtcggtaaaccaaactttatccccggagagtggattaaacccggcgctattgttattgatgtcggaattaatcgcctggaagatggcaaagtgattggtgatgttgattttgaaactgcatcagagcgggcaagctggatctcgccggtgcctggaggggttggcccaatgacagtcgctacacttatccagaataccttgcaagcctgcgaggaatatcacgatgtggaaagaattgaaggttgttaa

SEQ ID NO: 9486 - DNA, 213 bp, Photorhabdus luminescens
atggaaattttttatttagaaggtcacccttatgtggcgttgtgtgatctgttgaagtttcaggggtggagtgaaagtggcgctagcgctaaagcggttattgctgaaggtttggttaaagtcaataatcagatagaaacccgtaaacgttacaaagcgatagccgggcaggttgttacttttaatggtaaatctgtccacattaaagaatga

SEQ ID NO: 9487 - DNA, 885 bp, Photorhabdus luminescens; identical to SEQ ID NO: 7045

SEQ ID NO: 9488 - DNA, 417 bp, Photorhabdus luminescens
atgataaaacaaaccagtggagtagatagtttggaattaaatcaagtgattaaagcgcttaatgaatccggtaataactggagtgtagagcaaataggtgaatgtcttgcaattactaatgaagacggaattaaagcacatctggctatttgtggcaggcaaattacagtggaagcattactgttttcggaagagaatgttttagatcccgcttctttaaatcagtttattttagaaacgcacaagatgattcctctgacttcagttggaataactaaagtagagggtcaatcttactatactgcttttggttcattgtcatcagaatcaaaacaagaaagcgttgttatcgaagtctctacgttgtttgccaacatcactgaacttcttgatgcgtattctgagttcctaaaataa

SEQ ID NO: 9489 - DNA, 684 bp, Photorhabdus luminescens
atgaacgtgtggaaaaagctttttaaggcaatcaagggaacggtaaataacgcggcagaagctgttgctgatggcaatgctctgacgattcttgatcaggaaatccgggaagcaaaagcagaaatccgccgtgcggatgaaagcttggttagcatcattgctaagcgaaaaatggcagagaaaaaggttgcggatatcaaaaacagtatcaccgagtacgagggttatgctcgctctgctgcgggtaaaggcgataatgggcttgctttagagtgtgctcagaaagttgcgaccctgcgtgatgaactggaaagagaacaagggttgtttgaatcgttccagaaggctgaaacgacgcaccgacacactgtacaagaggcgaagaagaaggtgtctcagcttgagaaccaggttgatttggttaaggccactgagcaggtgcagaaagcccaagctgcgactcacagttctgtcgttggcgcttcttcaaaaacatctaccgcccttgattcccttgagcgtatcaagtcacgtcaggctgagaaagcggctcagttcgaggctcagcaggagctccacgatagtatgacttctagcgatctggataaaaagcttaaagaggctggcataacgtcaagttctatgtccgcagaagatgaacttgctcgtatccttggcaagtaa

SEQ ID NO: 9490 - DNA, 663 bp, Photorhabdus luminescens
atgctttccaaaatcgcagatgcatttaagagcgcattcgggggtaagacggttgcgcctgctgttccaaaggtgccggaagtattaggtttgcgtatcggtggggcacttgagatagacccactgatgctgaaactgattgaatctgacctaaccatcgaaaatgcagcttcaactcagcttatatgttccgttggtgtagtcgatctaggtgataacgtgcgtttggttcgttattacactgatgacgaaggttatcttcaagtgcttcaagaaggtgaaggggatgacggcgtgaaggaagtgagtttgtggtatttttatgaaactaaaccgatcgattcacaagctcaatgggatgcgctgattgaaaacggtatcgtgacaccaagcagacgatatgatctcgatggtacccagttctctccgttatgggacaacattaagccggtggctgttaccgaaaaaacttacagtaaagaaggtcacataaccgaaactgatcagtttgtgatggtgtatacgcgtcaggttgctcataacagaacagaagaacttcaggttgtgggagaagaaaaagttgtagggagtcacctggatagattgatggtactgagcaccggtattcaacttaaccaaactgattttaaagtggtggcataa

SEQ ID NO: 9491 - DNA, 438 bp, Photorhabdus luminescens
atgatcacattggaaaatgaagaacaggcttttactcaatttatgcatggtgtaggcaattttggcttgtgttttgggctggcgctggtttttttcatcgttttcaaattcatctacacaataattactccgcatgatgagtggaagcttatcaaacaagagaagaatagtgccgcggcgatatcgcttggtggcgctctggttggttacagcattgccattgcaagtgcagcaagcaactctgtgggtgttattgatttcgtgatgtggagtgttgttgcgctgttggctcaaattgctggcttcttcatggttcgcatattcatgatgccaaagattgtatcccgcattgagaataatgaggtccctgctgcgattgtgttggcgtcggtgtcaatttctgttggtcttttaaatgcagcctgcatgacttactga

SEQ ID NO: 9492 - DNA, 888 bp, Photorhabdus luminescens
atgacgaacgggaataaaaagcgcagaatgcgcagcaccgccattaacattgagagtaaacgtaaatattggcgtggtttctcattcacatcattggcgctcagtgttggttcactcgtgggttgtggtcaatcggcggatgagttgtcaattcatgtttataaggatttggcgtcttgtcagaataatccgaagaatacgatcgctgctcaatgtgaaaccacataccaagcggcattacgtgaagcggagcgtacttcgcagaaatttcgccagaaagctatgtgtgagcttgagtacggtgagtgtgaagcaatgccgggggccgtaggttatcgaccgaagatggccgcctttatgatggcggcggtgaagccagaacagtttaaccagtacgatattgctgaaaagtatcgcaatgtgttctatcagccactatttacctcaacatcaggctatggcgacttgtaccgtaagctttttttcgctgatggtaaggttattggcgattattccgatattggcaatatccagtacgagatgaaccgacgttatttgcatccgctggaaacggttcgcctgccaatggagaaacgagaagttcctcaagttggaacaaatgcaaatgtcgttgcaggtataaaccctgtactgaactcccgatcgactgcttatatcgcatctgggatcgttgatgaaatcggtgattattcagcgcgtaagcatagagagagaatgtatcgagagcgcttgatacgtgaaaaggaacaaaagtttaaaagtagcgattcccgttattctggttatgatagcaagccaattgtcactaccaaatcttctggtggttttggttcaacatcttccgctaaatacagttggggtggttaa

SEQ ID NO: 9493 - DNA, 1167 bp, Photorhabdus luminescens
atgcttcagatcccaacaacacctcgtcatgattggaaagtgcgagcaaaagaatttgggtttggtttccatacaatcgataatgaaccgtactggacggaagaccgttattaccagtttactctcaagcagattgaagaacatattgaagatccgacagcggaaatccaccgcttgagccttcaagcagtagagcacgtggttaacagtgatgagttgatggctagattccaaattccagaagccatgtggtcattggttcgtggatcttggaagcgcagagatccaagcctctatagtcgccttgattttgcctatgatggtaaaaacccggctaagttattggaaattaactcagatacgccgacctctgtttatgagcatggtttttttagctggctgtggttggaagataaggttaaccgtggtgaattgcctcatgctgctgatcagttcaacttactacaggagttgcttgttaatcgcttctgtgaactgaaaccctttttgccattcaacacgcttcattttgcctgctgtaagggtacggaagaagacaaaggttcggttgattacatggctgactgtgccaaagatgccggtattcatatcgagtttgtctacattgaagacatcgggctcagcgagtgtggtcaatttacggatagtaataacaagatcatagactcgatgttcaagttgtatccgtgggagttcatgtttcgtgaagaatatgctcaacacttggtcactgcgggtgttaactggtttgagccaatgtggaaatgcctcacttcgaataaggcaattttgccattgctttgggagatgtttccaggacatccaaatctgcttgaggcttattttgctgatgatccgaaagccaagcgtttaactcattacgtcatgaagccgatattcagccgtgagggcgcgaatatcagtattcacaaagacgggaaagtgattgaaaaggtagagggtccttacggtgaggagggttacattgtgcagcagtacaccccattgccaaagatcggtaatagccatgtccttatcggtagttggctcgttaatgatacgcctgcgggtctatcggttagggaagatattggcaggatcacgaaagatacatcacgatttgtgcctcatattattttaggttaa

SEQ ID NO: 9494 - DNA, 831 bp, Photorhabdus luminescens
atgaaagaaaaatttggtatcagtgacatcatgaagcaacacatatgccaaaaactggcgcaacttgagacagagctgcaaatacgaatactctacgcctgtgaatcaggtagccgcggttggggatttgcctcgacaagcagtgattacgatgtacgttttatttatgtacatgcgccatcatggtacttacgcgtcgatccctctcgggatgtcattgaactaccgatcagtaacgagctggatatctgtggttgggaactgcgtaaaacgttagggctgctgaaacgagccaacccgacactgatggagtgggcagactcaccagtaatctactacgaagacgtggagttcatggcggcactacgtgccctattaccagactatttctccaacaacagagcgcgatatcactatctgtcaatggcaaagaaaaactttcgtagttacctgaaaggcgagaaaattcggctgaaaaaatacctttatgtactacgcccattgctggcggtacgttggatcgaagctggtaaaggtgtccccccgatgcgcttcgacagcctactggccggaacggttacagacgcggggctgatgcaagaaatacagactctgcttgccatcaagcgtaacactgacgaaacggaatatagtccacgttttaaacgcattcataactttatctgccgcgaattggatgattcagttacccgccgcgaactcaaagacaaaaaacacctcccagataccgaattggatctacttctgatgcgcaccgtacttcaccataataataaagaagaaggagaatacctgttaaaaaatggatga

SEQ ID NO: 9495 - DNA, 1227 bp, Photorhabdus luminescens
gtgataacaaacgattacgagttaatgactgcgccaaacagtgtaccagtgaaaatgtggactcatggcgtaccggtagaagcggaagctcgtgaacaactgttgaatacagcaaaaatgccttttatattcagacatttagccgttatgcctgatgtacatcttggtaaaggttcaaccatcggcagtgtcatcccgactcgtggggcaattattccagccgcggtaggcgtagatatcggttgtggcatgatggcagtacgtacctcattgaatgccaaagatttaccggacaacctatatgcgatccgccatgctattgaaattgccgtaccacacggacgcacagcaaaccgtagcggtcaggataaaggcgcttggcagcaaccaccagaaaccgtcgatcaccattggagcgtgttgcaaaccgggtttaaacagctaaccgataaatatccacaattgctgaaaaccaataaccatctgcacttagggacactagggaccggtaatcacttcattgagctctgtctggatgaatccgaccgggtatgggtaatgctgcatagcggctcacgcggtgtaggaaatgccattggtaatctatttatcacccttgcccaacaggacatgaaacaacatatcgctcacctgcctgatcgtaatctggcctattttgaggaaggcagccgtcactttgctgattatatggaagcggtcggttgggcacaaaacttcgcccgccacaatcgcgaagtcatgatgcaacatacactggcagcattggcgacggtaataacaaaaccattcactgccacaatggaagcggtaaattgtcaccacaattatgtgcaacaggagcagcacttcggccaaaacgtgttagtcacacgcaaaggggcagtcgctgcacaccgaggcgtcatgggcatcattcccggctcaatgggtgcgaaaagctttatcgtacgaggtctgggaaacaaagagagtttctgctcatgcagtcacggtgcaggacgagtattaagccgcacggcagcgaaaaaacgcttcacaatagaggatcaaaagcgtgccacggcacacgtggaatgccgcaaggacagcgacgttatcgatgaaattccgatggcctacaaagacattgaggccgtaatggccgctcagtcttcactagtagaaatcgttcacaccctgcgtcaagtggtttgcgtaaaaggataa

SEQ ID NO: 9496 - DNA, 1779 bp, Photorhabdus luminescens
atgaccatgaatattaaaaactatcccataaaaaaagttttgattgctaaccgcggtgaaatcgccgtccgtatcatccgtgcctgccgggattatggtttacaatctatcgccgtctacgctgattcggacatcaatgcacaacatgtacgattggctgatgaggcttatagtttaggcggaaaccgccccgctgatacctatctcaatattccccaattattggatattgcgaaacgttcaggtgccgacatggtacatcccggatacggatttctggctgaacgagcagaatttgcccgtgcagttattcatgcagggttgatctgggttggtcctgaaccagagacaattgatactttgggtgacaaagttaaagcacgcaaaattgcccaacaggtaggtgccccacaggtttcaggtacagaagaaccggtgaaaaacgcagaggaagctctggcgtttgccgaacaatatggcctgccaatcgcaattaaagcggcatatggcggtggtggacgtggcatgaaagtggcatggcggcttgatgaagtcaccgaactctacaattcggctgttcgtgaagcaacagcggcctttggtcgtggagaatgtttcattgaacagttcctggataaacctcgtcatatcgaagcgcaaattctggctgataaacatggcaatgtggtggtacttggtacacgtgattgttcactgcaacgacgtaaccaaaaattggtagaagaagcaccggccccatttttggctgaacatcagcgccagcgtattcatcaagcagcacaagatatttgcaccgctgctggttatattggagccggaacagtggaatttctcctcagtgcagacggcacgatctcctttctggaagtcaatactcgcttgcaggtcgaacatccggtcaccgaagaaaccacagggatcgacattgtggtagaacaatttcgaattgccgaaggtaaacctttatcattgacctcaacgcctattcctttaggccattctttcgagttccgtattaacgcagaagatgcgggtaaaggatttttgccgacacccggaaccgtgacagtattttctcccccttccggcccaggcataagattggattccggtgttgcagcaggttccaccatccctgacacttttgattcgctgatggctaagttgattgtcaccggagcaacccgccaacaagctattgcccgtgcgcagcgggcattacaggaattcagcattaaaggcgttgcctcagtattgccttttcatcgagcagtgatggagcatcctgattttatttccgatgacacatttaacgttcatactcgttggatcgaaactgactttatcaatgatataaaaatatctccgcgtcaggaaaatcattatcaagaaaaggtaacacgtacttttattgaaattaatggccgtcggcatgaactagggctaccagccgaattattaaaagggctttcattgcctgattctgggcgaaattccatcattgaaaacaaaaatagtgaaatggagaggacaataacagcaccgaatcccgtctcagcaccaatatccggcgttttacaatcctggtatgtgcaggagggtgatgaagttaaacaaggtgatgtcattgctgtcatggaagcaatgaaaatggaaacgcaactcaccgcacatcgttctggaaaaatcgttatctatgtagaagaaggcggttatcaacaggcaggaaatgtactggcaagtattaacgatgattaa

SEQ ID NO: 9497 - DNA, 1614 bp, Photorhabdus luminescens
gtgcgttttttacctgttaatttagatgccattattgtcgagcttcatgatctgaatgaaacgctggcgttatttgattcacttaacgctcatcccattccaggcgtagaagaaattattccagcggccagaacactgttgattcgatttcgtcccaatgtggtttccaccgtcaaacttgccggaaatatcaacggccgcaacctgaatacactggataggacaaccgggaaactcgttgaaatcccggtgtattacactggtgaagatctggaagaagtggcagaaatcctcagtatcaccacacaggaagttattcagcggcataccgaaagcgagtacaccgttgcttttaccggattcgcccccggatttgcctatttagtcgcagagtcagatcgtttacatgttcctcgcaggacaaccccaagagcccgcattcctgcgggatcagtcggcctagccggagaattcagtggaatataccctcaagccactccgggaggttggcaaatcatcggtatcacgccagaacgcatgtgggatctctcacgttctccctcttccctgttacaacccggtttccgggtacgtttcagagatcaacgcaaaggcgcagcaatctctatcactaaagccgaaatccctgttgcccccatagaggacgttctaccttcgcaagttgataaacacgcctcgctggaaatcctaaccactggaatacaaacactttttcaggatttaggccgttcaggacaggctagtttaggtatttccgctgccggagcgctagataaaacagcgctgagaagtgccaaccggatcgccggtaatccttcggataatgcctgtctggaaattgtgcaaggaggattaagcttcatttctcatggcaatgtcattatcgcggttacaggtgctgactgcccaatcactgttcaaacaacatctggccgaaagtttcaggttgatggctatcagcctattgatctgagcgaaggcgataaagtgacattaggaacgcccaaagcgggaatgcgttcttatttggcggtgcgtggcagctttgccaagcaacctattctctccagcctctcttacgacacgctggcacacgttggccccaagccaatcgctataggcgatattttggatattcttactgtgacgcagggttgtgcggtatcaatggatgaaagcccggctttcaatatgcccaccactgacgatatcgttacactggacattattctagggccgcgcaccgactggttcaccgcagaagcgctatccctgctacaaaaccaactttggcaagttacaccacaatctaatcgagttggtattcgtctgtacggagacacaccattatcgcgtcttaaccataaagagttaccgagtgagggaacgaccaccggcgcaattcaggttcctgccagtggtcaaccggttttgtttttagccgatcaccctttgaccggtggctatccagtcattggttccgttgccaactatcatctcgatcttgcgggacaaattcctgtcaatgcccgtatccgcttcaacccaatcactgaatttcatgaaataaaagagagcgattgccgcttatga

SEQ ID NO: 9498 - DNA, 777 bp, Photorhabdus luminescens
ttgattggggttacgactatgaacatgattgatttaaacagcgatcttggcgaaggctttggtcaatggaaaatgggtgacgataataccatgctgagcattgtcaccagcgccaatgtcgcgtgtggatttcatgctggtgatcccgccgggatctttcaaaccttaaaatctgcccacaaaaatcaggtagtgatcggtgctcatgtctcttatccagatctggtcggatttggtcgccgtaatatggatgtttccagtaatgagctgatcgcggatgttatttaccagattggcgcgttgaaagggttggccgtggcggcaggaaccaccgtaagttatgttaaaccgcacggtgcactgtataacaccattgcccacaatgaataccaagcccttgccgttattaccgcgattcgtgaagtggatgacaatttagtgctggttggattagctggctcaaaactattggatttagcgcaggaaaacggtttacgtaccgttgcggaagcctttgctgacagagcttacactccacaaggcacgctagtttcccgccgggaaaaagggtctgtgcttcatgacgctaatctcgttgcccgacgcatgttgcaattggtgaccgaaggaggagttgaagccattgatggtagctttacccgtattcaggcagattccatctgtgttcatggtgacagcccagacgcggtggaaatggcacgtcaggtgaaactaaccctgcaacaagctgggatcaccgtacgctcctttatttaa

SEQ ID NO: 9499 - DNA, 663 bp, Photorhabdus luminescens
atgaaaaccgttctgattaccgcttttgaaccttttgacggtgaagccatcaatccatcgtgggagtcggtcaggcaattgcaaaaccaacagctatctggagcacatattgagacacgccagctcccatgtgtattcaatacttctctcacctgcctgtacgcagctattgatgagatacaacctgaactcgtcattgccgtgggacaagcaggaggcaggccagatatcacggtggaacgcatagcgattaacatcaacgacgcacgtattcccgataatcagggcaatcaacccattgataccccaatcgtagcaacaggcccggcggcctacttttccaccctaccgatcaaagcgatcgtcagtggcctgcaaaccgcaggggttcctgcttcgatttcacagagtgccggcacatatatctgcaaccatgtcatgtatggcctgctgcaccatctggcactgacttatcccaaagtacgtggtggattagtacgtggtggatttatccatattccctacctgcctgaacaggcggtaaaacaccccggtacgccaagtatggcgctggaaacaataacaatggcactgaaaatcgctattaatcaagcattagaaaacagtggggacattgctattagcggaggaatgactcattag

SEQ ID NO: 9500 - DNA, 1017 bp, Photorhabdus luminescens
atgtttcagcaacaatatctttattggctggcaggcgtgattctgttggccgtagccacaatgtcttggcgtgatcacaccaacccccgccgcctgaccaccagcttgttctgggcgctatatggcatcgtatttttagtaggcgactggacttaccgcttaatagcactatgggcagacagcgaagccgaggcccaaaagatgctacatatcggtgtcgggctaatcgtcgtattgatggcactgacggctggttttggcggtgtgcgattgggtagctaccatcaacgcacacctcagcaacggcaggaaagtgcctcccgtttgggtaatcgcctctttcttcccgcactggcaatccctatcgtcacggtgatcggcgtattactgtttaaccacatccctgagttacaacaggcgctgttcggtagcggcaaccatgccaccttggtaacgctgttttccatgacagtaggctgcttagtcggatatggcgttgcactgaaaatgacacgtgaaaatgtaactcaatcaacccaagaggcgcgccgcttactggattccatcggttgggcgtttatcctgccacagatattagcgacgctaggactattatttaccgtagcaggtgtcggtaccgcaatttctcacctgactgaacattatttagcggtggataatcgattgatcgcggtagcgacatacatactcggtatggcgttattgacgatgataatgggcaacgctttcgctgcgttcccgattgttaccgccgggatcggcattcccattctagtactgcaacatggcggtaatccagcggtcatggccgccatcggtatgttctcgggctattgcggtacattgatgaccccaatggccgcaaacttcaatatcgttccagccgctctgttggaattaccaaatcgcaatgcggtcattaaagcacaaatccccacgggaatagcgctgttgattgccaatgtttttctgctctattttttgatgtttttgtaa

SEQ ID NO: 9501 - DNA, 729 bp, Photorhabdus luminescens
atgcaacagattgtgaatctatggccgttgattggcatcgcggttattgtcgtgggttttttacttaggtttaacccggtattggtagtgattgtcgcagggatcattaccgggctggccgctcatatgccgatcacagcgattctggaaaaactaggttccggcttccttaatacccgaaatttgccactaattttgctgttgccgctggcaactatcggtcttttagaacggcacggcttaaaagaacgagctcaaacctggattagcaatattaaaacagcaaccgccggacgtttgctgatcatctatctgttcattcgtgaaataaccgctgcgctagggctgaccagtttaggagggcacccgcaaatggtgcgtccattgctggcaccaatggtagaaggggctacggaaaaccgtcatcatgacctacctgacgatatacgttatcgcctgcgggccatgtcagcagcaaccgacaatgttggccttttcttcggtgaggatattttcgtcgcctttggtgcaatcatctttatgcataactttatgctagagtctggcggtatccaaacggaaccgctacatatcgctatgtggggaattcctaccgccatctgtgccttcctaatccacgctttccgcttgtctcgtcttgaccaccagatcgctaccaagctggcagcactgaatggcatggacaaaaatcgcagtaaggtggagtaa

SEQ ID NO: 9502 - DNA, 771 bp, Photorhabdus luminescens
ttgctggcagtaggtgaatgtgtgaagatgcctgccattcttatctttagcagccgggagcttgtggccaggtttgcgacatttggtccgctctttcaattaattatgatgaaaaaaaataattcctctcctaagacgttaagtgaaaaagttacagatattatccggcagaaattgattattggggagctatcacccggtcaacgactatcagaagcggctttgagcgaacaacttgaaatatcgcgtaatacattacgtgaggtttttcgggtactgactcaggaagggttactgcgatatgaacctaaccgtggtgttttcgtcgccactccgagtatcgcttctattatcgatatttatcgaatccggcggcttattgagtgtcaggcattggcgcaatcttatcctatgcatcctgcggttgaacacatgcgcggtgcaatcgaaatggctaaacggtgtcgtgatactcaggactggatcggtgtaggaactgcaaatatggcatttcattcagctattgttgaactgactgacagtgaacggctgataacattctatgggcatatttctgcggaattgcggctggcttttggttatctgaacgatcctgaacttttttatgttccttatattgatcagaatgcccatattttggcgttacttgagaaaggtgaaccagaaagtgcggcctccgagttaaaaagctatctggagcagtcagaacgtacggtattagcggcttatacgcgcaaaaatcgtacttaa

SEQ ID NO: 9503 - DNA, 237 bp, Photorhabdus luminescens
atgaaaaaacctaacacgataaaatccatttttggacaaagagttagatatatcagaatggcatctggtatgtctcaggaagcttttgccgataaatgtgggcttgatcgtacttatatcagtggcattgaacgtggcgtcaggaaccccacgcttgaagttatcaatgtcatagcaagtggtttacagattgaattaaaagatctgtttgactttgacgcggagaaaaagagttag

SEQ ID NO: 9504 - DNA, 642 bp, Photorhabdus luminescens
atgaatttttcaattaacggcgtgagtattcctgatacccaaataacccgtgatgcaaccacgttcatccgcgatacggaatctgacctgctttttcatcattcaagtcgtgtttactactggggtgcgctcgccggtcagcgtcttgggcttaacgtggatcatgaactgctctatgtcggatgtatgtttcatgacatcggcctgacacatgaacactgtagctgtgacaaacgattcgaggttgacggcgcgaatgcggcgaaacatttcctgcaaggatacggtatcgctcaggccgatattgataaagtctggacggcgattgctttacataccacgccgggcattccagagtttatggtacccgaaattgcgctcgttactgctggcgttgaaatggatgtgttggggatcaattacgaagcgttcagcgacagtgagcgcactgcggttgtacagcatcacccacgtactgacggcttcaaggaagatatcattcaggctttttatgatggcatcaaggacaagtcccagacaatgtttggtggcttcaatgtggatgtcatacaggataaacagccgggacttgttcccctcaattactgtaacgtaatccgcaattcccgctggaaaggctaa

SEQ ID NO: 9505 - DNA, 990 bp, Photorhabdus luminescens
atgattcacaacatcaccatattggctgtgcctgacgttcagctactcgatgtttcaggccccctagatgtattcgctgaggcgaaccgtatattgcaccggcaggtctattccctgagcgtgatgtcgaccggttcagacatcatcacttcttcttctggcgttaggctgatggctgatgtgattttgagcgatacaaccagccactcggcagacacatttcttgtggctggtgcgccggatgcgcatagccataccctttcagaacaggagtgttctgcaatcatcgaaatgtgtcatcgtagtcagcgttacggctccgtctgtactggtgccctgttgttggcgcagaccggactgttgaagcagcgtcgggtgacaacccattgggagtgtgccgaattgctcgcgatgcgttttcccgaaatcattgtcgaaccggacatgctctatgtggctgatggttccgtgagaacggcggcaggtgtgacatccgggctggatctggcgctcaggctggttgaagaggatctgggtcgcgaaatcgcgatggaggtggcagcaagtctcgtcatgtttttcaggcgaccggtctgtcaggggcactttatccgcaggagccagttatccctatccgggagagccgcttttcaggatttacaacgctgggcgcaggcaaacctacagggcataagtggcttgcaggacatggctacacatatgaacctgagtatcaggcatctgggacgtctgttccgtcaggagctcaacatgaaggcaggagtatggctggagcatgcacgtattgagaaagcgcggacgttacttgaggaaggcaggctcccgctcaaggcaatcccgggagcttgcggatacagaagcagcgatgtaatgcgcagggcctttgttaaaaatacgggcatcaccccctctgtttacagaaaaatattcatacagacgcagcagagcggcacaaatgaagaaaactga

SEQ ID NO: 9506 - DNA, 225 bp, Photorhabdus luminescens
atgcaatttgttgtttatcaatacaaacggagcgaaagcaaatacagtatgtttgttgatgtacaacgtgacatcattgaaacaccagaaaggcgtatggctattcctttagttgaagcgcatcatttttcaagcaaggtgagtcgtcatctatttcccacgtctggctctcagttttcttcatttgtgccgctctgctgcgtctgtatgaatatttttctgtaa

SEQ ID NO: 9507 - DNA, 219 bp, Photorhabdus luminescens
atgaaacatagagttaacgtaacttttgataaagaaaattatctgatcctgaattcagccggtgtaaatatttcaggttttgttaataaagccatgaccagagaagctcaacgaatcaaagctgaaagttggaaagcagataatcgcaaaggattggaagaaattgctcaatttattgaacaatatggctcatttgctgatgaaaacaggaactggtaa

SEQ ID NO: 9508 - DNA, 210 bp, Photorhabdus luminescens
atgaaaaatcaagactggcacccagcagacatcatagctgagctgaaaaaacgtggcacatcgctagccgccgtttcaaggaaagcaggattagcatcatcgacccttgccaataccctgcaacgccgctggccaaaaggtcaacggcttattgccacggctttggatcgcgatcccgctgaaatatggccttcgaggtacacaaagtag

SEQ ID NO: 9509 - DNA, 237 bp, Photorhabdus luminescens
atgaaaaagccaaatgctgtaaaattcctttttggacaaagagttaggtatttcaggcagtcgtctggcatgtctcaggaagcttttgccgataaatgtggaattgatcggacgtatatcagtggtattgagcgtggggttagaaatcctacgcttgaaatcatcaatattattgcgagtggtttgcagattgagctgacagatttgtttgatttcagtgcaaaaccaaaaggctaa

SEQ ID NO: 9510 - DNA, 612 bp, Photorhabdus luminescens
gtgagtgaattgtataaaggcatgagtcaggaagcgtttgagaatggttatttttacgtaactgaacttcggcagtttgctaaatctttaggaattgcaacaagtcacttaaaaaagaatgagcttgagttacatattcggtcgtgcttgtttggttattctggtgatttgcctattgctattcctaacaaaagagatcgtgttggtcgggatttactcgccttggaaagtttggtaataaattatgtgagtgacaagcaaacgaaaaatttcttattagaacaggtgaaccgccaatatgggccattagcggataaatctggccaatggtattggttaaattattggcgtaaggcgcaaattgctaataataacaaaattacctatggcgatttggttgagcacttggcttctctgaaacagcaggaaggaaggcttccacagatcccttccgcccgtttaaataattttattagtgacttcattgctgatccggaaaataaagataaagggaaaaaacaggcactggaaatatggcaggcgttgaaagaaaaaaatttacctaaaacgtatcttgcttataaacagaataaataccaaattgaaaaataa

SEQ ID NO: 9511 - DNA, 1197 bp, Photorhabdus luminescens
atgaaaaaacaggaaaaaacaacctcccgggcaattatcgccgccagcatgctgacgctgataacgggctgtagccatatggaaaaaatccatatgccagaaaaaaataaacctgtcctttctactaagctgaacatccatcagccaacatcgattattgttcctgtcactatctccggtaaaaaatatcaattcttgctggataccggtgccagttataccttcatcgataataagctggcaaaaacgctgacacaaaccacaccagaatcaaaaataccggttacattccaccgtatgttgtccgatggactggttacaaccagtgaaaaacgcttacacaaagctgacctaacattatggcaacctctggcgattaccctcggtaatcatacagtgccgagctccgatccctggattggcattgacatgagtctctttaatcagtccattggtcaggagctggatggtattctcggcattgatacttttcgtcagctaaactgggaaataaataacctgaaccacacattgacagtatggcgacatgcaccttcaatcctaaattatcaacaatgtgaaccttacagtgatagctacggcaaatctcccgcaatccaagtttctaatgtcgtttttaatatagataccggggccgattacagctatgttgctcaggaatttattgaatatctgaaaaaagagcacaaagataaaatttctgaaggaaccagtgtcaaatacgcgtccgctagtgggcttgatagtagtaaagagtatctgattgatggcttttatttacagcaactgccggtaggtcgtctgagaattggcgaaaataaaagtggtctctacaatctcggtatgagtttcttctcacgttttgataattatctgtttatcccaaataaaatgctgctctgttttaacgctaaaaatttcacccgttatgacagtccattacttcgcacaattgcaatccgttattttaataacaaagtagagatattttacaacgatcccaaagatatcgaaaaatttggattaaagaacggtgatattgtactggaagttaatggtcaacaagcccttcctaaggatatcacctatcttcgtaatcagttgtcagaaacaccatcgggtaaattgacaataaaaattgaacgagataacacccagaaaattataactatttaa

SEQ ID NO: 9512 - DNA, 990 bp, Photorhabdus luminescens
atgtctatatcactaaaactcagtattgtcgtatctatttataatggaatgcggtttttaccgcagttttttgttaatttatctcggcaaaagctagctaattttgaattaattttggttgatgatggttcaacggataatagtcgccagattattgagcaatatgccaaaaaattcccaaagatagaaattatcgcgcagaagaatcaaggggtttctgttgcccgtaatacggggttagtgaaagccagaggtgattatgtggcttttcctgatattgatgatgtcatttatccgggtatgtataaccggctgttagagattgctcagaataatgatttggatattgctacttgcaacggtcattatgtttatgatgatggtcggcctgctcgaaagatttttccttccgatcgcctctcttctaccgcggttctgagcggaccagaatggttgcaacaagcactgagttcacgcaaattcttgcatgtaacttggctgaatatctataaacgggcttttctgacaaaacatcattatcagtttgaaccggggttgcatcatcaggatattccgtggacaacagaactcttgttgacggcaaatcgggtgcaatatattgatgaatctttttatgattatctgattcacgccgcttcggtgtcccatgttcctgcggatgatcgtattaaggtaagaacagcacatcactatatgaaaatcttggagatgctgaataagattaatcagcgctatccacagcaagtcaagcaggtgccggcatgtcattggcaaattgcgaaagaggggctagggattttgcataccattaatgagatagaatcctctacgataaaacaacaaatcgttcatgaattgtttgagcgcggtatttggtcaatgatctggaaaaatgcccgtggatttagattgcgttggcgtttggctcgtcgttatccgcgacttcgagcggtgttaaaagccgtttaa

SEQ ID NO: 9513 - DNA, 951 bp, Photorhabdus luminescens
atgaccaccaaaaaaattattcttgattgcgatccgggacatgatgatgccattgcgatgttattggcgcatggcaaccctaatattgagctattagccgtcacgacggttgtcgggaatcagacactggataaagtcactcgcaatgcgctggcgatagcgcatattgccggtattaccggcgtgccctttgcctcaggctgtcatcggccactcgttcgcgatatcgaaacggcatcggatattcacggcgaatctggtctgggtggcgtgaagttgcctaaacactcccgaacacttgatccccgccacgcaacggatctgatcattgataccatcatgtctcacccgcccaaaacggtgactttagtccccgttggcagcttaaccaatattgctctcgccgtccgtaaagcaccgcagatcgttgagcgggtaaaagaagtggtattaatggggggtggatatcacaccggcaacagaagtgcagtggcagaattcaatatcaaaaccgatccggaagccgcacatattgttttcaatgaaaaatggccgctgaccatggtcggtcttgatctgacacatcaagctcgcgccacaccagaaatcaccaaagcaatttcacgtatcaataccaaagtgtctcggtttgtcgtagaactactggattactatggtcaacgttatcaagagagacatggtttcaactgcccgccaatacatgatccttgtgccgtcgcctatgttattgatcctacagtgatgacaacgcaaaaagtccccgtcaatattgaactgaacggtaccttaaccgtaggaatgacagtggcggatttccgttacccgccaacagaagattgccatacccaagttgctgtcaaactcgatcaacagcgattctggcaattgattattgatgcattgaaaaacatcggcgatacctgcgattaa

SEQ ID NO: 9514 - DNA, 756 bp, Photorhabdus luminescens
atggatattcatgtagatagattatcaacagtgattgagtcggtggcaaccagtgaattttatcctaatttactgacttggttggagcaatttattacttttgataacgccattgtctatgccttcgagcaaggttctcctccgcgttgtttgagcaaaactgagaagaaaaacagcgatgcaataaatcagatttatcaacagggtgcttatctgcaagatccattctatcaagccttgatagatggggctggcactgatctatttaccttacgggaacttgtcccttcagggttttatcatactgattattatctgaatttttatcgtaagaccggttggcaggatgaaacgggggtgttattgaagctctccccccagaggcagcttggcctgttttttggtaaggaaaatcagccatttttcatccagaaaccacattggaaaaacctgaaaactgtactggaaattatccgcagtgtggcgcgattacatgatgatatgactcagcaaccacctgctgctgagatggtttgtctggatactcagactcgttatgccttgactccgagagaatgtgagattgtggagttgatattgcaaggtaaaggttcaccacagattgccgagaaactttttatcagtacggggacggtgaaaaaccatcggaaaaatatttatcaaaagttacaaatcagatcacaagcagaactttttagcctgtttatgatgcctcctgtccgttattttgcctaa

SEQ ID NO: 9515 - DNA, 1305 bp, Photorhabdus luminescens
atgaacaatcatcttgattcattaacttattacgctgcgaccaagaaatatgatcttcgttttcccgcattacaagaagatctggatgtagacgtcgtgattatcggcggtggattttccggtatcaatactgcccttgaactggcggaaaaaggtatcactaatattgcgatcttggaaagccgtcatcttggctatggcagtacaggtcgtaatggtggtcaggttatggcgggtatcggtcatgatctggaggtgatcaaacgccatattggtgagcgagggttagaaacgatctttcagatcagcaatctgggtgctggcatcattcgtgatcgtatcgctaaatataatattgatgcggatctctgccgtggttatggctatcttggcatgaataagaggcaggaaaagacgttacgtagctggttgcaagattttaaggcggtttctcctgatgaagagattgagctttacaccggcgctgatgtgaaaaaggtgattggttctgatgcttatacttgcgtgttgaagcatatggggggagggcatgttcattccctaaacctgttgttaggagaggcaaaggctgcgacagatttgggcgtaaagctctttgagaacagccaggtactgaatattgaatatggtcctagagtaacggttcgtaccgcgatgggatcggttcgtgctaataaaatgctgtgggcctgtaacgcctttcttaatagtggtcttgagccatatatttataaaaaggtggttaacacttatgccttccaattaatgacggaagtgttgccggacgatttgattgagaaaatcagcccgattcgcggtgcatacagtgatattcgtccggttattgattacttccgtgtgacgaaagaaaaccgtctcttgttcggtagtgcaacccctttcattgagcatatcccatctgatttgaaagcctggaaccgccacttgatgctgaaagttttcccttatttgaaagatgtgaaagttgaactggcatggggagggccgttgtgttgcagtgcaaacttgttcccacagattggctctttgccgcagcacaataatgtgttctatgtgcagggatattccggttttggggtcactccaagccatatcgtttgtaaagtgttggctgaagggatgagtgaaggatctgaacgttatgacctgatgagttcaattcctcatgcgaatattattggcaaagataagttgcgacatctgatggtatcagcgggcaaaatttggcatcaaacgtcagggtattggaaaggtcgccgttaa

SEQ ID NO: 9516 - DNA, 429 bp, Photorhabdus luminescens
ttgatatcaatagtattcattgggaaattcataaattattttatttggagcgagaacattatgattaaatcacttttactgaacaaatccctgcctgaattattggacattggtagcgtaagcaatctgggagcgactgtgttggaaggcgatccgcaggccagtatggcactgatatttggtgaaccaacggataacctgacatgtggtattttcgcttgtactcatggcaagttcagtatggtgtatccgtttgatgagcacgcaaccgtgacagaaggctcggtaaaattgaccgacgtgaagagcggtgaaaccgttgaatatcatccgggagattcctggtttgcgccgaaaggaacggaagtactgtgggaaatcaccgctgaccgttttgtgaagcattatctggcttgtaataaaggttaa

SEQ ID NO: 9517 - DNA, 1494 bp, Photorhabdus luminescens
atgagtgatataaacttattacagccagtgatggcctttttgcaacacaatcatgggcattatattaatggtcagccagtcagtggtcaggggagtgaaacattttctgtcataaatcctgcgactgatgaaatcattgcaactgttaatcaaggcggtaaagcggaagttaatgctgctatgcaagcggcacaggcggcatttcatggggtatgggcccaaacttcaccgatggagcgcggtcattgcctgaatcgtctggcagatctattactggcacatcgggaagagttggcgcagttagaaaccctttgctccggtaaaaccatccagttatcccgtatgctggaaattgattcttctgctcaattcctgcgttattttgccggatggtcaagtaagatcagtggcgaaaccttgaatgtctctttgccctcttttaagggtgaacaatacacggcgtttacccgtcgcgagccgattggtgttgtggtagggattattccgtggaatttctccatcatgattgccatctggaaaatggcggctgcactgacttgcggctgtaccattgtgttgaaacccagtgaatacaccccgttgaccatgctcagagtggctgaattagccaaacaagcgggtattcctgatggtgtcattaatgtgattaatggttccggttcggtgcttgggcctgcactgataggtcatccgttatgcgccaaggtgactttcaccggatcggtgccaacgggtattgctgttggtaaatcagcaatggaacagggattgactcgcgccacgttggaattgggtggcaagaacggtgcggcgtttttagcggacatgtctgttgaaaaaattgtcgatggtattctggaagccggttatctcaatcaagggcagatttgtgcggcagcggaacgtttctatattcccgcaagccatatggatgatgtgctgaaattgttgtctgaaagactcgcggcaatgaaaattggctcgcctctggatgactcaacagaaatgggtccgttggcaaacaaagcacactatgacaagatcttgtccctgtttgagcaagcgcgtcaagaaggcagtgagattgtttacggtggtcatgctctggccggaccgggtttctttgtggcaccaaccgtgattcgtgctaacagccctgaagattcattgatgaaggaagagacatttggtcctgttgggactttcctcagctataacgatgaggaagagctgattggcttgatgaatagcactccgtttggtttagcggcgagtttgtggaccaatgatctcagcaaagccatgcgcatgatcccacgtatcgaagcaggaactgtttgggttaatatgcatacattcctcgatccggcattaccatttggtggtaccaaatcctcaggtataggtcgtgaattcggtagcgcctttattgagcactatactgaattgaaatccgtgatggttcgctattga

SEQ ID NO: 9518 - DNA, 1098 bp, Photorhabdus luminescens
atgtggatatgggaacaaccgaactggccgaaattccattggaatgccgatactattgcaccattactgcgagatgtgcacttcaaccaaggattgttattaggcaaatctgattatgaagacaccaagcaggcaacgcttgatagccttctatctagcatactctattcaagtgaaattgaaggcgaaagattgaatgcggcttcgatacgttcatcattggcaaacagactaggcattacggaagaaaaaccttatccaatcatagagaagagtgacggcattacagaggttgcccttgatgtgatagaaaatagccactccgatttaacccttgagcgtatcctcagatggcatcagttgatattccctgaaggttataccatgttcaatccgatacaaggaggtaaattacgcaaagggatgatagaagtgatatccggtcgtttagataagccaaccgttcaccttgaagcgccaccgccagaaagaatggtcgacgaaatgccccaatttatagagtggttcaaccaatcccgaacagatgccagtctcgatcccatcatcagagcagcaattgttcatttatggtttgtaacaattcaccctttagaagacggaaacgggcgcattactcgatttctaacagaccttgcacttgctcaagccgaaaaccgctcaatccgtttctatgcaatgtcggtaagtatttgtcatcatcgtaaggcgtattacgaactccttgaaaatactcaacgtggcggcttggatattactgattggttggtttggtttctgaaaatattgaatgagaccttaataaacaaactgcaagaaattaatcaggttgtgcaaaaagctaagttttggcagcgaatagaccagactcaacttaccgcagagcaaactaaggtgctaaaccgtatgctggacggccattttgagcaaggcattagcagcagccaatatcaaaaggtggcgaaggtaagtcgcgccactgcaaccagacacttggcacatttggttgagctaaattgtttagaaagcaccggggccggtggtcgtagcactcgttacgttattaatcacaaaggttga

SEQ ID NO: 9519 - DNA, 270 bp, Photorhabdus luminescens
atgactatgccgacaagtgtagcactaagcccttattttgaagcatttatccgcaatcagattgatagcggccgttataacaatacaagcgaagtcattcgcgccggtcttcgtgcgttagaagagcgagagcagcaagtaaaagttgaatcactcaaaagcgctataatggctggcatccaaagcggtgaaagtcgagatgcgggagatgtttttgaccgccttacgcaaaaatacaagaacatggccgaaggtagtcagggtaaatga

SEQ ID NO: 9520 - DNA, 288 bp, Photorhabdus luminescens
atgaaactgagtatttcgcctctggcagaacacgaccttgaagaaatcggcgattggattgcacaagataatcctgtaagagcgctcagctttaccaaagagttataccagcaatgcttgttattagcggaagcacccgcaatttatagggaaagacctgagctcgggaaaggggtcagaagcagcgcttatggtcgctatgtcgttttctttcagattattgatgatacagaagtccgtatataccctatggatttcaagatgcctcttgaaatccatagggtataa

SEQ ID NO: 9521 - DNA, 432 bp, Photorhabdus luminescens
atggataatcatctccgttgtcggtttagtgaaggcagcattaccctaccagaaggttatcaagagcaaaccgtcaacatcattacagcccctaatgcccctgcattgaacatttcccgtgatagtttggatgaaggtgaaagcctgaccgactacttggttcgtcaaaaagagttactaaaaaaaggattgcgagattggcaattacttgacgaacagcctgcggttcttggtgacaacctgttatccggcaccgcgctgttttcccgttatcgtcccaaaaaagagcaacaagtttatcaatatcaggcggtgtttctattagatgaccgtaaggcgctgattttcactctgtcggcacatcaggccctatctgagtcagagcgccaatggctggatggttgtctgaagagttttcaattaccacactga

SEQ ID NO: 9522 - DNA, 4275 bp, Photorhabdus luminescens
atgccagaagcggcacggttgggtgatacaataggccattctggcgctttagctggattgattggtgggacgattttaggagcagctatctctgcaattggcggtattgtaggtggagcgctgtttgctgcgggtattgcgtcctcctgcttgggggtaggtattctacttattggcctgtctgttgcggttgggatgttggcaagccatctgggggaaatggcccgagataactgtaccaaatcgggggcagcgtcgcgaagtccctgtggaacaattacccgtggttcctctaatgtatttatcaatggcaaaccggcggctatcgcaacctatagtcaggttgggtgtgacaaggatggcacgcgccagatggctgaaggctccagttctgtttttgttaatggttacccattagcacgggtcggggataagactacgtgtgatgcggtagtcatgaccggttctccgaatgtttttatcggcggcggcacgaagcctaccgaagcggtgacgccagaagtgccgcattgggcgtatcaggtgtctgacctcacgatattggcggctgggcttattagttttggcggggcagcggctaacggccccagtgctgtaaagaaattgtttagtaaaatccctggcgcggggaaaattggcaggatactgtgccgcctgagtccgttggctattggtgcgtcagtagtgggtatcctgatgaatccagtagaagtggtagccggacagaaatttcttaatgacgacgacgaactggactttatcattgaaggagaattgccgctgtattggcagcgttcgtacctgagtagttatgactatgacagtgtgttagggcgtagctggagcctgtcttgggaaagcacgcttacgtctattgaagagggaatattatggcgttcaccactgggtgaaattatcccttttcctgatgtgcccatcggctatcgctgtttctgcccggaagcacaaagctggctgatgcataccccagaagacacttgggaaattcgtgatgccagtgaacatatttatcattatcctgaatttggagctgatagtaccagccggctgagccgtattagtgataacgtcggtaatgaacaggtattccattacaacgaattgcagcagatggtgaatattactggcagtggtaaattaaacctgcattgtgactatcttctcattgaacttggcggcaaatccgtttcccgcctgaccaccgtctggcaggtattgtataacggcagccgtgtactgctctgtcgctatcactacaatgaacatgctcaactggtgggtgtcagccatcgggatgaccatcttaagcgccagtttggctggcatgaagggggattactggcatggcatcaggatgcacgtgggttacgctgtgactaccaatgggagcaaacggaagaagcgctgtggcgggtgatttcacagcagaccagcgagggagcgggttaccgtctgcattatgatgaggaacaccgtgttcgtactgcgcaatggtatgacggtacaacgacggtctggacactcaacgaagagcatcagattattcactgtatggaccgtgcgggcgtggagcaccatctgttatgggatgaatttggcttaccgacaggctatcgagatgccgatggtaacacgcgacggtgtgagtgggatactctgggacgacggttgagttttactgacggcaatggtcatcagacgggctggcagtatcaaaatgacactgatcgggtgacgtttattttgtggccggatggctgccagagtgtttttgagtatgatgaccgtggtcgattagtgagtgaaaccacgccactgaaacagactacccgttactgttatggtcacaatcagaccttgcgtccttacctgcgtatcgatgcccggggcggagagagccgttttatgtggaacgatcaggggcagcttattcggcgaaccgactgttcgggccaggccagtgagtggggttatgatatgcaataccgtgtcagtcgctttaccaatgccttgctggaaacgaccagctatcattatcacgatgatggacaactaacacaggttacctatcctgatgattctactgaacgaatgacttgggatagcgccggtcaactgttgagttaccagcgtaacgaaaacgaagcccgttactgggaatataatgtattggggcaggtggtttgtactaccgaccgtttacagcggcaaatccgttatcattacactcccgaaggatatttggtcaaaattgacaatgccaatggtgacagttacatcctgacccgtgatgctgaaggttggttaacggaagaaattcggccggatgaaaccctgatttattatgaatacaacgccgctggattactcagtaccgaaagacgcatgggtgatagagtgtttaagtacccggagcgtcgggtacaccaccgttatgatggcgctggaaatcttattcagcgggaaacgtatactgataactatcaatatcaatgggacagcttggggcggctgcgacaggcagagcgccagcccaatgaagttggaaaaaaactggatattctgccgaatacggtgtgttttgaatacgatgctttggggcgggtaacccgggaacaaaatggtgaaaatatcctccagtttggttatgacgaattagataacctgacggaactgaccttaccgcagggagagacgttgcactggctctattatggttccggtcatctcagcgctgttcgttacaaccagcaactgataacggaatttgaacgtgatgccttgcaccgggaaacctgtcgcacacagggggccttattccagtatcgccgctatgatccgttgagtcgttgtatcagccagtacagtgtgccgcaggctaacgttcagacggatataaaaccggaaatctggcagggtaaaccctggcgggcgtggcattatgacattcaggatgagctgttcctaagggaagatcattacttggggagggtgaattactcctatgatttagaaggccgtttgaaaagcgtagatagcacggatagttatcaggaaatgttctggtatgacggggcggataatctgcttgaacacccgcaatcacagagagagaggcagccggtagggagccttactcccccgggagacagattaagtcaatggaacaactggcagtacgagcatgatgaacatggcaacgtgattagccgtaaaaatatgcaggggcagcgttaccggtacgatggcgacaaccgactgacgacagtggaagagctgagtatgaaggttgtctatcactatgatgcgcttggacgccgtatcagtaaggtggtgaaaaccgggattggtggacaggcacgttatgaacaaacggattttgtctggcatggtttgaggttgttgcaggatcatgagttaaaaaccggtaagaggcaaacctactgttatgaatctcatgacagctacaccccgctggcgtgtattgaatcaagagggaccgtgcgtgagtatttttggtatcacaccgatattaatggcgcgccactggaagtcacgaatgaggcgggaaaaatcgtgtggtcggggaaatacgatgccttgggtaaaattagtggtctggcgctggcctattttgtcgatactgatcgttcattccatgatttcaagcaaaacctgcgttatgcagggcaatattttgacaaagagacggggctgcattttaatacgtatcggtattacgccccagagattggccggtttatcacacctgaccccattggattagcaggtggattaaacttatatacttacgcgcctaacccaatgagttggatcgatccgtgggggttatacaagggtgagggacaacggggtttagggaagtaccatgtcttccatgaacacaccctgaattcatcggaatatcaattatctgatggtcagcactttaaacggggcaaccaatctgtgtacgaaagaatgcagcgcgatccggcattcagacgtgaaatgcagactaaatatccgggagtggtggaacatgttcagccaaattctaaagggaactttagagggacttcaccaaagaatatgacttggcatcatgagaatcagccagggaaattaagtctggttgaccgatatgaccataagtcctatcacaagatttatcatcctgatgggtcaggtggtagagataaatggggaggtgggaataaatgccgcaagtaa

SEQ ID NO: 9523 - DNA, 306 bp, Photorhabdus luminescens
atgaaaacaattagtggtttcgatcagttacttagtctttataaacaactgcctgatgttggttggatttatattgataaagattttgatacagaatctacccaagatattttaaataaaaattattatctggctgaaaatgatgatgaagagtttgatatggatgaaactcatggaacatttctagaatgccccatgtttgcagatattatcgataacaaactggaacacaatcctaatgcgattaaagaagatttaattgaagcagtgatacattatcttgtatacgatgattttctagattaa

SEQ ID NO: 9524 - DNA, 525 bp, Photorhabdus luminescens
atggggctgcattttaatacgtatcggtattatgcgccggagattggccggtttatcacacccgatccgatcgggctaaaaggcggactgaacttatatcagtatgcgccgaatccggtgacttggattgatcctttaggttgggcgggcaatcctaaaacggcaacgcatatcacttatcagggtattgatgctgaaactggcaaaccgtatgtgggctatgccagtaagcaggggcgacaggcagcccaagagatattgaaatatcgatatggtaacggttttggtcgctttggtggtaaaccacctgaagttatctatgaaggttattctcaagcaggtaaagatactgctcgtggattagaacaacggcgatttgaaaatctgggtggtcttgagggtacagctaataaacaaaatccagtgggaccaaacaatacccgccggactgattatctggctgcggcggacgaacatctagggcaaacaactaaacgcaacggcaaaggaggcagccgttgctga

SEQ ID NO: 9525 - DNA, 612 bp, Photorhabdus luminescens
atggtgaaacgaattgtctggaagcataaccatctggttaatattaaactgagggataatctgtataccattggacagatgcttaatagtgtagaaatgcagttttatgatatctgtaatacagatggagtctggaaaaatattgatttaaatcaagtgcctactttatttcggattttagttgtcaatgctgtttataaattgatgccagataaaattaaggataaatcagttattcctaatactcaatcctataataattactggataaagccttattcttcattcgatggtgatcattatcctggaggtaaaaactcttttttatttatgggcggtaaactgattgatatcggtcctgagggtaatatcggaaccacactggcacccgtattaaaagaagacttaaccttaccaaacgatcgggaactcattgaaaaatatgaactaaccaatatgtggtcacatgaagagttagcagaacgtctgtgtcgttattttgataccggtattaaccgtgatgacctgaaattcgaggtgtttccgggactgtgggatgacagagagcaattaaggcccttgaccagtcgtttaccggtaccgctacgataa

SEQ ID NO: 9526 - DNA, 885 bp, Photorhabdus luminescens; identical to SEQ ID NO: 6610

SEQ ID NO: 9527 - DNA, 165 bp, Photorhabdus luminescens
gtgattttccggtttgatcaaataacactgagcgcatctctcttcccccgcctgaccgccgtctggcaggtattgtataacggcaaccgtgtactgctctgtcgctatcactacaatgaacatgctcaactggtgggtgtcagccatcgggatacctccatataa

SEQ ID NO: 9528 - DNA, 660 bp, Photorhabdus luminescens
ttgtctactgtactaccgaatagccgtgaaaatgctttaatctacagttgcttaaataccattgcacatctggttcctatctcagccgcagcattctatctggtgaataatgaattacgccctgaaaattacattctgtacggcatctcagacgaaacccaccagaattatctggctcattttcagcatttagatccattaaaaccagctaattatcaacaaggtgatattaatatggttggcatggatcagaaaatactgacgaaacataataaatattaccatgaatttatgcagccaaataatatacaggacatcgccgaaatatttatccgtcaacacaaccaaattattgccggcgtctctttattacgagataccctatttacaccaaaagactttaaccgcctcagtgctattctgccattaattgaattagctgtcagagatttgcttcctgaaacaccaactattctgacagctaaagagcaagaaattattaatttaataagagaaggatcaagtaacaaacgtattgcacagatacttaatatttccctgtctaccgtcaaaacccacctgcgcaatatttttgccaaaacaaaagtgactaaccgtactgaactcgtttccagtgggtttattactcggtatttgtga

SEQ ID NO: 9529 - DNA, 1494 bp, Photorhabdus luminescens
atgaatatgtcaacacgactgacttcgcatattgaaaagggagtggtgggatttcctaccgcactggcaagttccatcggggtgatcatggcgagcccggttattttgaccgtgaccagtggctttgggattggcggtgacactttcgtactggcaatgttgatcagttttatcatgatgcaggcccaagtgacgacgtttgcggaggcagccgctattttgcctacttccggctctgtttatgactatatttcttgtggcatggggcggttctgggcaattactggcgcactttcggcgtatttgattgttcatatttttgcgggtacggcagaaacgatcctctctggtattatggcattagtgaattttgacagccttaatacgatggtggaaagtcataacgcttcatggatggtcggtgttgggctcgttattacgttcggattactgaatgcgttgggtattgaagcgttcggtaaagtcgaaattgtgctgacattctgcatgtggagtactttggttattttcagtatttgcggattattaatgccatttgctgtgccgctggagagttggtttggtgaggggcttaatgtaagcgatcccttggcagtgctgagtctggtaggtatggcgatgtttatgtttgtcggttgtgaactagtgacgccaatggcaccggaaattaaaaattctgccaaagttttgccgcgagcaatgatgacgggcctgtgtggggtggctttctgtatgggtctatatggggcgtcaatcagtcatcaggtagaaaatgtgttggtggatgtagaaaataatgttcgcttgctagaaacgccaatggccattcctgcttttgctagccaggtgatgggggattttggtaaatattggattggtatcgggttattattggcgggagcggcaacgattaataccctgatggcggcggtcccacgtattctctatggtatggcattggatggtgcgttaccgcgtatttttgcttatctacatccacgttttaaaacgccaatatttgggattttggttgcggtaatgatcccctgcttacatgcctttattattcaaggtgatttgagtcggattatgcctttggtgctggcagcggtatgtgcctggtgtgtcgcttatttgctggtgacatgttctgtgatattactgcgtattcgcagacctgatttacatcgtgcttataaatccccttttttcccattacctcaaattgtctctagtgtaggaattattttggcgattattcacattacacctccgggaatgaatcccggtgatgtgtacattccattcgccatcatgttgggtctgaccgctagctatgccctgttttggacgctctgtgtacaacgggtgaatccgtttaaacccgtacccgttgagcaggtactttcacatactttcactaagggtgaattgccggaggtacagcttgagccacttcgttctcttaattga

SEQ ID NO: 9530 - DNA, 501 bp, Photorhabdus luminescens
ttggaacagaatttatcgccttactgttgtgagcgtttatcagcggaaagtttgcaagtgacgttacctgatggattgcagattgacgtttgtgaaaagccgaagacgctgtttctggcctatattgtcagttgttgttttcgtttgcagggaatgacttcactcaaggaaaaaatcgttattaaagccaagataaaggggatatttcggcgaaaaaccgtgacttattactgttatcatggtgcagaatatgggcaacagattattgatttactcaatcaatatccattaattggagaaacattagcagagctggatttccgggatctggtattgaatattcatcaagggcaatggcaacttgaggtggaacattttgctgcttctgagattgtcagccgattgccggccagtcgtcgttatttgcgtttgacttctgagcagcgttatttgttgctcagttcgttgctgatgtttagtcaactcatggaaaagatctaa

SEQ ID NO: 9531 - DNA, 396 bp, Photorhabdus luminescens
atgattattaaagagcgtattcaggcgcgtttgaagcgatcaaaacgttatgtgttcattcgtgacgactttaaagatattgctggttacgatcaggtaggaaggatactgcgcggtttggtcaaagaaggtcaattgctgaaagtgggatacggtgtttacaccaaggctcggaaaaatagcgttactgggaaaataatgcctgcttctccgggaggctctgatgcggttattcttgaagcgttagagcgtttaaaggtgaaataccatttggatggagcttctgctgcctatactgacggtaaatcaacacagattcccgcttatacccaaattaaaaccacattccgttttaaacgggtgttatcggtggggaatagccggttaaatggatga

SEQ ID NO: 9532 - DNA, 963 bp, Photorhabdus luminescens
atggatgatttatcaggtttatttgcagatgttgccgatgtactaggtatcggtactatttctattgtggaaaaagattactatgttgttgaactgcttcgtctgctacagcctttagcgtttgatacccataaactggtatttgctggtggaacagcgttggcaaaagccggaatttcacttgatcggatgtcggaagatgtggatatcaaactggttccacagcctgaatttttggtgggtgttcagtactcccgatctcagcgcaaaaatatcagaaaggatattgttcagacgatatcagcgactattgcagcatctggttttttggggattgacgatagcaaccctaagatcacacgggatgaatatcgctacaatgatatttcggtccgctatccccaacgtgttgtacaggttccctacctcaggccatttatcaaactggagttgatggagtctgatttgctgcaagcggcagaacggcgcgatattcgttcatttgtcacgcaactaacaggaaaaggtcgggcggttgaagcgttcccctgcacgacgattatcagcactcaagctgaaaagctggtagctatgctgagacggactgctgtgtttatgcgtaatattgatagaaaggatgacgagtcactggttcgtcatctgcatgataactactgcattgtgaatgcaataggagtggatatccgtcaacttgctggttttgtacaacaaactattgaacaggatattcagcgctatggccgccagtatcctcagtttcagatttcgtcgattaatgaactgagagctggattggaagagttgggaagtaatcccatctatcagcaacgttatcaacaacttgtgatcccaatggtctttgaacatagtagaataccttgggcagaagcttacgattgtttccggcagacggctttatctgttctgaatgagctgaactaa

SEQ ID NO: 9533 - DNA, 1449 bp, Photorhabdus luminescens
atgatagacacaaatgacagatgggatatcagcaaggaaatcatctcttcactatttcctgagatacatcaacgtaatgatattattgaattcataaagaattcagttaacaatcacattgctgagttgccgacaatgggagttaatccttcactttccaaaactgatatttcccacgctttatcaaaatacacctttgatggcaatttttcgccaacagatgttttaaatgatgtattacatcttatggaaaaaggaattgttcatgtcaccagcccgcattattttgggctatttaatccatcatcaactttctggggtattatttctgacttcattactgcgctatataacccacaattagcggtctggagtcacgccccggcctgcgttgaaatagaggaaaaattaattaaatattttggtggcctggcagggtttaatgctgataatagcggaggcacatttactaccggtggtgcagaagcaaattgtactgcgcttatttgcgccctgacaaaacattttcccgattatgcccaacagggtttacagtcaataaatgggcaacctattttttatatctcttcagatagccatcttgcctggttaaaaatagcattacaatctggtttgggacacagtgctgtcagattaatagcggttgatcatacaggaagaatggatatttcaggtttaacccgagctattgataatgatatagcgaacggcaataaacctttcatgattgttgggaccgctggaacgacaaatgcaggtattatcgatccgctgccagagcttgccgctgtggcaaataaatatcaactgttcttccatattgatgcagcatgggcaggcgcaatcctgttaagtgatcaatattctcatcatctcaagggtattgaacaggctgattccattaccattgacgcccataaatggctttctgccccaatgggtactggcatgtttatatgtgcagataaacatattctgacaacaccttttgctgtttccaccaattatatgccggttagtgatgatattaattccgatccctacattcactccattcagtggtctcgacgttttaacggattaaaactatttatgcctctggcaattcttggccgaacgggatttagcaatatgattgattatcagatcaatcttgctgattatttaagatcacaactggcgaaaaatgattggcagatattgaatccctctgctttgcctgttatttgtatccgtgataatggagattttgatgttaataaaattttagagaaagtattagagattaatcaatgctggatctcaataaccacctttgccaatacaaaagccctgcgcctttgtatatccagttttagatccagcaaatcagatattgatcagcttgtcgatactttaaatatggcgcgaaattctgtgccaatgtaa

SEQ ID NO: 9534 - DNA, 1302 bp, Photorhabdus luminescens
atgaatacaaataataaaaaatttatagatgtactcagcattggctttgggcccgcaggtatcgcattagcttgtatatttgatgagaaaaaaatcgaacaccagtatcaattgcaaaataatttcttagcacttgaaaaagcagattcttgtgcctggcatcctaatttattattgccaagcaccgatattaatcatcatgtttatcgggatttagtgacccccagaaacccacaaagtccttatagttttgccatgtatttgaaagaaaaaaatcgcctgtttaaatttggcttattaggtcgtccagcaagtcgctttgaatggtcagattacatgatctgggttggacaaaaactggaaaattatgtgcaatacaaaaaaaatgtgactcatatatatccggttatcaaccgtggattactggatggctttagtgtctccggggaagattttgagtatgttaccaatacgctgatattatccagcggatcaacgccatttacgccaaaaatgtttgataacttgttaggtgatcatgtttttcatacctctgcatatttagaaaaaataaataatttccaaaataacataccccgaagatggatggttattggttctggtcaaagtgccggcgaagtgattgctgacttaatcaataaaaaagatgatattgacattctttcactgcatcgttcaatcggctttaagatcgcgcaactaggccaattccccaatctggtattcttaccagaaaatatcgaatactttaaatctttaagcccggagaacaaaaaagtatttttcgaacacgttaaaagtacaaactattcaggcattgatattgatgagagccaatcgctattttcaacgatgtatgaagatgaagtcattggcaaagaacgtcttcacatgatggtcaattcagaaataattacgattgaccactctcacgaagaataccaaattgttattaaagatacatttactggtgaagagactaaccatatttgtgacgctatcgtgttaggcacgggatattatcaaaacccgctacctgatctactggcaaaattcgatcaatttttggtaaaagattttgaaggtgggcttaccatcgacagtgactataaagtgaaattaaaaaattgtggtaccgctcatctttatgtcaatggcctttcagaacgaactcatggtattagcgatgctcaatctttttccgcagtcgcgataagagcagaaagaatatatgagtctattaaagcgaataccggaacgactgatgattacgctatttaa

SEQ ID NO: 9535 - DNA, 966 bp, Photorhabdus luminescens
atgaatagcaagcttatttgtggcatttccgccattttagatcctgagagatcggtacatgcattaactgtcatgcgtgctattgagatatttaaagatctacataacaatagcacactggaatttatcttcagtgaagattatggctcaattgaaggaggtgctaaagcagcacactataatattgagaacaatgtcgatatggtcataggtcatttttcaagtaacgcggcaataggtgcggcggaagtctactcacatcataacattcctgttctgttacctactgcaactgaaactaccttgaccataagaaatagcaatatattcagaatttgcttcaataataaaaatattgcccatgcacttactgtattaacaaaagaagatggagatcactattatgaaataaaaaccgatggctcaaaatatagtgataatctggcagaagatattcgcagaatgttgagcagagacgatgctgcggtaaaacccaatgacaataccgatcaaattatttttattggtactatcggtaaaagtgaaaaatttcttcatcattatttctctgaaaagaaaaatggaaaaattatccttactgatgatgctgcatgcaagcaacttaatttgccagaaaatgtggaaaatggacaaattaccggtatcggatttgctccagtcgaattcattaacccactggaatcctgtatccaacactatatccaacaataccagcaattccctaacatcttctttcttgaaacctttgccgcattggagattgcccatcaattagcgattcccgataaattattgcatcgtttgaatagagagacattccagacaatcctcggccatattaagttcattaaaggggaatgctcagccgctaaattatgtttatggatgaatgagaactccattatgaagccacgctatattttacccattaattcgagagcttaa

SEQ ID NO: 9536 - DNA, 1128 bp, Photorhabdus luminescens
atgcaaacagataaaaccatacgcattaccattataggagggggaatagttggcgcaacagttgctgcaaacttggcattgaaaggactcaatgtctccctcattgagcaagagactattggcggtaatggcgcgactaaattctccggtgcattattccgcgtacatgatcctgatccggaaattgccaggctcacacgaagaagtgtcgagctaatgcaagagagtcaggtaggaaaaatatttaaaaaaacgctcaaacagacaggtattatttatgccgccgaactcaatcagaaaaatattgaattagtcaaaacaagtatcagggattattgcgacagtctctatcctttagagctcatatccgccgaaaaagctttcgaattaaccaatggatgttattccaagcataacaaccgaattatcctttttgagcccaatggcggatttggctatattagacatacagcctcaaacttagcacaagttgttagagatacggggaatctagtattagagaataccaaagtacatgcaataacaaccgaaaatggtaaagccatcgttcaacttgctcactcaaccattgaagcagactatattgttttagccatcggtgcatggacaaaaacactggcatataaactgcccgttaatgctaaaagtatccctctggcaaatatccgtacctcctacagtacaaatatgccaattatagataccgaaactggcacgcatatcgtgccacttgctgaatatttctatcaagccggatctaagattagaaatgtggccgagacaccagaagatatagaatataatgataatattattgaaaacgatatcagcgaaaggctcctaaaatcaaaatttaaacatgagccaagcaatattctctctatcattaaaggatatgattcatatacaccagatgaacgccctattcttgactttatcgatgaagaaaagagatgttttgttgcggctggattctgtggtataggatataaaatcgctttagcggtgtctgagattattacattaaacctattgccaactgaactttcgactgattttctcaaacagaaaaatcagattttctcctattcacgatttacttattaa

SEQ ID NO: 9537 - DNA, 1494 bp, Photorhabdus luminescens
atgaataaatacattgtcaccattacgccaccaacaccaaatggcgatctgcacgttggtcatatagcaggaccatttttaagtgcagatatatttactcgcactcagcgtttaaagggtaaaaagtgttatctgatatcctattcagatgattatcaatcttatttacagcgcaaagcagaagaaataggcataagtgcaccagcactggcaaaagagaattcgaaaaaaatacaggaatcattgatcttaattgatataaaactggatcattggctagagtcatacgataaccgctattttgaagatgccgtcaagatgctctatcactcttgtttggaccaaggcattattgcaccaaaggtgagtttagaaccttattgcgaaaaatgtgaaaaatggggctatgaagcctttgccagaggtgaatgtaatcattgtggtgaaagctcagatccaagccaatgtgaatcctgcgcaatggcaccggacgcatttgaaatgaaaaatttgcgctgtattttgtgcaatgaaaacgttgtttataaacatgttgagcgcaactttctattactgccggtaattgccgaaaaattaaaagagaaaattcttagttctcctatgaggccacaattaacagcatgggtcgaggaagtttttgcgcatggtataaaagagtggggcgtgactcgccccaatgaatcagggctgaaactctattctgatgaaaatcaccgtattcatacctggtttatgggattagccggatatttagcaacactgaaagagctttctgaaaaaaacgccgatacagagagtccttatgaccttatttatgatgataatacttgcatggtcaattttttaggtatggattgttcttacagccatattcttgcatacccggctcaaatattattgaacgacgaattacactttaaacatgctttctatactaactttttcttaaaattagatggaaaagatttttcaaccagccgcaatcatgcgatttgggtgaaagatatcgtcaaaaatgcctgttctgacagtgtcaggttctatgtctctctaatatcgccagaacacgcttctgaaaattttgtcgtagaagagttctggacatggcggaatcatatctttaattatctgctgcccaaaatatctgataatttggaaaaaatgaattctgataatattaccagccctatcgtattatcagaatcagaaacaaaaattatcgaaagatggcaaacctattccagatacgataatttttcgattaaggaaattgccgctgaattaatggagatgttagatttattaaacgcaaaattaaattacaatattttagacaagaatcttgctattttatttgcaattttgtctgaaccgataatacccaaaacatcccaaaaattaaaagaatatattactcaccatgatatagaggctttctgttcattgttaaatttatcaagaccaggtgtttga

SEQ ID NO: 9538 - DNA, 369 bp, Photorhabdus luminescens
atgatgaatattattcgtaaaatggattgggattcaatggttcatgaatatgatctggacggttcaagacttttaccgtgggaggggctaaatacgccatttggcggtgcatggtgtattgtacgaccagaaaccaaaagtttccgccattcccacaatgaatatgaattatttattgttatccaaggtaatgccattataagaataaatgacgaagatttccctgtcaccaaaggggatttaattattattccattagactctgaacatcatgtaataaataacaatcaggaagatttccacttttacacaatatggtgggacaaggaaagtacattgaactttcttacccgattagagcaggattaa

SEQ ID NO: 9539 - DNA, 1368 bp, Photorhabdus luminescens
atgaataaggttaatattcacaccacaataccaggtcccttttcaaaaatcgcattagcaaaacagctagagcaagaatcaagtgctgtgtcatatcctaaaagaattcagatttcgctagaaaaaggcaatggttgttatgttcaggatatcgacggtaatgtatttattgattttttatccggtgccggctctttacctctgggacactctcaccctgaattaattgccgaagtaaatgcacaagtatcaaaactctgtttgggcttggattttcccacgcctgccaaagaactttttaccgaagcgcatttaagtatgctacctgaaagcctgcgcaacaaatacaaaatacatttttgtgggccaacaggtgcggatgccattgaagcagccattaagctggcaaaaatagctaccggagctgacgaaattattagtttcaggggtggctatcatggatgtacccatgctgctattgccgttactggcaatagaagtatgaagaaaaatattctgggaaaaatgccgggcgtccattttttcccctatggctcagaatctcaatcttcggaaagttgggtactcaattcagatcatcttgatgccggattatatcttgaatccgccttaaatgatgcaaactctgggttaggaaatattgccgcaatcattctggagcttattcaaggtgaaggtggcgtttattctgcacaaaaatcattcgtagacagtattatccgtgtttcaaagacatattctattccggttattattgacgagatccaaaccggttgcggcaggaccggaacctggtatgcttttgaacagtacgcaattgagcctgatatatttgttacctcaaaaggtaccagtggaatagggttaccctcttcccttatgttctataagaaagatttcaataattggacatcaggtattcatattggcacatttagaggaaatcagttggcattcgcctcaggtacaaaagccattgaaataataaagcgtgataatttattagagaatgtcaaacagagatcaatacaaattaaaaagcatctcgccgcgttgaaaaataattttaacatcattggtgaaattcgtggtaaaggcttgatgctaggtgttgaaattcttaacgccagcacaggtaaagcatgtgaaataacagcaaaacatattcaaaaaatagcattaaataaaggattaataacagaattaggtggcagaaacgatacggtattacgtattcttccgccactcaatgtgagtagtgataccattgaagaagccatagagattcttcgaaatacatttcgagcctatatgaatgaatttcaacttttagaggaaggtgtatga

SEQ ID NO: 9540 - DNA, 1326 bp, Photorhabdus luminescens
atgaaccaggtggaatacgatatcataggcgtaggatttgggccatccaatatttcattagcgataacactggaggaagaattaccccataaaaaagtgcttttctttgaaaaagagccatcatgcgaatggcaggccgggctgttattaacaaattccgatatccaaaaccaccctttacgggatcttgcgacaccaagaaaccccaaaagccactattcattcatcaattacctgtttgaaaataacaggttatttgaacatttaaacttgggattatattttccatatcgttatgaataccgcgactatatcaaatgggcggccaaacatttcgataaagtcgttcgctattcaacatcgataacatccgtgaaaattattgatcattatcatggggaaaatacactcattgaagtcaaaacagatggaggagaaacctatcaatgtaaaaacctgatagtcggaacaggaagaaccccctatattcctttatctctgcgacaacttgaccataaccatttaattcatggtgcagaatttaacaacattattagtcatatttccagtgggaaagtaaaaagtatcgcggtagtcggtggcagtcaatctgctatcgaaatcatgatatttttagcagacaaatttcctcaccttgaaattcacggtgtatcaaggaaatttggctaccgactgaaagatacctcgccatttacaggtgaagtttattttcctgaatttgtagacacatttttcaacagtaaagaggagcataaagcgagattaaaaagagatttaaatctgacaaactactctgcctccgatggtgatgttctcgatgaactttatcggactatctatagagataaatattttggtcagcataaaatcaaaattcataactctgcggatattgttgaatctagcgtgaaagattccattgtttcattacaaatagtaaaaaatcatgggttagaagaaacatatcaaatagatgtcgatatggttgtctccgccacaggttttaaagatattggcagggaggaatatcaggaaatctgtccacctcttctggcagaactctatccattaatgagtaaaaatagccataacgggatcatcatcaacagggattataagatagatctgattaatgctaccgatataggcatttatctaaacggattatgtgaatcttcacacggcttaggtgatgccggctcattgagtttagtttctattagatccaaacacattattgattctatcgaaaaaaatataaaaattaaaagatctattcataataaaaataaaatcgaggcttaa

SEQ ID NO: 9541 - DNA, 960 bp, Photorhabdus luminescens
atgttcaattattcaaagcataagacgtataccaatttattcaaggagaacaaaatcagcatcggcatgtttttacctctcagagcgttaaatcaagaagctgatattaaacctgaaatcgatctcattcgtgaaatcgaacaacaaaacttttccgccatttggctaagagatatcccgctgttcgatcccaattttggcgatataggtcagggcttcgatccatttgtctatgccgcctggctagccgcattaaccagcaaaatcgccatcggtttcggcagtgccatatttacgctgcgacaccccatcgatttagccaagaaagcaacgtctattgatcaattatcaaatggccggttaatactgggtgtcgccgcaggagacagaatgtcagaattccctgcctataacataccttataatgaaaaagggatgcggtttgtcgaatcaatcaatatgttcagagcgctgttggataacaacaatcgcaccattaatagcccattaggttatattgatgggaatttacgcctaatacccaaggcggtcaatgattttatccccctgatagtcactgggcgtgggcaacaagatattaaatggatcgcggaaaattcggatggatggtttacctatcctattcaaacccataataaagagggcgtcgccaaactcggtaagaatattagcgaatttagacaaaatatcccaggaaatatgttcaaaccgcacttaactaatgaatggattgatttagttgaggataaatattatcccagaacccccacgaatggcggatttatcctgaaaaccggccgcctgggactgattgaattgttggaagagtggcaagaagtcggagttaatcacgccgctcttggtattcagtacggcaaaaggccccctaaagaggttattcaagaaatcggtgaagaagtattacctgcttttatctaa

SEQ ID NO: 9542 - DNA, 939 bp, Photorhabdus luminescens
atgagttctattttgcctctgttagctctcagagcttttactgaagttggtcgacggggcagtgttaaagctgcggcggctgcaatgggtgtatctcctggggcggtcagtcaacagattcgtattttggaggatagaattggttttgcgctgtttttaagaacgcctaaaggtataaagcttacggctaaagcggatcgggtttatgagacgttattactttcgtttgataatattgacaaatctattaagtctcttaaagcaatgcagttcgaacataaagtctctataaataccacttcgtcatttgccgcatcgtggctgattcccagactaaaaaattttaatgagaaatatcctaatattgaagttaatatagaagcttccaatgaattggtagacctaaaaagaagttctacagacattgctgtacggcatgggcttggtaattacccaggtttaatatctaccaggttaattgcaccggtattaattcccgtgggtacgccggaacttttaggatcaggaccaccgataaaccatgttgaagattgtctgaattaccctttgttacaggattcagatagatctgattggcatttatggttaaaagcacacggaattaatgaaggggcgaaagcaagacagggctccagtttcgaagatgattttttactggctcgcgccgctttaaccggtcagggtttagcattggtgcctgaattttgcgttgaagaggaattgcgttccggtcggcttaacgttgcactggaaaaaaaatggccttcccgatttgcttattatgcggtgacattgccagaaaccttgttccgacctgaaattgttaatattattgattggcttgttgagcaatctaatttgtctgacgattgcgtgggagaatgttcattagcttggaaccaatctgagtcattgtga

SEQ ID NO: 9543 - DNA, 624 bp, Photorhabdus luminescens
atgatctacttatacactgatagttcaccaaatggctataagatcacaattgctttggaagagttgggattgccatacacattaaagcatgtacgaattgaaaagggtgaaaatagggagcttgagtttttacaattaaaccctcacgggcgtatacccgtacttgttgatgaaagtactgagacgaccctttttgaatcgtcggcgattctgctttatctggcatcgaaaactcagcaactgttgccggaggattttaaaagccgttgggaagcgattacatggctaacatttcattcttccagcgtcgggccaatattgggacaacgggttcattttgaattatttgtaactgaaaaaaatcatatggctatacaacgatatcgtcgcttaacggaagaggctttctctacgttgaataaacggcttagtgatcgcccctttttcgccggagatgagtactccattgctgatattgctaattttggctggacccatattgccagaattattgactttgattttagtcatcatgaatatttaagtgcctggcatgatcgtattgccttaaggcccgcagtacagcgtgggattatgataccggagccggcaaccggcccttaa

SEQ ID NO: 9544 - DNA, 1446 bp, Photorhabdus luminescens
atgtctagaactggtgaggaatatattgaaagcttgcgtgatggaagaactatttttctgaatggagaaaagatcactaatcacgtggatcaccctgcttttcggaatgcaattagaaccgtagcttcactttatgattatcaggcagcacatgctgatcagatgacgttcgaaacatctggtggtaagcgcgttggtttatattgggaacttcctactacccgagagaaattaattgccagaggtgaggcggcgtatgcctgggcaatgcagagttgtggttggttaggtagaagcccagatcatgtttctgctgctctgaccggaatgatgacttacctggaagtctttgaggaatattctaaggatagggctgaggcattaaaaaattactattcatatgcccgtgataaagatatttatttggcttttacattagtcaatccacaaggtgatcgatccaaaacgcccagtgaacatataaaaaacgtctttcatactcttggtgtattggaggagaaaccgcaaggaataattgttcgcggggcaaagatgttaggaacagcggctgtccttgcagaggaagtggttgttggcgtgtttaatccactcaaagagggcgttgatgataaatatgctctatcttttgcattaccgttgaatactaaaggaataaaaattctttccagaaaatcctatgaaacaggcagtaataaatttgattcccctttagcgcatcagtttgatgagaatgatgcagtcatttattttgacgatgtttttgttccgtgggaaagagtttttgtttataaaaatacggatatgtgtcgccggcaatttctggcaactggcgctgacgttttaatggatgttcagggtatggctcggtatgccgttaagctgcatttcttaacgggtttggctcatcagcttactgaaactacaggcgtcaatgagtttcctgctgttcgtgaatcattagctgagcttgcttgctatgccactaatattgaagggctgtttcgtggtttaattagcaatcctgatcgacataatgagtactatattcccaatcgattacaactatatgcttgtcaggttgcattacagtcaacttatccaaaggtgatagaaagcatcagaaaactttctggtggtggtgtgattatgttaccgtcaaattatattgatttagcaaatccagaaatccgtgacttaatagaaaaaacacaatattcaactctactgccacccattgaacgtgtgaaattactgaaattagtgtgggatgctatcggttctgagtttgcatcacgtcatactcaatatgaaatgttttattcaggagcgcattatgttgctctgtctcgtctatatgatcaatatgattgggattttgctaagaatatgagccgagggattttagattctattgatgttagttga

SEQ ID NO: 9545 - DNA, 1629 bp, Photorhabdus luminescens
atgatttgccgtgtcaaaaaaattgaataccaacaatcaacaattaaagaagagaaaaaaatgaaagtaaacataatgatatgtgctcttatggcttcctttaatgcctttgcttctcagtgtcaccaaataaaatttcagcaagatcagcaaacaataactgggaattttaattctcagagggaagcgtgtattgagtttaatattctgcctgaacattatgtacgtggattggcattgggtatgcagaaattggtggtacagaagggtaatcaacaacatattcgtacgctatttactgataacccggtggatgctcgtcaatcaattggctttaccgttcctcaggtaggaaaatatcggttggcagccaagggcaaaacaggggaaccgtggcagcttacattgtcatttccatcttatattcccaaggataatgattatcggcagcagccagaaagtttgcgtctgaaacaacttcaaactgaaatcgcacaaggaaaaggcacccatgctttctggcgggaaataacccgcaagggtacgccgttaattgaagattatgatgataaaaataagcgagtcactttcctgtggcgcggcgcaaaagcgaatgtctttattctgggggcaccgagtggtgatcatgatccgatgtcacatttggttggtactgatgtttggtttcgcagctatatcgttccgtcagataccttgatgcaatatagattggcaccggatttaccgcgagtcgaaggcacggctgacgaacagcgtcgatcgattttgattacggcacaggccgatccattgaataaaaaggttgtgccggctgtatcagaggatgtgtttaaccatgattcattgctggcactaaggccaactctatgtgatatcgcacaatttaagcaatcgccttttcagggagcgactaaacttcatcagcttgagagtaagattttgggtaacagtcgagaaattgcgatttatcaaccggttactccgatgaaacagcctgctatgttggtgctgtttgatgggcagatttaccgtaaacagtattatattgatagatttttcgattccctgattgaacagggcaagatcccacctatgtatgtggtgtttattgatagcctggatagtgcacgtcgaggtcaggaattaccacctaatcctaattttgctgaatttatggcgagtgaattaataccgtggctggctgctcagggtattaaagcaccggcagagcgtaccattatttcaggttccagttatggtggattggcgtcttcatgggtggcatttaatcatcctgaattgtttggcaatgttctcagtatgtctggttcatattggtgggctcctcagggagaagcgcctgaatggttgatccgtgagtttgctaaagcagagaaaaaaccactgcgtttctatttacaggcaggattatttgaaaccaatcgcggggaattggaaggtattttatataataatcgccgcatgaaacagacgttattacagaaaggttatctggttgaatccagtgaaatttctagtggtcacaattacatttcgtggtgtgaaactttgtactatggaacacggtcgttagtaacgaaatggtaa

SEQ ID NO: 9546 - DNA, 1443 bp, Photorhabdus luminescens
atgtcaaacaagtataagaaaagtttggttgcagtcatggtctcaaccttaatttcaagtgtcagcttaccggtatcggcggctgatgatcaaaatgcaaatcaaattatggcggaaggtcgggcagtaaaaggtaatattacggaatttggtggtgctcgccgtatgactcaaaatcagactgaggcattaaaagcggcgataaataatcataaagctaaaaatgttattttatttattggtgatggtatgggagattctgagattactattgcccgtaactatgcagaaggtgcgggtggatttttcaaaggaattgatgccttgccatttaccggccaatacactcactattctctggataaaaagagccgtaaacccaactatgcgacggattcagccgcttctgccaccgcttgggcttctggtgtaaaaacctataatggcgcattgggtgttgatgtatttggtaaagatcatcaaactctgcttgagctggcaaaagcgaatggtaaagcaacaggtaacgtaacgacggccagggtgcaggatgccacgccagcagcactgtatgcgcatgtcactgaccgtggctgttatggtccgcaagagacgataaaaaaatgtccaacgaatgcgctagaaaatggcgggcgtggttcgatcaccgagcaattattagtggctcgtgctgatatcacattaggtggaggtgccaagattttcgcccagaaatcggttgttggtactggcaaggataaaacgttggaacagcaggcacaggaacagggttatcagttggtcagggatgctaagtcactggcatccgtgactagagcggatcagaaaacaccgttgttgggcttgttccatgaagacaatatggacattgcttgggaaggacctaaagccgtttatcacggtaatattgataatcccccagtgacttgtaaagtcaactcgaaacggaatcctgatgcgccgacgttggcacagatgacggagaaagccattgatctgttgaaagaaaatcagaaaggtttcttcttacaagtggagagcgcttcgattgataagcaggatcacaaagctaatccttgtgggcagattggtgaaactgtcgcattggatgaggcggtacaagttggtttgaaatatgcgcgtaaacacggtgatacattagttattgtcaccgctgatcatgctcacgccagtcagattattgaagctgatataaaatctccggggctgactcaggcattaatcacgaaagatggttcggtgatggcagttagctacggtacttctgagggtaaggaacaggaacatacgggtactcagctacgagtggccgcttatggccctcaggcagccaatgttgtaggtctgactgaccagacagatctattcttcacgatacgtgatgcgatgaagttaaagtaa

SEQ ID NO: 9547 - DNA, 1221 bp, Photorhabdus luminescens
atgccaccgttaatattaaggttattaccaataatacttatcattggaatggttccatcatttatagaagttgatatcactttgccagcatttccccaaatgctaaattttttttctgcagctgaatcggcagtgcaatttactctaatagtaaatttcttagggttatgtatattcacacctattttcggcccactttcagaatcatatgggcgaagaaaaataattttaatcggcgctactctgttctttattgggagcataggttgttcaaccgtggttgatcttaatcaattgtatttatttagatttatccaaggggcaggatgcagtgctatttggattgtcgggtttataatttgttcggatatttataaagatgaggaatcagtacaggtttttggcattctcaacgcggcaatatcaatggccctcattatagctcccattgcgggttctcttattgttgcacattataattggagatttacctaccacttagtggctttactgagctttctttctcttatggctgtgttcatcgttcctgaaacaaatcgtaatacggtaaagttgagtgtaaataaggtcatcaaaaattattgccaacttatattcaatacgcgtttcttaatatattcttttacacctgggctattagtatctgcatgtattgcatatgtatctgttgttccctttttatatatagataaaatgggaatgagttactacatatttgcagtgcatcaagcgatattaggaatatgtttgtcggtggctggattttattcaggtgctttgaatagaaagattggatcagctaattgtatctatttgagtattataatttgtttgataggttgtggttcattaatgatatttagtcatatttatcccgaatctgcaatactttttacactgtcgatggccgttatctgtataggttctgcttttcaatatagtatggtgttttctcgttctttggcgttgcaccctgaattagttggttcagcatcatccttattaactttttttcgacttattttcttcagtttcagtgtccttatttcaggatgggcatttactggaaaactgtttaattcagcaattgtagtatcatcaataattgctatggggttgttattttcattgtttgtcttaattgatttgcgaaacaatgtagttaataggagaattaatgatgaatcacatgttagctga

SEQ ID NO: 9548 - DNA, 198 bp, Photorhabdus luminescens
atgatggggatggcaaagtacttatccaaagagatgaaggctgtaggaatgccgattcaagtaattgatcctacagcagttgcattgggttatttacagatgatgataagagctggtcttacccacagtcgtttggaatatccaaagttggatttaagagaaagggagattagttgcattaagcggccttcttcttaa

SEQ ID NO: 9549 - DNA, 216 bp, Photorhabdus luminescens
ttgatgatgacgaatagcatgccagccaagctagataaacctattccccacaagctggtgataccctgccagaaaagcgatctctctctgtctttaaccctgatcataacttgcacccagacaaatgataatgattaccaatatcatatacaaaaaagcgtgaagtacaagtcagttgaaatagctaatctggcagatcaaatcaatatcttgtga

SEQ ID NO: 9550 - DNA, 213 bp, Photorhabdus luminescens
ttgtggggaataggtttatctagcttggctggcatgctattcgtcatcatcaatcccggaattgagcagtttaaaattggggtagtattagcgatgttgctgacgctatttatgctgctaaaccagaagtcacgccattttctattaataccatcagggtttgctgtgttatgtgctttattggctggagcatatcgactgggttgtttttga

SEQ ID NO: 9551 - DNA, 126 bp, Photorhabdus luminescens
ttgataatgtctgaatttgcgagggtggcggaattggtagacgcgctagcttcaggtgttagtgtccttactgacgtgggggttcaagtcccccccttcgcaccaaatcagacaaccgctgattga

SEQ ID NO: 9552 - DNA, 1017 bp, Photorhabdus luminescens
atgtctgcgttaacccccgccagtgaagttattttacgtcaccgtgagcaatttagctctcaccacctgctcttcgccggtgatattcaggatacactggcaacccaaattgatgctgccagtgtgcgagtgcacactaaccaatatcatcactggcaatcactgatccgcacgctgggtgagagtgcctggtttggcctggtagccgaaaaagcatttactcaaggttgtgacaccctgatctactactggcctaaaagtaagcaggaagctcgctttcaattacgcagcctgttctctgttttgccaaaaggtatcaatatttttattgtcggtgaaaaccgtagcggagtacgtagtgtagacaaactgatggacggcatggcaacgtttcgaaaaatcgatagtgcccgtcgttgcagcctgttctacggccagttagaacatgaggtgcagttcgaacaggataactggtggaacagttatcaggtggaaaacgtcatagtgaatacgttaccgggtgtatttagccaggatgaattggatgttggtagccgtttattgctttctacctttgacaagcctctctccggcaatttactggatatcgcctgtggtgcgggtgtactggcagcggtattgggtaagaaaaaccctgagttagcactgacgctcagtgatgttaatgcagcagcgattgcctccagtaaagcaaccttaaaagccaataaactggaaggccatgttgttgtcagtaacgtttattccaatatcgaagataaattcgactggattatctctaatcctccttttcatgaaggattaaaaaccagtttactggcaaccgatgatctgatccgccaagctcccaaccacctcaaacccggaggaaaattgcggattgttgccaatgctttcctgccttatcccgacttactggataaaacttttggtactcatgaagtcattgctcagacggggaaattcaaggtttatcaggcaacaaaaaaattctaa

SEQ ID NO: 9553 - DNA, 414 bp, Photorhabdus luminescens
atggtaacccggcgcgacaggttattagctcaattggggattacccaatggaccttacgtaaccctacggttttgcaaggtgaattagctgttcacttacctgacaccactcgtctgctgattattaccaatgaccacattgatttaactaattcattattaatagatattttcaccgctatggggttggataaatcctctgtttactgcattacaacaaataatgttgcgatgttaccggaacaggttaagtgcccatattggttgttaggggtggatattacactatcatggccgggaatttctttgagaagcccggcattaaatgatttatattgtgatggacaggcaaaacgttctctttggcaacagatttctcaacatgaacaacatttctctattaactcccgctga

SEQ ID NO: 9554 - DNA, 447 bp, Photorhabdus luminescens
atgaacaacatttctctattaactcccgctgatctcccgtccgcttttctggttgagaaagccagtcatgcgttcccgtggagtgaaaaaacatttttcggtaatcagggggagcggtatttgaattataaaatagcgattaatgaacaacttattggttttgccataacccaagtgatattagatgaagcaaccctatttaatattgctattgatcctgactaccaaggtaagggttatggtaaagcattattagcgtatttaatgtcaattttaccgggcaaaggggtgaataccttatggcttgaagtcagacaatcgaatcattctgctattagattgtatgaacaagcagggtttaaccaagtctctgttcgtaagcattactatcctactgcgacaggtaaagaagatgccatcatcatggcgttgccgctgtttgcctaa

SEQ ID NO: 9555 - DNA, 1590 bp, Photorhabdus luminescens
atgtcaaattccccttttcagcaggaagtcgctaaacggcgaacttttgctatcatttctcaccctgatgcagggaaaacgacgattactgaaaaagtattgctgtttgggcaggcgattcagaaagccggtacggtgaaaggccgtggttcaaaccagcacgcgaaatctgactggatggaaatggagaaacagcgtggtatttccattaccacttctgtgatgcagtttccttatcaagattgcctggttaacctgttggatacgccggggcatgaagatttctccgaagatacttatcgtacattgacggcggttgactgttgtttgatggtcattgatgccgctaaaggggttgaggagcggacacgtaaattgatggaagtgacccgtctgcgcgataccccgattctaacattcatgaacaagcttgaccgcgatatccgtgatccgatggaactgatggatgaagtggaaaatgagttgaatatcgcttgttgcccgatcacttggccgattgggtgcggtaagtcttttaaaggggtttatcacctctatcttgatgaaacttacctgtatcagaccggaaaggggcacacgattcaggaagtccgcgcaattaaggggctgaataatcctgaactggatgctgcgattggtgaagatctggctgaacaattgcgtcaggagctggaactggtgcagggggcttctcatgagtttgatcatcaggcatttttgcaaggtgaactaacaccggtatttttcggtactgcactgggtaacttcggcgtaaatcacatgttggatggtttggttaaatgggcacctgcgccgatgccgcgtcagacagatgttcgcgaagtctccgctcaggaagataaatttaccgggtttatctttaagattcaggccaatatggatcctaaacaccgtgaccgtgtggctttcttgcgtgtggtgtcaggtcaatatgaaaaaggcatgaagctgcatcaggtaagaattaagaaagatgtggtgattgctgatgcgctgacatttatggcgggtgatcgttctcatgtggatcatgcctatccgggagatattatcggtttgcataaccacgggacaattcagattggtgatacctttactcaaggggaagatctgaaatttaccggcattcctaactttgcgccggaattattccgtcgtattcgcttgcgtgatcctctgaaacagaaacagctgctgaaaggattggttcaattatctgaggaaggtgctgtacaggtatttcgtccactggcaaataacgatttgattgtgggagccgttggtattctccagtttgatgtggttgttgcccgtttaaaaagcgaatacaacgttgaagctttatatgaaccagtaaatgtctcaacagcgcgttgggttgagtgtcatgatgctaagaagctggaagagtttaagcgtaagagtgagcaaaatctggcgctcgatggtggtgataatctgacctatattgccccaacgatggttaacctaaatttgacccgtgaacgttatcctgacatcaatttccgtaaaacacgggaacattaa

SEQ ID NO: 9556 - DNA, 378 bp, Photorhabdus luminescens
atgaagaatgttaaattggcccatttgttggtggctattgccttgggtactgctatcgttagcaatagtgtactggcggaggagtcttttaaaaataaagcgacacaagcactcgacagtgctggtcagaaaatcgatgattcaatgaaaaacatcgatggttatatgggtgatagtgcgaccacagcgaagattaaaagtgagttgttggcagcaaaagggatcaacagtagtgatatctcagtaaaaacagagaggagagttgtctatatttctggttttgtgaaaagcgagaaacaatccagagaaattatagagattatctctaaagtgaaaggggtcaagtcgattcaaaacggtctgaccataaaaaaataa

SEQ ID NO: 9557 - DNA, 1008 bp, Photorhabdus luminescens
gtggggaaacgtataccgataacgttggggaatattgatctattatcctataaatataagtcgtctattaaatctggaaaggttgcactggtttgtgaaggtggagggcaacgcggcatttttactgcgggtgtgctggatgaatttatgcgtgttgaattcaacccatttgatctgctgcttggcacttcggcaggcgctcagaacctttcagcttatatttgtggacagcgtggatatgcccggcgagcgatcagtcgctatacaactaatccagccttctttaaccctttgcgttttgtacgtggtggtcatttagttgatttagattggtttgtgcaggccgcttcacaggaactgccattggatatcccgacagctttacgcaaatttgaggctggatgtgagttttacatgtgcgcatgtcgttcagataattttgaacctacctatttccagcctgatgagaataattggctggaagtgattaaggcatcaagtgccattcctgggttttatcgcaatggtgtgacgatcaatgatgttgtttattatgatggtggcatcagtgatgcgattccagtagaagaggcgtatcggcgtggtgcagataccatcgtggtgatccgtacggtcccttcacagctctattacacgcctgattggatgcaacgaatggaacgttggttgggagatagtggtctgcaaaagatggtacggatgctacaacaacatgcgaaaagctaccaccacacccagaaatttattgaaaatccacctgatgatgtgcagatttttgaaatttatccgcctgcaccattaactgccagtgcattaggcagccgtttgccagcgctgagtcgggattatcaccttgggcgtcgttgtggtcgctatttcttggcgacagtgggtcacttatttgttggtaataagtttaatcttggtgactgctcctcatcctatcgcgagaagcttcccacttcaaaggccgccgctggagtatga

SEQ ID NO: 9558 - DNA, 147 bp, Photorhabdus luminescens
tccgaatttaatccgaagttgcgggcaaagtttccaacgtttaaacgtcaacatggaaaacagtcaaatcatcattgtgttggcgtgaaggtactggataatgcgattaaacaaacgcgactggcagtgtccgatatgccaaattga

SEQ ID NO: 9559 - DNA, 132 bp, Photorhabdus luminescens
atgcgacataagtatctccataattttcgtcaaaaatggaatggtattgatattcagtatgctttcaacttttctatcgccgggctcaatgcccggcggaggaatgaagaatatgattctattgcgctgtaa

SEQ ID NO: 9560 - DNA, 657 bp, Photorhabdus luminescens
ttgaaaggcaataacatattttccgaggaaatgatggatatggataatgtacttaaatatggcgataccgtgacaatattaaacagctacaagaattggagcggggggtatctcagtgtatttggcaacggtaataaacccggaacaaaatatggcgtggtaactgtagacgcttctttagctatttatggcggtgcctggcgaattgagtcagcaacaggaaaatctgtcggcagtgaaataatcaataatgatattattttactgcacaacctgtattactgtgatggcggttatttacgatattatgatgtggtggagcaaaatgaacaattaaccgaaatacatcaagtctacacctcagatatccgcaaaaaagcggcattagaatgggttatttattgtgaaaccacaccaccaaatgcaaacatcagagaaggcgatagtatctccctctataatcgatggggaaataaaggttttcttgatacccataatcatgccggcgatacaggctcgttatatcaagtcttcatgtccaataatgcggcccgtaaaagccacaccggtttgtggaaaatggcaaaggtgaatgatccttgccctccccctgatgtgttgaccaatatcatgccattgtggcgtaagatgcggtaa

SEQ ID NO: 9561 - DNA, 1023 bp, Photorhabdus luminescens
atgaattcaaacacctatttatttcttaactcagaaaacattagatataacgactcagaagataaagcagacacgagttatccccaaactatcagcaatgattggcctagtctccctatcgagtttcaaaaagatattgacgatgtgattaatttaaacggctcattatatttttttaaaggctctcaataccttaaattcgatatagccaaagccttggtgattgatgggccaaaacccattattgagggatggccgggattgaaaggtaccggatttgaaaatggtatcgacgcagccacagaatgggtggatacaaaacaagatgttgtctgtttcttcaaaggcagagattgcatcgattacaccgtcagttcacattcgattaataagaaaaccatttcagaccggtggggcactatcgggaaatatgcaggatttagtgaagacctcaatgccgttattttatggaaaaataccgccggcgctactatttactttttcaaggatagttattacatccaatacaatacaaaatctcatgctatcgatggtgaaccctcctttattcaagcttactggaacggagttactttcaaaaaagttcaagccgccgtatcggttgatattgattcgttaggtagtgagtatagaaactgtggcggaatatgtggcagcacaaataccggtaaacactgtttccagttacctcacaatataaagcttagcctgtcagcctatggtaatactgcccaccagcaaacgataaaagtgtatattgacgatcagttagtcgatacattaatcagccaaggtgccaatagtgtgttgggctttaaaaattactcatcgagtaccggcaaagtctgcattgaaatgataggcgacggcaagccctgcaaactccgttacgcctataacacccttgacgaaaaaccgggaacagccattatcggtgccagcaatggaggcaataataattacaatgacagcatagtcgtgttaatttggtcacagtcctga

SEQ ID NO: 9562 - DNA, 1695 bp, Photorhabdus luminescens
atgaatacatcaagttatctttttcttggctcagaaaatattagacacaatcagaagtcgtatgaatctgatatcggttatccccagcctataaataacgattggcctgatcttcctattgaatttcaaaggcatattgatgatgtgattaatttaaatggttttttgtatttttttaaaggctcacaatatcttaaatttgatatcgcaaaagcaaaagtgattgatggaccaaaacctattatagcaggatggccgggattagccggaacggaatttgaaaacgggatagatgtagccatagaatggccctatgtagcaaaaatgggtatgacagatgtcgtctgtttctttaaaggtagtgattgtattgattatacggtgagttcacatactgttagcaagaaaactatcgcagacagatgggggataacagaacaatactcagaatttagtgaaaatctggatacagctattttatggataaatattggtagcccttttcttttccttttcaaagacaattcgaacatcaggattaatctgaaatcgaataccatcgatggtcaagcacccattggtgctaattggcggggtgtgaccttcaaaagagttcaagctgcggtgccaattgatatggatttattaggcagcgagatgggcaatgacagtaataccaatacctatttcttccttaattcagaaaatattaaatataatgatccattaaataacatcgataccggttatcctcaacctatccgtaataattggcctaatctgcctattgagtttcaaaggcatattgatgatgtgattaatttaaatggttctttgtatttctttaaaggctcgcaatatcttaaatttgatattgcaaaagcacaagtgattgacggaccaaaacccattatagagggatggccgggattagccggaacggaatttgaaaacgggatagacgccgccacagagtggatagatgtaaaagaagatatcgtttgtttctttaaaggcaaggaatgtattaattacactgtgagttcacacaccattgataagaaaaatatcgcagaaagatggagaattaccggagaatacgcaaaatttagtgcaaatttagatgccgctattctatggcggaactccggttattttatttatctttttaaaggtaatgagtatctccgcttacatctcatgttgaatagtatgtatggtgaacccgagcttattcaaactaaatggaaaggcgtcactttcaataaaattcaagcagcagtgtccgttgatcccaatgtattggggagtaatatcaatataaaatgcggtggaacatgtgggattaataataccggtaaacactgctttcaattacctcaaagtattcgatttggcctgactgcctacgtaaatagtgatgttcatcaacaatcaatcaatgtctatatcgatgaccgattggtcgataccttaaccggtaaaggaataagtcacataacagatgttaggacctacacatcaggtaccggcaaagtctgcatcgagatgataggagagggtaaacccggcaaactccgttatgcctataacactctcgaagcaaaacccggcacagccattatcggcgctaacaatggttccaatgacaattatgatgatagtgtggtagtgttgaattggccattatcatga

SEQ ID NO: 9563 - DNA, 882 bp, Photorhabdus luminescens
atgaaattagaacaacatgaacgtcaaatctcaattgaaagttcgtctaattctactgcggttccaataacggtatgggaaccaaatttatatcctgaaggtcgatgggtagatgcgacaacacagagagctggtgtgttgtttaaggactcaggttacgggactagcgcttgggatatcatcagtgttgggggaaggaaagctttcaaggcacaaactttgtctaaatttggtcactgtctcgggattgcaacagacacaccggttgatgccagacattgttattgtgaacttgacctgttttgtaatccatatcctgacatttcagtaagtgtgctatccaagaaaacgagcgcaagcggtacatatcaaaatattggttacggctatatggcgattcatttgactgggggatatcaaggtaagcctcaatggatgccatcaaacatttcgttagggacttcgattgacacggcgacgccttatgtcatggtttggaatcttcaggctaatttgattcagtcagtcaattttgttggtaaacaaacagatggtatttataaagggcaaccgacgctaggcagtgctaattctggtgttgcactgagttatgaatggccaaaaaattcttggtcacgttggcgtattggattgctggcggcaaataacggaacattaattattgagtggtataatagtgtggcagataaatggaaggtagagctttgccaatataatatgaacacgctgatgacgggaaatcttgcggctggtcaaatagggattatttctggtatgtcttctcaggctactacaatagatcaacaaaattctctttaccgaacaccgtttgatcgagcgatattttttcaagatttttaa

SEQ ID NO: 9564 - DNA, 420 bp, Photorhabdus luminescens
atgtcaattgtttttgcatcaatagatccacgtagcaatccgctacaaacatcaagtcaaaattatgttgatatacccggtttgaaacttgatgtttcaaagtattcgaactcaccatgcttaacagcattaatcacgttaaatataccaacgccctatgcttcaggtaacaattttcctggagggaactttgctattgtaactgatcaaggcgaacaattggcttacggtggatttacttacagcagtaagatcccagaaaattctggacgtatgccattcacactggttgcccgttattctcttgcatctaatgtttctactataaaagctcaatggagtaatatacgtggtagtacggtacatatcgattcatatgcatctatctctgcggttattcagtgcaatcagttagtttag

SEQ ID NO: 9565 - DNA, 789 bp, Photorhabdus luminescens
atgtgggtagatgcgacaacacagagagctggtgtgttgtttaaggactcaggttacgggactagcgcttgggatatcatcagtgttgggggaaggaaagctttcaaggcacaaactttgtctaaatttggcaatattggcagtcactgtctcgggattgcaacagacacaccggttgatgccagacattgttattgtgaacttgacctgttttgtaatccatatcctgacatttcagtaagtgtgctatccaagaaaacgagcgcaagcggtacatatcaaaatattggttacggctatatggcgattcatttgactgggggatatcaaggtaagcctcaatggatgccatcaaatatttcgttagggacttcgattgacacggcgacgccttatatcatggtttggaatcttcaggctaatttgattcaggcagtcaattttgttggtaaacaaacggatggtatttataaaggacaaccgacgctaggtgatgctcatggtgttccactgagttatgaatggccaaaaaatacttggtcccgctggcgaattggattgcttgcggcaaataatggtacattaatcgtcgagtggtataatgttgtggcagataaatggaaggtagagctttgccaatataatatgaacacgctgatgacgggaaatcttgcggctggtcaaatagggattatttctggtatgtcttctcaggctactacaatagatcaacaaaattctctttaccgaacaccgtttgatcgagcgatattttttcaagatttttaa

SEQ ID NO: 9566 - DNA, 963 bp, Photorhabdus luminescens
atggcagatatacttaaatatggcgatacagtaagaatattaaatggttacaataactggcaaggaggatatctcagtacacatggaagtaacgacatcccaggagcaaaacataacgtattaactgtagctccttccttttctgatctaggggtaatatggcgaatacaatcaggaacgggaaaagctatcggcagcgaaataattaatgatgatattattttgcttcataatctggctttctgcgatggtggttatttgggatattatgatggcccaaatcaaccggtaccaagtggagaaatacatccgatagtcacatctgatataaatacatattctccaaaaacattagagtggattatttattgcgagacaccttattctataaagggaaatatcatagaaggagcaattatcagcctacataatcgatggggaaataaaggtttccttaatagttatggtaatgccaacaaaccaaacacgttatatggtgtatctctttctggtaatagcgctcgtaaagtacataaggtagaccagtggaagatggaaaaaatcaatgacccttgtccgcctaccaaaccctcaaattgtggtggagaatgtggtactagcgacactggtaaacactgtttccaattgcctcaaagtattcgatttggcctgacagcttacaataatacgaacattcagcaaacggtaaaagtctatattgacgaccttctggtagacacattaaccggcaaaggaacaaataatccgatggcgaccaaaacctacacatcaggtacaggaaaagtttgtattgaaattgaaggagatggcaaacctagcaaactgcgttatttcgataacaccctcgatggaaaaccgggaacagccattatcggcgctgaaaatggcaccaataataattacaatgattgcgtagtaatattaaattggccgctggtgtga

SEQ ID NO: 9567 - DNA, 1011 bp, Photorhabdus luminescens
gtggcaaagaaagaaaaacggcctcaccatgacggattattcaaatattttttaacgcagcctgaaacggccagagagtttctatccctttatctgcccgaagaaatccagtcgttgtgtgacttagccacattgaaactggaacccggcagttttgtggactggcatttacgtcaactgcacagtgatgtgctgtactcggttgaaacggctcggggacaaggctatatctattgtctgattgagcatcagtccactcctgacccgttgatggcctggcggctgatgcattatgccatgttagccatggaggctcacctgaaaaaaggccatactgaactcccgttggtggcacctctgctgttttatcatggtgagattcggccgtatccttactcaaaccggtggctggattgtttcacgctccccgaacaggcggctcgcttataccgtcaggcgtttccgttggtggacgtcagtgtgctcagcgatgaagagatcctgacacataaaggggtagccctgatggaactggtgcaaaaacatattcgctgccgggatatgcaggaatggctcctccaattggtggaactcttgaatgcagggtataatacaaccgagcagctcaatgtggtgttacgctatattttactgaatggacatacgctggatctctcacactttgtccatcaactgattgaacaatctccggagcatgaaacgatgctgatgactattgcagaacagcttgaacaaaaagggcttgagcgaggtatcaagcaaggtattgagctaggtcgagaagaaggccgagaagaaggtcgagaagaaggtcgagaagaaggtcgagaagaaggtcgagaggaaggtcgagaggaaggtcgagaggaaggtcgagaggaaggtaaactggaaacggctcgtgccttattacggcatggcgtgagtttggacattattgtcaccagtaccggactgagccgggataaaattgaaatgttaaagcattaa

SEQ ID NO: 9568 - DNA, 225 bp, Photorhabdus luminescens
caatctccggagcatgaaacgatgctgatgactattgcagaacagcttgaacaaaaagggcttgagcgaggtatcaagcaaggtattgagctaggtcgagaagaaggccgagaggaaggtaaactggaaacggctcgtgccttattacggcatggcgtgagtttggacattattgtcaccagtaccggactgagccgggataaaattgaaatgttaaagcattaa

SEQ ID NO: 9569 - DNA, 225 bp, Photorhabdus luminescens
caatctccggagcatgaaacgatgctgatgactattgcagaacagcttgaacaaaaagggcttgagcgaggtatcaagcaaggtattgagctaggtcgagaagaaggccgagaggaaggtaaactggaaacggctcgtgccttattacggcatggcgtgagtttggacattattgtcaccagtaccggactgagtcgggataaaattgaaatgttaaagcattaa

SEQ ID NO: 9570 - DNA, 237 bp, Photorhabdus luminescens
ttttggataattactgtatccataaaagccgataggtcagtgaggttggcccgtcatcctaaatttaacctattgtttttacctgtttattctccccggctgaataaaattgagcgtctgtggcaatccttgcatgaaacggtgacacgaaatcatggctgtcagtatatgtggcagttgcttgagaaagtgaaaacgtttttaaattcatccccctacatgaatagcagagaataa

SEQ ID NO: 9571 - DNA, 561 bp, Photorhabdus luminescens
gtgaaaacagggctaaaacaacgctttcatatgctaataggattagcagcaatactgatcataatccaattatttgatactttaaccggtggcgcactaagtcatttcggcatcattccccgatacgctcaagggttaattggtattccattatctccattcttacatggtagctgggggcatttgttcagcaatctccccgcgttattagtattgagtgcgttattgatggcccactccattcgttattatgtgatagccagcttgtttattatctttgtgggcggaacattagtttggttatttggacgttcggctattcatattggtgccagcggatggatttttggtttatggggattgctgctggctaacgcttttttcctgagaagagtaaaagatttcttctttgcgattctcgtgtttgtatattatggtgggattgtgtttggcttgttaccgtggcaaacgaatatttcaacggaaggccatatttttggcgcgatatctgggctggttttttcttggttatcgaagagatgggtaataacgagccattag

SEQ ID NO: 9572 - DNA, 1449 bp, Photorhabdus luminescens
gtgaataaccattatgatgttttgattattggcgcgggtattgcaggcattggtacagcatgtcatttaacaaggaaatgtcctgataagaagtttattatcttagaacgtcgccaaacgataggtggtacttgggatttatttcgctatcccggcattcgctcagattcagatatgatgagctatggctatacattccgcccctggacagacaccagtgtttttgcagatgggccttcaattcaaagttatatccatgcaacggcaaaagagtatgacattgataagaaaatagagtttgggctaaaaattactcatactgactggtcaaatgcgactcgccagtggaccgttaccgcgattgacgaaataagtggggaaacccggcaatttacttgttgttttctcatcgctgcaacaggttattataactatgatgaacctcatttacctaaattccccggcattgaagatttcaaaggcccggtaattcaccctcaactctggcctgaagggttggattacaaaggaaagcaagttgttgtcattggtagtggtgcaacagcagtgactttattgcctgcaatggcaaatgatactaaacatatcacgatgttacagcgctcccccagttatatcttttcaatgcctgaaagggataagatagcagagttttgcaaaggcattattccacagcgctggatttacacattgagcagaaagcgcaatctttttctgtttcgcttaatttataaaataagtcgacatttacctacattattgaaatcgtttttactggcattggctcgcaggcgtgtcggcccagattttgacatgaagcacttgacgccaaaatatatgccgtgggatgaacggctctgtcttattcccagcaataacctattcaaggtactaaaagaaggtaaagcctctatcgttactgaccatattgaacgtataactgaaaacaatattttattaaaatccggcaaagaattacccgcagatattattattaccgccactgggctgaaattacattttattggtggaattgaactctctattgatggacaaaagcaacaaagtcatgatcgcatgctttataagggaacgttgatacagaatatccctaattttgcctgtctgtttggttatatcaataacgcctggacgttgaaagttgatctatctgcggattatatctgccgtttgttgaatgaaatggaacgtcgcgatgctaccgttgtaacaccacatgctcagccgggtgagatgcaggaggacgaacatatttttggcgctttgcgatctggttatgtgaaacgtgcacaggacttgcttcctcgtcagggatatagtccaaattggcagattccacatgattacaaaaaagataaacaagttttgggacagcctgtagatgatgccgcgttgaaatggacataa

SEQ ID NO: 9573 - DNA, 1002 bp, Photorhabdus luminescens
atgaactcacatgtttatttatttcttaacgcagataacgctagatataatgaaatatcaaaaaaatcagatattgcctatcctcaacctatcagtaacgattggcctgatctccctatcgagtttcaaaggcatattgatgatgtgattaatttaaatggttatttatatttttttaaaggttcgcaatacgttaaattcgatatcgcaaaagctaaggtgattgatggaccgaaatttattgcagatggatggcccggactgaaaggaaccgaatttgaaaatggaatagatgcagccacagaatttacaacaaatattgtttgtttcttcaaaggtagtgattgtatcgattatgccgtaaactcacacacaattaagcgaaaatctatctccgacagatgggaaataacaaagaaacacacagaatttagtaaaaacctagatgctgttacatggagaataaactctgcgattgctctcttcaaagacaatcattatatcgcatttaatcctcaatcgaatactattgtaattggacctgcacctgttactaattataccaatggggccttcaaaacagctcaagcagcagtattgattgacaccgatttattaggcagtgaccgaggaaataacggaggctgtagcggaacatgtggcaccaatgacacgggtaaacactgttttcaattacctcaaagtattcgatttggcctgatagcttatactaatacaactacccataaacaaacagtaaacgtctatattgacgatcttctggtagatacattcaccggcaaaggaaccgatactaaagcttatacatcaggggcaggcaacgtctgtatcgagattataggagatggcaaaccttgtaaactccgttactcctataatacccttgacggaaaaccgggaacagtgactattggtgccgaaaatgatgctaacaataattacaacgacagtgtggtggtattaaactggcccctaacatga

SEQ ID NO: 9574 - DNA, 939 bp, Photorhabdus luminescens
atggcgaatatacttaaatatggcgataccgtaaaaatattaaatagtttcagaaactgggatggtgggtatcttagtgtatatggaacgagtggtatttcagatggcaaacatacggtgataaccaccactgaggcaggaacattctggcgaattgaatcaggaacaggtaaacctatcggcagtgaagttattaacaacgataccattttactccacaatctttatcaatgtgatggcggctatttagcacattatgcattatcaagtcaacaggttccagaaggcgaaatatacccgatacacacatcagataaaaatatccgtccagaaacattagagtggattatttattctgacatgccatcgattgatggaaaaatcaaagaagatgaaagtattacgctatataaccgatggggaacccgaggctttcttgatactaatggttgggttggagtccctaacacagtatgccatgtatacactgctgctaataaccttcgtaaaccctataccggcctgtggaaaatgacacaagttaaagatccttgtctcccggttaccaaaccctccaattgcgctggagaatgcggcactagtgatggcggtaaatattgtttccaattacctcaaagtattcgatttggcctgatagcttatactaatacagctatccatcaacaaacagtaaaagtctatattgatgatcttctggtagatacattcactggcaaaggaatcgatactaaagcttatacatccggtacaggcaaagtctgtattgagattatcggggatggcaaaccttgtaaactccgttactcctataatacccttgacggaaaaccgggaacagtcactattggtgccgaaaatgacgccaacaataattacaatgacagcgttgtggtattgaattggccactggtgaattag

SEQ ID NO: 9575 - DNA, 1212 bp, Photorhabdus luminescens
atgtcgaagttaattggaaataatcaggtagttggaactaataatatagttgttattgcgatggttgtcgcattagttcaatttattaatgcgttagagtacatgatggtaactccgctttttgtttatatgtcgaaagattttcacatgccggttacgatggcgggggttattgcgggtgcttatgttttctcctcggtattttctggcctgacatcctttttctttattgatcgttttaataaaagaaaggttctcattttaaacaccctgtttctcggcctgattacgttcttaacgattttcgcctcagaaccataccaacttattctgctacgtatcattgccggtctgtttggtggtgtgacgttgggggtaggtattgggatcttactgaataactccccggaaagtatgcgaggaagggtattgggaattgcgttttcatctttttcatttgtaagtattttaggtataccgttatgtttatatttggcagagagttttaactggcaagtctcttttctatttatcgttattttatgcatagtaagtttgcctctgatcctcttctttatcccaggaacagagaaagtaaaaaatagccagaaaaaaattgtgctaaccaaaaaaatagcattagctggaatggcaagtggcgtcagtaactttagccccttcatgcttattccgatacttgctccgctattaatgaatgtattttatatcccggaaaatcaggtttcactggtattcttttacggtggtatcgcgtcttggttgggaacttatttaaccgggaaactttgcgatagatacccgcctcagagaattaccatcgccgcggcgacgttatttattgttaatatttttctgggattaacgggaaaaataaatggatacgttttcttctcactttttatgttcgcgacttatgtacaggtgatggcggcaaacgtgctcgcttcctatgcctcgacgcctgaaaatcgggcaggttttggtgccctccagatggcattttccaatttgggtgctggcgtggtgttcttcttctcgtccattttcttagacggtaaggagattattgctgagaacgtgcggcctattttcatactgactatggttagcgccctgatattacctatatatgtaatgaaattagctcaggtgatgaaaagagggacgaaaaatttaatgagtaatgtttag

SEQ ID NO: 9576 - DNA, 441 bp, Photorhabdus luminescens
atggaaagaaaattaagtaacactcggaataaaccagctattaatattatcgcgggagtaacaaatattaaatctatttataataaagtgccgtgtaaagttgtcgttgaacatggatatgttgccagaaaaagattctctgtggataaaatgtctgaatggcatggcgatttatgggctccctggataggtgataaatatgaacctaataaagccattcatatctataccgaaaggggatttaaatctgaatttgaatttaatatttggatatttcaggattattggaatccaccgaatgaaaatgcggttaagtattctataaatagggaattcacttacgataatgcattagagatccctggtaataatcgaggtggaggaaataagatactgacgttgaattttaatgataataatattgatctggaaatgatatag

SEQ ID NO: 9577 - DNA, 1533 bp, Photorhabdus luminescens
atgactatacaagagcaggctacatcttctgtggcgacggctaaccatcataccggtggggtttactcgtctttgtttgagaaaattaatttacgtccggtagaacgattaagtgatattgcatgttttcatgacagtgatggattggctggggtgacggaagatgaacgggtgaccgcggcggttagcgttcttctcgatctgctgaaagcctccgcgcaaaaagtggaacagttggataaagcattgctggattttgagatcggcaaattggatcgcaaaatcggccgccaactggatgtggtgatacatcagccgggatttcagcaaatagaatctgcctggcgaggtttaaaatttttggttgatcggacagatctcggtcagaacgtcaaaattgaagtgttggatgtggccaaggatgatttgcggcaagattttgacgatgcaccggaaattgttcagagcggtttctatcgtcacgcttacattcaggaatatgacataccgggtagcgaaccgattggcgcagtgattgccgactatgaatttagtgccggatcgcaggatattgccttattgcgcaacgtagccaaagttgcggcagcggcgcacatgccatttattactgctgtcgctccaactttttttggcaaaaagagcatggatgaagtggtggtgatgaaagatatgggtcactattttgaacgcgccgaatacacccagtggagatctttccgcgacagtgaagatgcccgttatattggcctcaccttgccaagagtgttgggacgtctgccatatggcccgaagagtgtgccggtgcgaacgtttaattatgtcgaagaagcaagagggccggatagcagtaaatatttgtggaccaatgccgcttttgcttttgccgccaatatggtcaggagttttgtcaaaaatggctggtgtgtgcagatccgtggtccgcaagccggtggtgctatcactgatttgccgatccacctctacgatctgagtaccggttatcgggctaagatcccatcagaagtgctgatcccggaaacccgtgaatttgaatttgccaatttgggttttattccgctctcttactataaaaatcgcgattatgcctgcttcttttcggctcactccacgcagaagcccgcagtgtatgacaccggtgaagccacggccaacagtcgcatcaatgcgcgtctgccctacatcttcctgttatcgcgcattgctcattacttaaagctgatccagcgggagaacattggcaccactaaagatcggcgtctgcttgaaattgaactgaataactggctcaacacactggtaacggagatgaatgatccgactgacgacatgcaggcatctcatccgctgcgtgaagcatatgtggtagttgaggatattgatgacaatccgggattcttccgaatcaaactgtatgcggtgccgcattttcaggtggaagggattgacgtcaatttatctctggtttctcagatgccgaaagcgaaatcgtaa

SEQ ID NO: 9578 - DNA, 1362 bp, Photorhabdus luminescens
atgatgaaaattctacgtcctctctggattgaagacgcctttttagcccctcaacaatttcagcaacaagcgcgttgggaggcattgaccaacaactgtattgcgcatctggggctgattcacccctggggagtgcttgatattcggtttgatcaggaggcactgcgcttaaaccgcctgaaagttcagcacctcaaagcccgtttaccggatgggacgctgattgatactgatcatgctgacaatctgcctgcggtctgcgatttacagcaggtggcgtcggcggatatgcgtgctgttgaggtattactggcgctaccgctggagcacgccaatggtggcaattgccgtcagagtagtgaaagtgtggggccgggacaaccgccgctacgttatcagcaggaatgggtcgaaattcaggatagatatggcaatggacgtgaatccattgcggttgaacgccatgccatttccctacgctttcaacatgatcagaatgaggcttatctgacatgtccattggcgcgtctggtgcgtgacggacaaagcggttggatgctggatgaccgttttgttccgccattgctctcttttgctgcccatccgccactgctagagcagcttgatctgttgctgactcagctacgtgctaagcgtacccgcctgatgggaatgcgccgtgaaagtcatcaacgcatggcagactttgctgttgcggatgtatcgctgttctggttgttgaatgcgcttaacagttatgaaccggtgttgaataattttaacgctgcccctgcactgcacccggaaattatctaccgtgaactggtgaagttagcgggggcgttactaacgttctctctggagagcgatctcgatgcgatccctgattatcaacacgaccagttaagtgacgttttcccgccactgatccggcttattagtacattacttgaggcgagtctgccatcaagagtcatttcgattgaactggaagtggtgcgtgaaaatcagtggagagcatcacttcatgatagacgattgtgcgaagaggccgatttctatctctcagtgcgatcgtcgatgccagcgcacctgctacaaacccagtttccgcaactgtgcaaagtcggggcacctgatgatgttgagcggctgattaacttgtcactgagcggcattcctttacatccgcttagccatgtaccggcggcgatcccgttgcggttggaaaaccaatattttgcttttgatctaaataatccagtcgctaaagccatgttggaggcgggaagttgcgccttctatgtgcccggtaccttgtcgggcgttcagttagaactgtttgcggtgttacgttcgtaa

SEQ ID NO: 9579 - DNA, 645 bp, Photorhabdus luminescens
atgaacaaagagatttcaattgatgacctgatgctcgacattgggatgctagtgattgcgctaaaaagcggtgataaatcgatgtacggtgaggcgttatatcaaaaaggggttgaattgatagatgcggcacggcagcaattaagtgcaagtggcatcagcgaagagaacatggctcacatcatctatgccttgtgtgcattgctggatgaaaccgtactcagacgccctgagcgggatcatggctatgaaacttggtcgaaaacgccgttgcagacacgattttgcaatagcaaccatgcaggagaacggctgtttgaacgtatacgtcacgtgctggatcaaccacaaccctctctgctggtattagcgggtttccagcgcgtattggcattgggctttcagggcggtgacttggaaaagatttctcaggaacgccagtcattactggatgtcctgactgatcgtgccggggtaatggcggtgcagccccatcagatgatacgcgtcaatgcagaccgtcatcagggccaatattggcgtgcacgctctccgtggttttggggatgcttggcggtagccggaataactttggtgtggtgcggtctgcgtctctaccttcagcaatatttgtctgttaggtaa

SEQ ID NO: 9580 - DNA, 1677 bp, Photorhabdus luminescens
ttgagttgcgtattaaaacgagcgttgtggcttttagcgggtgttctggcggcgctgttgtgtctgtttttcttcccgttagggaatgtgtcagttgcattgtggttggctgtgatctcgatggtagcggtgatggcttggtggtgggtgaggcgtaccacacttgaaatatcccatcaggccagtgtttaccgtttgctggcggcattgcccgctgcttcgtggcaccagcctgtggtgctaacctgcggagatagcgtggcaaccctgtttgcgggagaacttgtacgcttcacgccacagggctgttttatctgtgtgccgaaacaaagtgagatgagtacgctggtagaagcgattattgccgccagacctgattggtgtaggcagatcagcgtgttattaacactctttcctgaacagcaatgggatcacgcggtgatggcggcaaagatcagggaatttcgctatcaggttgatcgtgttgctcaactgaccgcttgtcatacaccggtattgatcgccagctatcttgatggcgatatcagcccgtggttcgagctacaggcagatagcgcgacaatgacggtatggggagaaaaacacgccgctgttgggatgaatatctggttgaccgaaggagatgcacagcaacgcgtcgcacgtttacaacaaacgattgtggcggcggcatggcaacgctggatggtagaaaatatcttgaacgaatgccgatcccaggagctggtcagtcggccttgttacccgatagcaatggcactgacgtttttgccacaaacgccacaggcagacagcttatggacaaaatggctggtcgatcgtaccactttaccccgcattagccacagcattgctgaggcggtgaacgtatcgccatttcccgatgccatgttacgcctgttgccacatcatgttggtcatacaccgcaccgacgagcggtcatctggggcatcggcctactgagcggatttacctgtctggcgttggcctcctgtgcctggaacaacttgcgtctgttccgccagatacgcagtgatttacagcattatcaggtcgttggcgtgaaagatagtggtgcaaaagttcaggcttaccatcaacttaagcgtgatgcgacgttgctggaaaaatatcaacgtgatggcgaaccggtgcgtttagggttagggctctatttaggtgatcgcctttatacgccactgatgactgtgatcaaccatgcggtgttaccggtatcttcgcctcctgtactgaagagtggcaagccgttgccacagacattgaacctgagcagcatgtcactgtttgacgttggacagtcacgtcttaagccagaagcagccaaagtgttggtgaacgcattgatcgagattaaagctaaaccggagtggatggtggtgataacgggtcatactgattcaaccggtgatgccgtaaaaaaccgcgagctatcactagcgcgggcaaaagcagtacgagattggatattacaaaccagtgatgtatcgccgacttgctttgtcgtaaaaggtgaaggagcaacgcagccgattgccaccaatacaaccgcagtggggcgtgctgttaatcgtagggttgaaatcagtctgatgccgccgagcgtgatcgcctgccaacgaccagaaaatcactag

SEQ ID NO: 9581 - DNA, 2682 bp, Photorhabdus luminescens
atggataccgtatgtaccgcactattgtgccgcttaaattcttattgcgcacgggcattggaagctgctgctgcattttgccagacacgggcacatgctgaaatcacggtggaacactggttgctcaagctgcttgagggtggtgaaggcgatattacggtgattgctcgacgttatgcgtgggatatggatgcgttatggcagtcgttgctgactacaattaaccgtttaccacatagcatcaaccaacgcccgcggttatcaagcgatctgtgtagtttgttacaggttgcttggtgtattgcttctctggaagagggtaacgaatctatccgttcggtgcatcttttgcaggtgttgcgcggccaaccggcttggttgcgtattcatcatagctggccgttactcaacttgagtgtgacgcaactacaatgtttgcgcccgttgctggatcaacaatcggatgagcgcccggagatacagatagcggcgtgtctgacggcggatggatcaatcgctgaaattgcgggtagcgacccagataaatatgcgcttaatccccaaccattatcatcggctttgcagaacgtattggacaaattcacgctggatatcacagccagagccgctgagggtggcattgatccggtatttggtcgtgaccgcgaaatccgccagatgatcgacatcctatcgcgtcggcgtaaaaacaacccaattctggtgggggaaccgggggtagggaaaaccgcgctggtggaaggattggcactgcgtattattgagggcaatgttcctgacagcctaaaaaccgtcagcgtgcggatgctggatctcggcttgttgcaggcaggcgcgggggtaaaaggcgaatttgagcagcgattgaaaaacgtcattgaagcggtgcaacagtcacctgcccccattctgctatttattgatgaagcgcacacactgattggcaccggtaatcaggcagggggcgctgatgcggctaacttgctaaaacctgcgctggcacggggagaattacgcacgattgccgctactacttggtcggaatacaaacagtattttgagcgggatgcggcactggagcgacgcttccagacgatcaaagtcgatgaaccggatgatgagacagcttgcctgatgctgcgtggactgaaagcgcgttacgcccgttatcacggtgtacatattcaggaagatgcggtgaaagccgctgtcactttatctcgtcgttacctgactggccgacagcttccagataaagcggtagacctgttggataccgccagtgcgcgagtcaggatgagcctggatacggtaccggaggcgttgacgcaactccagtcccaattgaccgcacttgagatagagcaacaggcgatactggaagatattgcactggggcaatgccatcactcagaccgtttgacacaaattgaaatgcaacgtcatgaactgtatcggcaacaacaacagcgggataaacagtatcaacaggaaaaacagctcacgcaacagttgctcgatgcccggcaggatatcagtcggcagggtgatatagcccggttgcaacagcaactggcgacacgacagcaagggcagccgttactctcgtcggatgttgatgtgcgttctgtagcaacggtgattgctgattggaccggtgttccactgagtagcttgttgaaagacgaacagaccggtttgctgcatttagaacagcatttaggggaacgggttgttggtcaggaggcggcgctacgggaaatcgcccaacgtttacgtgctgctaaaacaggattgacgccggaacaggggccattgggcgtattcctgttggttgggccgagtggcgtagggaaaaccgaaaccgcgctggcattggcggataacctgtttggtggagcgcgttcgctgatcactatcaacctatcggaatatcaggaaccgcatacggtatctcagcttaaaggttcaccgcccggttatgtcggatatggtcagggggggatcttaacggaagcggtacgtaaacgcccgtatagtgtggtgctgttggatgaagtggaaaaagcccatcgtgacgtcattaacctgttctatcaggtatttgatcgcggctttatgcgcgacggcgaagggcgcgagatcgattttcgtcataccgtaatcttaatgacctctaatctgggcagtgatcaactgatggcgttattggcacaacaacctgatgccccgaacgccgtattgcatgagctgttacatccgatgcttcgtgatcacttccagccagctctgttggctcgctttcagaccgtgatttaccgcccgttacaggctggtgcactcagacgcattgttgaaatcaaactggaacaagtgactcggcgtcttcatagccattatggcctgacttgcacggtggaaagcagcctgtgcgacatcttagtgaatgcttgtctgttgccggacagtggagcacgcaatatcgacagcctgcttaaccagcaaattttaccggtgttatcacaggcactgctggaacgtctggcccatcacaataaacctgctggcgtgacgttgggcttcgacgaagaagagggtatcacccttgcttttaccgatgctgaaccggtcgcttcattggatagcgaggaaaacccatga

SEQ ID NO: 9582 - DNA, 2379 bp, Photorhabdus luminescens
atgatggatagaaaaatgctgcgcgcccgtcagcttaaggcgagtcaagctgtgctgccgggccatgcccgctaccggcttgaagtccggcgctgccatgctgaactggacgtattcagcttcaccggcgaagagcgcctgtgcgccccttattgctataccattgatttcaccagcccgacccgggatatcgacccggcggtgatgttgaacaaatccgccacatttatcttgcaggcaccggaaaacccggagcaggtgcgtaaagtacacggcgtcatcacccgttttaaccggcttaccacctcggcggatgaaacgcgctatcaggtctgtctggagccctatctggcgttactgcgccacacccggcgctgtgggatttaccagcaccagtcagtgccggagattgtggaaaagatcctgcgtgaacgacacgaatttcgcgggcaggattttctgttcacgctggtgcgggattacccgaagcgggaactggtggtgcagtggcaggagagcgatctggactttatccagcgcattctggcggccgtggggatctggtattgcttcgagatggacagtcgtctggggattgaagtggtgcggttcggggataaccagcgcaactatcagtacgacgtgcgtttaccgttacgtgacccggcgggcatgaatcacaacgatcgtgattcggtgtgggatttgcacgtggaacatcaggtagtgacgcaaggtgtgaaggtgcgggactacaactaccgggaagcaggcaatgacctgcaatatcaggtggcacgagatcgggatagcaccgtggtcggtgaagtataccgctatggtgataactttcttgaaaagggagaacagatccaaccggtaccggaaaccgcaggattttatgcccgtttacatcacgagcgcaacctgtaccagcagcaccggatcagcggcaaaagttcctccccgatgctggtccccggcttagtgctggagctcgacggagagcgaccggcaggggtaggaaaagcgggggtgttgattgtcgccatgcacagcagcgcccggcgtgacagcaactatctggtcagttttagcggtgttccgtacagcgaagtgttgagttaccgaccggcgctgcgggaacggccggtgattgccggcacagttccggcgcgggtgaccagcaactggtcgaacggcacctacagccatatcgacaccacgggtcgttaccgcgtcaaatttgattttgacctggatgaatggccgttggggggagaaagcctgtgggtacgtttagcccgcccgtatgccggtaaaactcacggttttcactggccgctgattcagggaaccgaagtggcgatcgcgtttgagcagggggatccggatcggccctacatcgcctatgcgttgcatgattcccggcatgaagatcatgtgactctctacaactacaaacgcaacgtgctgcgcacaccggccaacaacaaactgcgcatggatgacgagcgcggcaaagagcacatcaaactgagcaccgaatatggcgggaaaagccagctcaatctcggccatctggtggatggacagcggccccatcccaataagcgcggcgaagggtttgagttacgtaccgacgactgggggacgatccgggccgggaaagggctgtttatcagcgccgatcagcagattaaagcctcgggcgagcaattagatatgcagcgggcgctggctgaactggatgcggcgtttcagaccgcagcggggttgcgtcatgccgctgaggcggcgaaagcggaactggctgatattgaaacgcaggccgcttttatgaatgaaacccttaaagcgttgcaacagcgagcactcttactttctgcgccctcaggtattgctcaggtgaccccgggcaatttgcagttctccgccggggagaacctgataaccaccgtcggttgtgatgcggatatgagcatcatgaagaaattccggctggcggtggggaatggcctgagtttgttcacccgaactttgggcctaaagctgctggcggcttccggcaaggtagagattcaggcacagactgacgcgatagaggtgctggctcaacaggcgctgacactggcaagtcagcaggatcgcgtgaccgtctcggcgaaaacggaactgcgtctggagtgtggcggggcttatatctcgctgaaagacgggcatatttcctttgccggccctaaaaatgcccgcttccagtgtgacattttgcagaaaaacggcccggtgagtcagagttcagacctgacgttacctgagcgttgtgcgtcaacggcagagcggatgatgggtaatcaagatggtgtaacgaaaaaatga

SEQ ID NO: 9583 - DNA, 1041 bp, Photorhabdus luminescens
atgatagaaacaactattccactgacagtagattacgatttttctcccgaggctgaaaccagacggcaaaccggtttgttggctgacttgcgtatggcattgactcagcatgacggccacggttttttactggttgacccggcggtttttctcaaaaaccgacaggaagagcgattaccggcggcaatcctgaatcatcagccggcggccataccgacgcagataaagcatcatcatttcgaatcccgctattcgccctggctggtgccattggatatcaatcgttctgaggatgctgaactgctggcgctgagcgtcacgcaggcgttgcaggaagctgatccggcggagttgatagccgggcgtgggcgaatggtgtgtggctggctgttcagtgccagcccggtctccacgattgcacaccatatcgggatgatggcggtgcagtccgtctcatttcaaccgcaggtcatgctgcgcttttatgatccggcggtcaataatgccttttggccggtactggatagctggcaacgctcgcgtttgttggggccattgacagactggtatctgattgacggcgacggtcagttactgcaccgggacaatgccgagtctgctcaggaactgtacatcttttcactgtcattgacagcggaacaggtagaagaaatggcctggtcagggccgatgaatcgggcactgcgccgatatcgtcaggcacatcgcgagcagttacgtcgaacagaacgggaatccctgcatattatgctggccttgctgcgtcgggtgacagcacgctacgcctttgatatggcacaagatctggaatcctgtgcattgcatggtctgctttaccacccggagatagatctacacccccgaatacagtcgttgttatccaatgaaggcggtgatagcgatgaaggttatgccgagcgcaccgtcagactgacagtagaagcatggtcagcattggctcgtgactgctgttatgccaatcctgccattattccctcaaagaaccaggagatattgtga

SEQ ID NO: 9584 - DNA, 2601 bp, Photorhabdus luminescens
atgaatgaatcattatgttggacatgtgagtccatcgggccggcactgctgccagtgcgctataccgtggtgcctgataatgtttcggaaaccttgccgacgtgggcagaaacgctagaatcggcggctccgggctatcattatgcgctgcgtgccttacggcaggggtttttgtatgtctattatactaatgccggattagatgagccggagagttgggatgcctggagcgttagcgaagatggtgcgctgtggcaacagtttagtgcgccttttggtgtctctcctcagaaaacctcagattgccgtgcgccgaatcatttgaatgccaatatggaatttattgcgctaagggatattgccttgcgccaggagacctggctggcttttacaccttcggcgtggagctgggagaccatcgagtattatcacaacaaccgcgcagcgcgggaaaagcggatgcagtgcgtgaaaccgtggcaatggcgcggggtaccggaaggggtggggattgctcaggcgacggtagaaaacctgaataccgtcatcgattacggtctgggtgacaatgattccggcaaatatgttctgccttgtaaccggaaagtgtcgcgtatcagccggacattagaagaagcgccctactacgaagtttatcacggtgcgttgagaccgaagagcaccttatatccgtggagtagcaagcgagcgggatgtgcggacattacggtcagagcgatgcaaaagcgggggctggcaaaagatggcacgccggtatcgccggtgttaatcgcgttgcatgatccgataggaatagcgcatgaattagcgggctggggtgatgatatcgccggggcgcataaaacctttttggatgaattgtcgattgagtttatgaccgacagttcactgaatggggcggagaatcagttgcgtcaaatgcacaccacacatttcaaaaagccggataaagaaaaggatgccattttggcggcctctacgggtttgtcaattcaggagtgggaaaaacgcagagaggattcaattcgtcacgccatcgaatcggataagaaaacctttgcccacgattggaaaaaatataccgcagagctgaatctggctaaacgacaggcatttaatcaatgttatgccgatctttgcaccgacgtggcgaaggaactggagcaactggcccagttgagggtgagttggctgaaacagagtgggtttatcacctgttgtcaggattttcataccacccgactggaggacaatctcaattatcgtgaggccgtggattatgccatcgcttcgcttaacgtgaccgaaaccggttgtgcctatttagatgctttaattgacgaatattctgcgctgtcaccagaaaatattgtctggcgctcgttattgctgaataacccggaagtgatgaaagagatggacgggtttttacagaagatgcagttgaataaggggaatgaaaaaccggcggacatttcagtgtttatgaagacggtaacgacactgagtggaaaactggttgaagcctacgataaagcgaatgaagcactggaaaagccgcccaaatccgacagtacctttgcccgggcgatgttacacagtgaccggcggctggtcacgctgggtgaccggttctttaattttacccgcttagggaaagtgctaaatagcaccaatgaaatgttgagtaaaagtctattctcggtgatttcaggtgtgtcttttggcagggcggtgaaactatcggtatcgcagcttcaagagggtgatctattccggcgtcaggtgttgaagcaacttaaggaatcaggagcaaaagctcgtcttgaaacgaaaaatggttataacgataggtttaaagaattcgcccaaagtgccgaaggtgaaccagttttaaaaaaatcccggattaagttattggcactattttttaatgggttggaatatgccaatcagttaaaagagagtaaagggggtgtcaagggccaggcccaggtgaccgccgcgtttttaagtacattgagtacggcaatggagattgtggagccgatggttaagcacggcatagaaaatatagctgctgccaacacgattaagtttattgggacgaatgcagggacggtttctgctgcattaaattttggagtagatatcagtgagttgggatctgaattgtggaatggacgacgctggcagtttattggtctttacggtcttaaagtggcttatgattttgcgcaactcacagcagcattaaatggtttattagaaatcttaattaatagggcattaatttcaactgaaagtttactagttagaggagtatcaaggcttttggtgtgggaatattttgttttgctatgtaattggcgagtgatgctcgttatttttgtggttgaagtattagtgatatatttttctgataatgacttacaaaaatggtgcagaagttgtgtttttggtttggagccagcgaaaaatttgcaatccacgcaatggatttaccctgaatcacagaaagataagttgtgtgaggaacaacgtaaaagtttttttgaagcaattaaggacggcttatga

SEQ ID NO: 9585 - DNA, 1011 bp, Photorhabdus luminescens
atgagtacttatcgtccttataaagaagctattgactttgatgaaataaaacgtcagagaaaagatattgatatatcggtaaaggttaagcgagaaataataattccgcgctatcctgaggatagaaaggaggaagaaaaagcgattgaggaacttcaagctaaaatccccgaactggatgcgatattagcaaaagaaccaccgccaccggaattgccgccgggtaagccgttaatcaaagtgagtggtgtattagaagaactcgaaacactctgtgttatgggttattttactgatcgtgaatatgatccggccgcttttgcccgtcaggaagaacgagagttgtttggagggttattgatggcagtggcaggaaatacttcagcggcggcagttagtttgcaaaccaaagtgagggtaagggatgtttgtgattttgtccggggtaaaattaatggagtgccatttcacggttggttaggttttactatagcaaaagcgggtgattacgttgaattagcagtaaccgagcaggagggacactatgtggtttatgccattgcccatcccgaattaagggtgatatcgatgaccccgcgttgtaaacagggtattcactcaaatgctaaatatcagatacgtggcacttggtatggttctttagtgcttttctttgctttcatggtagggggaatttttagtgagcaaaccagagaaaatattattttgtatataaaatatacctctttattttgtggtttgatggcaattgttttttcaccgttaatctatttttcctgtatgagaaaacctaaaccgacatttaggttggctgaggagattttcacggtattggatttccctaatcctacggaaattaatctttatcaatttacgatgaaaaagttgaaggaaatgaaggctaattctccggcagggaaatctggtaaagagagtgaaagagttttgccggataagagctgttactccagctattactattattactga

SEQ ID NO: 9586 - DNA, 990 bp, Photorhabdus luminescens
atgaatacttgtcagatgttaagaggtgctattgactttgaagaaataaaaagtcaaagaagcagtcttgatacatggattgaagtaaaccttgactggatagtaagccatccagaagacagagaagaagcagaaaaggagattgcaaaaacaaaagaaaaaatccctgagttggatgcaatattagcaaaagagccaccattaccagaattgcccccgcgtaaaccattaatcaaagtgagtggtgtattggaggaattcgagacgctctgtgttaaaggctattttactgaacgcgaatatgctcctgaggaatttgctcgtaaggaggagaatgaacagtttggcgctctattgcttgcgatgatggggaatacctcttggtctgcggtgaattcacagactaaaataaggttgtctagcgattatcattttgtgcaagggaaaatcaatggcatcccttttcatggttggttagggttgaccacagtaaaaagaggtgattatgtcgagttagttgtgatggaacaggaagagcattatgctgtttatgcgctgacaaagcctgaactgagaactatttctattattccttggtgtaataaagggatacgatcaaaagcatgggatgaagtcttttatacttgctgcatattttttcttatcgctgctatttgtttgggaactattctttttccagatggcagcaatttttgggatggagcagatatttttaccttatggcttatgttttttacagcggtattttctgtctattcatacgttgtgagcatcaaaaaaccgtggcagtcaattaaattggctcaggatattttctcagtattgggctttcctagtccgcaagatattagtcttgagaaactaaccaagaaaaggcttaaggaaataggggctaatccatcacctggaaacagtgaagaagtcttgccggataaatactgttttataagcaattattactattactga

SEQ ID NO: 9587 - DNA, 669 bp, Photorhabdus luminescens
gtgacacagatctataaaatggtttggataggttttgttattaatctctcgacatgtttgcttttgttggttgttataacaggatttgatttcaattatcttgggctctcttatcgagagcggagttttctcgataagatattaatatttatgctgatctttatttttctggaagtggctaatctgttggttattctcaaaatgccaagatatgcgaaaatcagctcttttattacatcctgtttctttccattaaattccgcggtctattttatccgggaaaggtatcgggacagcgcgtggatttggagttttggcgctattttattgctgattaggggagcgagtggtatttgcatcatgatggctgctgaacgttatctctcttatcgtaagacaaaagatcgttatttctttgcagagaaacctgggggctttttgttaacgctgaccccgttgagtaaaactatttttctgccttatgaatgcgttaaaagagttgaggaacgtgaaaatagtgtgctgataacggtcgatttaaataagaaaatcgacatcgtatgctcaaagaaatttattgatagcgatgatcgcaaaaaagtcataaaaacgcttttacaaacggcgttgaataatcagggcgacaatattatggcgctgaaaatgtga

SEQ ID NO: 9588 - DNA, 276 bp, Photorhabdus luminescens
atgatgtttgaaggtgttattcgcctgggcgataagctcagtagcggcggtgaagtgatttccgcctcctcttctatcgaaattgaaggtaaaagagtcgcattattaaatgatttagtcagttgtccgctgaaagggcatggtattaatcgtattgttaaagctaattctcaatgtatttctgatggtaaaccggtcgcatttgataaagcgctttgccaatgcggttgttatgtcatttccagtacgacgaaagccggaataggggaatcataa

SEQ ID NO: 9589 - DNA, 1176 bp, Photorhabdus luminescens
atggcttgggatattccggagtcttattccgtacaccggccagaaccgccagtctggtcgctttggtggcgtctgttcagtctggcttgtttcgctgtcgtggttgctgtcggcagtttctggtatctggttaaagatcccgccagcttgctttatgcgttggtcgctttagccggaataaccgcactgttcggggtgattgccggttggcgactgtttcgttacggcgtcgaattggagcaggcggaagtgctgatacaagagaacgcctggcaggaggctcgctggcaagcgtgggcttcgcaggcgatacgggttgtggattatggcgcgttttttccaccggaagtgccatcaccggcggataaggcggtattggtcaatggcgatagcgcactggcattgccccctttttccaattatctcaatttgtttgaaaatttactgggagcggtgcgcagtagtttggcagcacatggggttaatcataaagtgaatgtctatttttcattagacagtcccgaagcggtcgtatgggagcaattttgtcaggtttggaaaaaactggggctgcctttgtctcagctacaaggcccggtaaaactcaaagccgattatacccatcaaataagcgactggttgaccacggaaaccaaaggattgctgttggtcatcacatggtgttgggaaggcaataaaacgccggcggcaaccagtgagggcgcggtggtttggctactggcaccgtcctcttctcaattgtcggcaaaatgctgtctgcatcggccaatggtgacggtagccgcggaggctgagcagagtatggcccagtttctgcgttatcaacgtcctgccatcactgccgggactctgtggtacaacgatgatgactcaccggagaaagataggctgttaattgggttaaatcagagattgaaagccttgccatcatcggcacagcagagcgcgtcggcaacacaggatcagcagttcgtcccccattggcttgggaaatcagggccatatgcggattggtttgcattaacactcgccatgaaaatggccgagtaccagcaggcaccacagctttttctgctagcgcaccatgccacgttacaactggggactgtctccccgctaaacaatgtcacttcatcaggggacttccatgtttaa

SEQ ID NO: 9590 - DNA, 3360 bp, Photorhabdus luminescens
atgtttaaagcttttattacccgcaatcttggggtgggtctggtcaccagtttgatcgcactggtgttgggcggattgttatctttctggggcgatcgattcgggttatctactcaggctattaaaataattgtctggattatcagcatggtgggggtgatatggctgttgaatctttttcgtgattacaaacagcgtctgcctgtacaggaagtagcggttaaaccgcctgtagagcaagctgtactttcagaagcgccattttattttcaacggttgcaatatcagcttcgtcggcgttatggccccctttggcgtcggcgggtatgtattttgttggtgatgggacaacgggaacaagtagaagccattgcccccgggttaaccgcccagcactggcaagaaggcgagcaccacctgttgctgtggggcggcggtttgcaggtacagccggataaagcgcagttacaggcgttgcgccaattgcgtcgccgtcgtccgctggatggcgtggtgtgggtgatgaccgaagagcaactcggccagcgaacgcagatagagaccgcgttgcgcatgctggagaaacagggacaacagcttggctggcaggccccggtgtatgtgtggaatgtgcgtcacagcaactgggaccagcgcgaccggccaacccagaccgtgggctgttttctgtcagaagagtgtacgcctgagagtctggcgcagagcctgcacagcctgatacccacgctggcgaaccggggcatggaacaggcgatagcggaaaaccgtcacgattttctgttgcgactggcgcagtctttgcgggataagggggtaacacgtctggtcgggcagttgacgccgttgttagagcggccgccgataaggctgtcgggcgtgacgttcagtttaccgctgccggtgccgtcaggcatggtggagcatggctggctggtggatgccagctggaatggggtgctggaacaggtgcgtgatagccggggacaggcggtgggttttccgtgggagaaaagtgcgcagtggggtgtgatagcgctggcagcgttgtggggaattggcagtgtgacctcgtttggggttaaccgtcatcagatagcggtcagccgtgaacgcctcagcgcggccggtgaccgtcagggagatgtatcggcccgtttgctgagtcagcatgggctgcaacgggagattgaccggttgcagtctcagtcagcgcgtggcacgccctggtacagccgttttgggttcaatcagaatgaagccttgttgaaagcgatgtggccggtgtatcagcgcaacaatgccgaactgatacgtgatgccgctgcccggttgctccatcagcgcctgaccgaactggtgaacctgccggcgggcagtgcacagcgtcatcagcgtatcacaccggcgtataaccagttgaaagtgtatctgatgatggcgcggccggagaaagcggatgcggcggtgatgagccgggtattgatggcggactggccgcaccgtgccggggtgacggacggtctgtggcaaaacagcggcgaggcattactgactttttatgctgagaatttaccgcgccacccggagtggaaaatcagcgtggataacgaactggtcagtgaagtgcgtcagatattgctcaatcagctcgggcagcgtcatggggaaacgatgctgtaccagaaaatgctgcaacaggtggcccacagttaccgggatttaaccctggcgcagatgaccggggctacggaggcgagtcgcttgtttagcagccgtcaggtggtgccggggatgtttacccgtcaggcgtgggaaggtcaggtgcaaaaagcgatagcgcaggtggtggcgtcccgacaggaagaaattgactgggtactcagtgacggtcgtcagccaatatcgaaggcggcttcaccggcggagctgaaagcccggctgacagcgcgttattttaccgactttgccggggcatggctgaacttccttaatagcctgcgctggcataaaacccataacctgtccgacaccatcgaccagttaaccctgatggcggatgtacgccagtccccgttgattgccctgatggatacgctggcttatcagggagaagccgggcaaccgggcacggcgttggcggattcgctggtgaaatcggcacaaaacctgttccagaacaataaaccgtcagtgattgacccgacccgccttccaccggggccactggataacgcgtttggcccgttattggcgctgatgggcaaaagcacagaggaaaacgggctgacggcggacccgtcactgagtctgcaaaccttcctgacgcgggtgacacgggtgcgtctggcgctgcaacaactggcgaataccgatgaccccccggcggtgatggaagcgctggcacagagtgtatttcaggggaaaagcgtggaactgacggacacgcggacctatggcagcctgatagcggcgagtctgggagcggaatggaacgggtttggtcaggcggtgtttgtgcaaccgttaaccgaggcgtggcagacggtgttacagccggcggcggccagtctgaatgcgcaatggcagtcggcggtagtggcggactggcagaccgactttgacggccgttatccattcgtggcggcgcaaaatgaggtctctctgccgatgctggggcagtttattcgggccgacagcgggcggatagagcagtttctgcacaatcagttaggcggcgtgctgcataaagagggcaagtattgggtggtggataaggtgaacagtcagggactgcatgttaacccggcctttttaaccgcgataaatcaactgagtcaggtcgcggatgtgctgtttgctaacggcagcgaggggatacggtttgaattgcgggcgaaaccggtgggtgatgtggcggaaacggacctgacgatagatagtcagcagttgcgttactttaaccagatggagcgctggcagcgtttacgctggccgggggacggggataatcccggggtggcgctgacctggaccggggtgaatagcggtgcgcggctgtatggcgactatccgggggcgtggggattcattcgctggctggaggcggcacaagtgcagatggtggatgaaagccgttaccggctgaactttgccacgccggaggggttagcgctgacctggatattacggaccgaagtcgggaaagggccgctggtgttattgaaactgcggggttttaccctgccgaaaacgatttttgaggagaatacgggaaataaccttgttgaatcggggataaataacaatgacgacgaagaagaatatcgccagaataggtaa

SEQ ID NO: 9591 - DNA, 189 bp, Photorhabdus luminescens
atgtttggtttaaatatgatgaactttgccgttgacattaaacattttgtgctgtttgacaaaaaaatacttgattttaatatgcacccgcagggaggattgaattattcagtaaccgtgtatgcagttaatgaatcgattaattcgaacgcatgtgtcaggctatatgattattcttctcccggttaa

SEQ ID NO: 9592 - DNA, 171 bp, Photorhabdus luminescens
ctgctgagtcaggaaataccggcatcgattgactgttccccggatttaccagggatgaaaaccgagaatgtattcggttggggttttaatcacgtcaccgatattggtgatattacccattcaataatagaggagtcatgggtatggcaatccctgcgtatttatggttga

SEQ ID NO: 9593 - DNA, 492 bp, Photorhabdus luminescens
atggcaatccctgcgtatttatggttgaaagatgacggcggtgccgacattaaaggttcggtggatgtacacaaccgggaaggcagtattgaggtggtggcgctggaacatgcgctacatatcccgacggataacaataccggcaagctgaccggcacccgtgtgcatgcgccgctggtgtttactaaagaggtcgatgcgtctagcccgtatctgtataaagcggtgacaacgggtcagaccctgaaatcggcggaattcaaatggtaccaaattgatgatgctggtcaggagaaggtctatttcatcactcatctgaacaacgtgaaggtggtgaaagtggcaccgttgatgcatgacatcaaagatccgactaaagagaagcacaaccatctggaacgtgtcgaacttcgttacgaaaaaatcacttggacgtacaaagacggcaacatcattcactctgatgcgtggaatgagcgcagtcaggcgtaa

SEQ ID NO: 9594 - DNA, 2607 bp, Photorhabdus luminescens
atgaatcgatcattatgttggatgtgtgagtccactggaccggcgttgctgccggtgcgttataccgtggtgccggataatgtttcggaaaccttgccggcgtgggtggaaacgccagaaccttctgcgccgggctatcattatgcgctgcgtgccttacggcagggatttttatatgtctattacgttaatgccggattaggtgaacgggagagctgggatacctggagcgtcagcgaggatggcgcactgtggagaaatctgaatgccccttttggtatcttccccaagaaaaccgcagattgtcatgcgccgacccatcagagcgctaatatggaatttattacgctaagggatattgccttgcgtcaggagacctggctggctttctctccctcaatgtggagccaggagaccatcgagtattatcacaacaaccgcgaagcacgggaaaggcggatgcagtgcgtgaaaccgtggcagtggcgcggggtgccggaaggggtggggattgctcaggcgacgatagagaacctgaatatcgtcatcgattacggtctgggtgacaatgattccggcaaatatgttctgccttgcaaccggaaagtgtcgcgtatcagccggacattagaagaggcaccctactacgaagtttatcacggtgcgttgagaccgaagagcaccttgtatccgtggagtagcaagcgagcgggatgtgcggacattacggtcagggcgatgcaaaagcggggcttggccgcagatggcacgccggtatcgccggtgttaatcgcgttgcatgatccgatagggatagcgcatgaattagcgggctggggtgatgatattgccggggtgcataaaacctttttggatgagttgtcgatcgaatttatgaccgacagttcattgaatggggtggaaaatcaactgcataaattgaaagccgcggatgtgcaagggcaggttgataaagcgctcgaagtcactaagcagaaggagtatggggttttttccgatcaggataaggctaagctcaaagagtatgttactcgtgacatggcggcagcgggtaagaaagctgttgcccgtgattggaagaaatatactgcggagctgaatctggctaaacgacaggcatttaaccaatgttatgccgatctttgcaccgacgtggcgaaagcgctggaacaactggctcagttgagggtgagttggctgaaacagagtgggtttatcacctgttgtcaggattttcattccacccgactggaggacaatctcaattatcgtgaggcagtggattatgccatcgcttcgcttaatgtgaccgaaaccggttgtgcctatttagatgctttaattgacgaatattccgcgttgtcgccggaaaatattgtctggcgctcgttattgctgaataacccggaagtgatgaaagagatggacgggtttttacagaagatgaagctgaataaggataaccatcaaccggcggctccctcggattttatgaaagcggtgtcagatctgagtgggaaactgattgaagcctacgataaagcgaatgaagcgctggaaaagccgccaaaatccaacagtacttttgctcgtgccatgctgcattgcgaccggcgactggtcacgctaggggatcggttcttgaattttactcgcttagggaaagtgctgaatagcatgaatgaaatgctgagtaaaacgctgttatcggtgatttcaggtgtgccgcttgatcagatggttgaactgtcggtatcacaacttaaggacggtaatgcgtttcgacagcaggtgttggagcagcttaagaagccgggttctgaggcgcggttgaaaaaaagtaataaatatcagtctgattttaaaaaatttgctgacagtgctgaaggagagccggtattaaagaaatcccggattaaatggttagttttggcttccaatgttttggaattttccaatcagctacaagagagtaaaggggatgctaagagtcaagcgcaggtgacctcagcgtttttaagtacgctgagtacagcgatggagattgtggagccaatagttaaacacggaatggaaaatgtgattgctgccaacaccattaagtttattgggacgaatgctggtgtggcttcttctgcattaaatctgggagtagatatcggtgacctttcttctgaatggcgtggcagagggcgctggcagtttattggcctttacggtcttaaaagtgcttatgattttatgcaagtagtaaaagcattaaatggtttattagaagttttaattgatagagcattactttattctaaaaatttattcgttgagggggtagcaaagcttttagcgtgggaaactcttgcttggttgtgcacttgggaggcgatgctgttaatttttgtggttgaagcgttagtaacctatttttctgataatgatttacaaaaatggtgccggggttgtgtttttggtttggagccagtgaaaaatttgcaatccacgcaatggattgaccccgaatcgcaacgaaataagctgtgcgaagaacaacgtaacagttttgctaatgcaattaagggcggcatatga

SEQ ID NO: 9595 - DNA, 609 bp, Photorhabdus luminescens
atgagtacctgtcgttcttttaaagaggctattgattttgatgaaatcaaaaggcagaggagcagccttgatacatggattgaggttaatcttgattggataataagccacccagaaagtaaagaagagtcagaaaaagagattgagaaaacaaaagaaaaaatccccgaactggatgccatattagcaaaagaaccaccaccgccagaattaccgccgggtaaaccattaatcaaagtgagcggtgtattggaggagttcgaaactctgtgtgttaaaggttattttaccgagcgtgaatatgatccggttgcctttgcccgtcaggaagaacgggaattgtatggcgggttgttaatgtcgttagcaggaaatacgtctggatctaattcgcaaaccaatgttcggtggggtgatgtttgtgattttgtgcgggggaaaatcaatggcgttcccttccacggttggtttgggtttacttccgcaaaggtaggtgattatgttgaattagcggcaattgagcaggaagggaattatgtggtttatgcgattgcgcatcctgaattaagggtggtttctatgacgccgcgttgtgatcctgtctcttga

SEQ ID NO: 9596 - DNA, 1383 bp, Photorhabdus luminescens; identical to SEQ ID NO: 7510

SEQ ID NO: 9597 - DNA, 324 bp, Photorhabdus luminescens
ctgcttatttttactgtttctgtttggacagatgctttggcgtttctggaagatatgctgccattttttgctttgctgatagcgatatttgcccccagcacatattatcgccgcctaaaaaagcccagacctacagttaaattggccgaggagatttttacggtattaggtttccctgatcctacgaatctcaatattcgccaattcacaagaaagagactgaaagaaataaaggccaattcattagatgaggaagtcggtaaagagagtgaaagagttttgccagatagtggatgtttcgcaagccattattactattactga

SEQ ID NO: 9598 - DNA, 1002 bp, Photorhabdus luminescens
atgagtacttatcgctcttataaagaggctattgattttgatgaaataaaaagccagagaagtagtcttgatacatggatcgaggtgaagcaagaaagaattcaacgtcgtcctgaagatagagaggaggtagaaaaagcgatagaggagcttcaagccaaaatctccgaactggatgcgatattagcaaaaaagccgccgccaccggaattaccgccgggtaagccattaatcaaagtgagcggcgtattggaagagttcgaaaccctgtgtgtgattggttattttactgatcgtgaatatgatccggttgcctttgctcgtcaggaagaactggagttgtatggcaggctattaatgtcgttggcgggaaatacttcggggtctaatgcgtcaactaacgttcggaagcgtgatgtctgtgattttgtgcgggggaaaatcaatggtatcccattctacggctggttagggtttactgtagccaaagcgggtgattatgttgaattagcggtaacagaaaaagaagggcattatgtggtttatgccattgcccatcccggattaaggattgtttctatgacgccgcgttgtaagcagggtattcattcaaatgccaaatatcagatacgtggcacttggtatggttctttagtgcttttctttgttttcatgatagggggaatttttgatgggaaagttagagaagatattattgattatatgaaatgtatctcttcatttttgggtttgatggcaattgtcctttcaccgttaatctatttttcctgtatgagaaaacctaaaccgacatttaggttggctgaggagattttcacggtattgggtttccctaatcctacggaaattaatcttgagaaattcacaaaaaagaggttgaaggagatcaaggttaattcccctgacgggcaatcaggtaaagagagtgaaagagttttacccgataaagattgttttataagttattactactattactaa

SEQ ID NO: 9599 - DNA, 744 bp, Photorhabdus luminescens
atggtttgggtaggtttggctattaatgtattaacctactttgtctcactggctgctataaaggtagctagtgctggttattttgctctttcttatcaagagcaatattttgttgctaaattaccaatattcaatgctttgatgttgatttttattttgctggaggtggttaatctgtttgttattctcaacgcgccaaagtatgcgaaaatcagttcgtttattgcatcttgtctttttccatttggcgcggtttatttcatcgggtgtttattgtcaattcaacgagttgcattatctcccttcgctgaatatcaggatgatgatacggttccaaattccgcggtttattttgtccgggataggtattggaaaaggatgtgtatttttggttgcataacgctggttatgtcatttaagggtacgagtaatatttgtatgatgatgacggctatgcattgtctctcatatcggaaaacagaaggtcgttatttctttgccgagacagaaggaggctttttattaacgccaaccgcgttgagtaaaactattttcttgccttattgctgtattaatagagtggaggagcgtgaagagagtgtgctgcttgctgttaatttaaataaaaaaatcaacattgtattttcaaagaaatttgttgaaagaggcgatctgatacaagtcatcaagcggctttcacaggcagcattgaataatccgaagcataatattatcacgttctaa

SEQ ID NO: 9600 - DNA, 126 bp, Photorhabdus luminescens
atgtttcaaggtgtcattcgcttgagcaatcagctcaatagcgatggtgaagctatttctgtctctttattaatgagcagaattccagtggctgacagagatattcagcgtcaaaggagaatataa

SEQ ID NO: 9601 - DNA, 1599 bp, Photorhabdus luminescens
atgctgcaacagctaattgagagttgttttgttgaacgtgatgtccttgcggaagcacggcagaacgcggcgcggtgggaaaactggttgttacccattagtaccgatgcgcctacaggtaatgatccggtctatgaagacgattttcagtgtatgcgggaggaggttaataaaatcagtggtgttgatacttccctgatttgtcaactggcggagaagttgttgaccaccaaatgcaaagatgtccgcgtggcgacctactatgtgtgggcccgtctgcattgtgagggggaacatggtctggcagaagggttggcgctattagccggattggcggatcggtttggtgaagccctgttacccagtcgggctagcagccggaaagcggcgctggagtggctgacaggtgcaaaaatgcgggacagtttatcacgctatccagaggtaaatcggaccgattttgaccacattctggccgcgttggtgttactggaacagtcattttcctcttgggatgaagaatctcgtccaagcttggtcgggctggcaagaacactggagaaccgattagctcagtccggtggcgtgagtgcggtagtgccacaaactgccgctccggtactgccatcggcgggacagagcaaggcatcagcatcgggtaagtcaccggtatggcgtcaggtgcaatctgggcgtgatctgctggatcaggcgcgtgaactggtgcgttatctgcgtgatcaacctcagggctggctctcttccgcccggctgatacgtagtatccgttgggataccgtccatcaactaccaccacaggatgctgatgagcgtacccgtctggtgcctccccgcactgaatctcgcgctcagttaaagcggctctaccggcaacagaactggcatgagttattggaacaggccgagcgcatgtttgccgaaggggtgaatcatttttggctggatttgcaatggtacctctgtcaggcattaagccgattgggctgcccttacgaaggttgggcggacatcatgaaacacgatctgagaatactgcttgagcggctgccggggctggagagtatggcctataacgatgggacgccctttgctgatgaggtgacaaccagttggatagcccaacaggtgcatgacaatcagtcagattggcagtttgagcatttgccggcgcaacctcgacatgatgatgacgttttggcgctggaagcggaggcgctgcaactggcggacagcgaaggcattgatgcggcgttgcgttggttggggcaattgcccggtattaatggagcccgtcaccgctggttacagcgcttgctgatggcgcgggtcgctgagcaatacggcaaaaatgaaatggcgttgcatttgttgactgagcttgatgccgatgagcaattcaatcttggcgaatgggagccggaactgatgtttgaggtgaaagcatgtctgcttaagttactgcgcatgaaagctcaacgcagtgaacatgataaagcgaggatggcgcaacggatggagacgctgctggctggattggtggcgattgatccggtcagagcttcggtgctttgcggttaa

SEQ ID NO: 9602 - DNA, 1767 bp, Photorhabdus luminescens
atggatgatttaattctccgctattacgaagcggaaatgcaatatctgcgtgaagctggcaaagagtttgcgcaggcgcacccggaccgggcagctatgctgaatctgagtgacgatcgggatcttgatccttatgtggagcgattgcttgaaggcttcgctttcctgatagggcggatgcgtcagaaacttgatgatgatttgccggaactgacggaagggttggtgagtttgctgtggccgcattatctacgcactattccttcactctccattgttgaattggcacctgattatcagaccttgccaaaaagtgaagtgatcgccaaagggtttgaagtgatatctcagcccgtaggaccaagccagacccgctgctattaccggactacccgtgatatacagattacaccgctgcatatcacctctgcgacgttgcaaaatgaagccgacggccgttcagtgatccgtttgcgttttgactgcggtcagttgaccgagtgggataaagtggatttggcacgtctgcctctgtatctcaaagcgggccgtccggtgagttctgccttacatctggcgttgacccgacagactcaacagatttacgcgcgcttatccagtcaggaagagcgctctcgccttaagaatggctgtttttccccgatggggttcgacaatgatgatgttctgtggccgaaacaggagagcgcgttcagtggttatcagttgttactggaatattttactttccgtgaaaaatttatgtttgtggcgctcaatggcttggattcgttagagattcctaccggtacgccttggtttgagttggatatcgtactcagtgaattgtggccctatgaattgaagttttcagcggaaaatatccgattgcattgcgtgccggtaatcaatttattccgtgttgaagctgatccgatgcacatttcgcggctgcaaaatgagtatctactgcgcccgatgcgcattcaggatggtcataccgaaatctattcggtggatgaagtctcctcttcccgccgaggtgatgctcagcgttttgtaccgtttagcagctttcgtcatcggggcggcatcatgcgtagttccgcaccggagcgttattttcatacgcgcgtctgtcgaggtccttcgggtttgcacgatacctggctgatcctcggtggagaatcgtttgaaactgacccagagcttgatgatgaaaccctttcactgcgtatcaccggaaccaacggccagttacctcgtcaggcattacgtaatacccaacttgaacagacactacactccgccgcgggcacgctgcgcgtaagcaatctctgttcgccgacgttgccctgttatcccccagcgaacgaccgtttccactggcggatattaagccatctcggttctaattttcttagcatgatggataacccggaggtgctgcgcggcacgttagggctttataactggacaaatgatgagatgaactgccgctgtctggatgccattgttggggtgaaacacgctttgatcgaacgttttgaaaagggcttcctactccggggcgttgatattgagattacgctgaacagcaatggctttgccggcgaaggcgatattttcctgttcggtgagctgcttaaccgcttcttctcgctgtataccgatattcatctgtttaaccaattgacactgatccttcaaccttctgggagatgtttgcgatggcaagaaaatcacaatcagcgtattcccggttaa

SEQ ID NO: 9603 - DNA, 1041 bp, Photorhabdus luminescens
atgcagcaactggcaccgaatatttacgattttaacttttatcgcttctgtcagttgctggagagtatgcgggatgggtgcccgccgttgggcagtacgatgtcgcccggtgatgatccgatccgtttccggcctgatcccggtatgggttttcctgccggtgaactgaaaaatgtggagtgggatgagcaacagcctgaacagccaccgacagtacgcacgacgtttctcggcttgtatggtgtggattcaccgctgccgacggcttatctgaatgatatcgttcagctgagtgaaggctatgaaggcgtagcagactttctggatatttttaaccatcgaatgatgacccagtattaccgtatctggcgtaaatattcctatcccgcgacttatgaaccgagtggtcaagatcaaacctcgcaatgcctgcttgggctgattggtttggggatcgccggtagccagcaacatattgctacgccggcttctcgctttctggcgctgctcagtatcatgcggctgccaacccggatagccgaaggggtgatggcgctggttaagctattggcccctctcacgcaagtacaggtggttccccatgattgcagacgagtacggttgacccaaccggctcgcttaactcgtcaccatccggttcagctttctcaacgtccagtactgggcaaagtcgggacggatgttaacagccaaatggtgctggatctctataccgaagatactgatgaagctcaagggtggttaccacagggggaactgcataccgacctgttggtgttgctacgcgtttatctgggttggcgttgcagcgtgcgattacagctcactttacccaaatgggtattgccatcggcgcaactagggaaacaacgcgttcggttaggtcgaacaggcatattgggattgaaaccgggctcacaaacggtttcaggcatggtgaaaattaatctggggcactatcaagggctcttaccgagttatcaatatagggaggccgagaatggcagctatcaatgttaa

SEQ ID NO: 9604 - DNA, 537 bp, Photorhabdus luminescens
atggcagctatcaatgttaaatccgtcatgatgggcggcatcgtttgtctgatgttgcagggattagtcggatgtggtctgacgcagaccgtaactgacggcacggtagccgtgacgcaatccattttccataagcaggtgaaaacgctgcgtttggatttcagtgcccgcagtgcgcttaacaccaccgacgcgcaaaccccgttgagcacggtagtgcgtgtttatcagcttaaagacaataaagcatttaagcgtgccagttatgcggacctgttgaaaggtgatagtgaagcgctgaaggcggatcggctgacacagcgggatatcagagtggcaccgaaggggagtgtgtcgctggatatgccgatggagaaagcggcacggtttgttggggttgtggggctgtttcatacaccggatgccaccaataatagttggcggttagtgatccgacgtgatgagttggatgcagataaaccgcgcacgatcgagttgggtagtggcacactgacactgaatgcggtgaaggagtga

SEQ ID NO: 9605 - DNA, 435 bp, Photorhabdus luminescens
atgaaacagctaagaccttcgctttacgaaatgttgatgtttaactttaacggtgggctggatctcaatcagatcgatgaacgaaatcaagtgattttatccgtgatggataatatgcaacgtatcctgagcagtcgagcgggttcgctggctcatttaccggattatggtctgcccgatttcaacgtcattttgcaagggctgcccgcgtcgtcacagagtctgattgccacaatcgaacacacgttgttgacctatgaaccgcgtttgaaacgagtctatatcacgctactaccgcaaattgaaccggggcatctgcggtatgacattaacgctgagctaaaagacataggattagtgcggtttagtacggaatttatcccggaagggaaggtattaatccgccatttacgtcaacaaggccatatagagtaa

SEQ ID NO: 9606 - DNA, 1380 bp, Photorhabdus luminescens
atgactacaatatcatccggcaacacgatacataccggggatgatccacgtgcactgccggaattcagtgcactgaaagaagaaatcggtaaattgaaccatccggctcgacctgatgttaattgggccagagttgaacaactttgtctgtcgttgtttcgattaaatggcgtagagctacaaagtgccgcttggtacacgttagcccgagctcagcgcaccggattagccggtattgatgaaggattcgcattgattgatggattagtgagccatcaatgggcgcagttctggcctcagccgacgcatgcacggattgaaattttcgcttggctggttgcacgcttacagcaggtattgcgtacttgcgtcttctcttatattgacttgccgctcatttaccgggtggaaaaggtgcttgagcaactgtgcgaggtgcttcaacgtctggagctgaaacatgtgagtaaacttgacagcctacgtgtacagcttcacaacagcgcccggcgattagagtgtctggagcaggaaaagggcgcggtaccggtatctctcgcttcggcgcagtctgttgggggcaatgctattttgctgcctgaagaaccccctccgccgcaactgatctatgtggtgcaggagacaatctcgtcggtgcaaccgcaagtcaaagttgctcaggttttgacgacttcgcgctggaaagtttggcgaggttttgtggcggggattgtattttgtgcgttggtggtgacaggcggttggctggtggacaagatgcgacaaccgtctccattagctgaggctttgttggcaacgacctatccattaccgcagacactgcttccggctcaacttgccgaattacaccaatcggacaatgcgacgctactgagccagttacaggataaaacgttggatgcgagtcgtgcgcaactgacaaatttaaccactttgccagccttttggcctttgagttatggttctcagttattacaacagctacgtacattgtggccggccagccaagcagtacaggatatgcaaaatcaatggttacaccagcgtgaggcggcggcactgccgatgcagtcattggaaaattaccatctagctcaattacgcctgcaacatctgacagaacgacttgatgcattggatgaaaaacgcggtcgttatctcaccggttctgaattgaagtctatggtgtttggcattcggcagccgttggcgaatactccgccattagaggagttgctgcgtcaactggcggaacaaaaaaagagtggtaccgtatcgctggcattactgatgcaaattaacacccgttttaatcaattgctgaatcgctattatttgttgctgaaagtaggagagtag

SEQ ID NO: 9607 - DNA, 495 bp, Photorhabdus luminescens
atgctccaacaactcgacaccgcagaccgtgtgcgccgcaagattgctccccggattactaagaaacgcaaggctgagttcggtcaattcatgacccctgctaacgtagcccgttttatgacatccctttttccacctagtactctgcgtacctgccgcctgttagatgcgggcgcaggggtggggacattatcgtgtgctttccttgatcgatgggtgaccggcggttttgattttgagtccgccgcggaaaacccgcttttgggcatcacacccatcatgaactgggtgcgagagttctataacaaagaatatgcgccgaatacccgcgaggcatttcgccgtcagactatgcatcagttttgtcatgcgagtattgtgctgtataacccagataagcctgactgcattcgtgggattcattgcgtcatcgaaaatatccttcccgttttatgttgggggaggatattccaaaggagagatggtgacctataa

SEQ ID NO: 9608 - DNA, 414 bp, Photorhabdus luminescens
atgaaagatataatttattggaatgctaaagttcaggaagaaatagataattaccctgatgcagtacgtgatcgaattaactttgaactcgtagccttacagtgtgactatcctcattctttcgataattttgatttttatgaggttttatctgatggcgatttacttaaagagcgaaaaatggagtatcctccagctcaaaagaaatccatgagagaaacgattggtcgctatgctatgcagttgacaattaaaagtactgactcataccgcatgatttatgtcactaagtttgaagaagcgatttatgtattgcatacattcaagaagaagacagagggagtggctagaaaggattacaaaacggctgctggacgttataaacagctcgaagagtatcgtaaaaaaacgtag

SEQ ID NO: 9609 - DNA, 318 bp, Photorhabdus luminescens
atggaattcacagtgacgaaaaacccttatgcttcatccagcaataatcctaacgaagcaaatgataaacatattcgcgctcaattaatggtgatcatccgcaagatgattcaggagcgcggtttaagtcaggtaaaagcggcggagcttttgggaacgactcaggcaagaattagcgagatcattaatgggaagctggaaaaccacacgattgataaattattcaatatgctaaatcggctcggttggaatttcgaatttagttatcaggaaggtatggtgaccgtcgcggtagataaaataataaaaatcgcgtaa

SEQ ID NO: 9610 - DNA, 777 bp, Photorhabdus luminescens
atgaaatatgcctttattaccggcgcgacaggagatattggtttcgcaattacagaaagattatctgatgatggctttgaaccaatattattatcgcgtactcctgagcgtcttgatagcgcaattgacaagttacgcaataaatatggtagtcaatttgcaaagaaaatagtttgtgatgtttctaatcatgaaaatgttaaaaaagcgtttgaccaactagagcttgaagataataagctggcggtgcttgtgaattgcgctggcatttctggtggcggtattactgctgaaataagcccacgaacttggcaaaatgtcataaacgttaatttaaatggcacttattttgttatatatgaagttttgaaaagaaaattaatgtcatctggcggcagaattatcaatattgcctccaccggcgggaaacaaggtgttattcatggtacgccttattctgcttctaagcatggtgttgttggcctgactaaatccttggggcttgaattagcacgtaatggttcaggtgttacggttaacgcagtttgtccagggtttgttgagagtgagatggcggagcgtgtcagagaacattacgccaaaatttggggcactgatatagcagaagcgaaaagaagagtagaagagcgtgttcctattggaagatatgttgaacctaatgaagtggcagaaatggttgcttatcttgcatctcctcttgccggggctgtaaccgctcaagcacttaatgtgtgtggtggattaggtaattactaa

SEQ ID NO: 9611 - DNA, 714 bp, Photorhabdus luminescens
atggacgatatttctttatcatctgatttttctgatctttggattataaaaatcgacgatattgatttatcttctattgaacagttaattcaccggtctgatatcgttcgccataaccaaatttgtttagcggatagaagaaaaaaatttatatttagacgggctgcgttacgttatgttttaaatcaatatttatctgattatgaaatcataacgaatgataacggtaaaccttatatatccacggagcaagacttcaaatattatttttctctgagtgcatcaggaaactattgcgccatcgggtttagctcaagagaaataggtgttgatattgaagtcactccttctaagataaaattttctgaaattattgaacgttttattaaggataaggagttggaatatataaaaggtataatgttaaaacaactatcaggagtgagtcccggatttaaaaactattatcacttaatgtcattatactgttgggttagacttgaagcatatattaaattatttgcttcgactttacatgagaaattattggctaataactctgattctgttaaagatatgaaagaattagaggcgagcacattattgattcatcatcagcaatttgtttgtgcattatctcaaaagaaggtaatttctacaccaaatatcaaggaaataaactatttcgagattataaggaacaaagatgagtaa

SEQ ID NO: 9612 - DNA, 816 bp, Photorhabdus luminescens
atgagtaatattattgacttaagtgttcctatagattgtgatttttgggaacctgagaaagtaactagaggagtcgttgatcataaagagggcgctaataaattaggtgaaagttatttatatttccataccaattcatggtggaaaagagcctttgtaaaactgtttaaacgcaaaaagtggatcattgatcacaatgattttcctgatggtatgggattatcactgatgtattatcgattgaccacgcatactggaacgcatattgatgctccctatcactatgggtggcataaagggcaagatcagccagcaacaattactgatattcctttggattggttttatagccacggtgtattacttgattttagtcatgataatcaatcaattgataaacaggcggtagaaaaccaattaaagaaaattaattataaaataaaagaaaatgatattgtcctgatcaatactggagcggataaactcctgggggaaaaatcctattttactcactataaagcgattgaaagcagtgctgttcaatggttagtagagcaaggggtaaagattattgggacagatgcatttagctttgatcggccattcatagagatgattaacgattataaaaaaacggggaataaagattgcttatggccatctcattttatcgggcgggatcacccttatttacagatagaacggctttgtaatttaaccagtattcctaaaccttatggatttaaagtgtgctgttttccaataaaattagagaaagcagatgcttcatggagtcgagtggtcgcaatattataa

SEQ ID NO: 9613 - DNA, 1287 bp, Photorhabdus luminescens
gtgataataaataacagaaatgaatctcaaccacgtagagttgtggtgacagggctaggtgttgttgcaccgacaggtgttggcgttaatgaattttggaacaatattcataacgggaaatcgggagtgagtaaatatgagtggggaagagaaagatttggctttaaaagcggagcaataggacaagtttacggtagtgatggcaataacaaagagtttgttctgaaaagtgagcgtaaatatctccagtttgcgctagatgccgctgagatggcgatgcaagatgcaaatttaagaccctcagacattgatggtcgacgttttggtgttgcgatagcgacagcgattgccgatgctgcgggaatggaagagtgtttactcagaatcaccaaagggggcaaagagaatattcaccctgatttaattaaatcagaagattacgacagctttgatttcagctctgccgcaacctctgttgcgaaaaaatatggtgcatctatgtccgtcagtaacatatcaaccggatgtgcggcagggcttgatgcattaggcattgcgatggagcatatccgttatggcagagcggatattatgctggctggtgcaagtgaagcgccactttgtccactctctatcggctcttttgaagctttaggggcgctatcatcaagagagttggaaaatcagcaagcagcaacttgtcctttttcccttgagcgggatggatttgtgattgcagaagggtgtggaatattaattttagagtcttatgaacacgctaagcagcgtggagcacatatctatgctgaattagcagggtacgcatccgtcaataatgcttatcatatgactgacttgcccgcggatggcatggcaatggcacgatgcattgatatggcattgaaggatgcccagatatcgccatcaacggtaaattatattagtgctcatggcagttctacagcgcaaaatgatattaacgaatcaaatgcgattaaatttgttttgggtgaaagtgcatttggtattccaattaactcattaaagtcaatgacaggtcatgctttagccgccgctaatgcgatcgagtctgtagcattatgtcttgaaatagaaaagcagtatgttcacccaacaattaattatcaaacgccggatcctgattgcgatttagattatattcctaatcaaggttgctcatatccaattaagaccgcgttaaaattatcaagtggtttttctggtattcacagtgttattgttatgagggcagtagacaatgcgtaa

SEQ ID NO: 9614 - DNA, 1116 bp, Photorhabdus luminescens
atgcgtaaaagagttgtcgttaccggtgttggtgcaatacatcctgatggcaatgatgtcactgccataaaatcaaaagtcattcagaagttattgggacaagaatcgaaaaacaataccaccgcaagttctataataaggacattgagtgatttcgatggcgcgaaatatatcaataaccgcttaagacgtaaaattgatgaattttcggtttatggtatcgttgccgttgaaatggcattaaaagcgagtagattggatgtcgataagcttgatcctaatcgcgttggcatatatgtcggaaactgttttggtggatggcaacatattgaggatgaagttaaagcgctccatattgaaggcataaagggaatggggccttatgttgccacggcatggttccctgcggcacttcaagggcaattgtcactgctttatggttttagtgcgcaatctaaaacgttttccacctccgatgtggcagggatgcaagcaataggctatgcggcggaagcaatttctaatggtgttgcggaagtgatgttatgtggtgcgtcagaacatctttccagcccattagttaaaaatttactggagaaaacgtcaagccagaaacactctgaggtttttggcgaaaaacagccaggagacttttccgaaggcgcggcatttctggtgctggaagagagacaacatgctttagaacgtggtgcttcgatattgtgtgaattaaccggctttgttgattattttgcaccggataaaaatactagaaataacaccttagaatataccgctgaactgttcaaccataatgaaaatgctgtatttattatggatggaatatatgatgatgaaaaagaaataacgagtaaggctttctcaaataaagagataaaaacatcatttataaatctgaggccctatttggataatcaattttcagtcagtggcgtgattgattcagtcctggcgtcatcattcttgtcagaaagtcatggggatgaggaacaacaatctaaaaaaatcaatgagttttcaaatactaaccaaataatcattcagcgctttagtaatcaaggtcatgtgtgtgcgttgagtttttcagctatttaa

SEQ ID NO: 9615 - DNA, 249 bp, Photorhabdus luminescens
atgaataatcatccagaagtaaaaataaaaacgattttgtctctttttcttaacattaatattgatgatttcaatatggatgcaaaccttgctgatgcctatgatatggattctacggaattagctgacttggcaaaagagattgagaaagagttcggtatttccgtgacgaaaagtcaattcagtcattgggaaacaggaagagcagtccttgatttcgtctcatcaagtttaaacgataaaaattaa

SEQ ID NO: 9616 - DNA, 1548 bp, Photorhabdus luminescens
atgaaactaatctctatgttgttacattcagggcgtgataacttacatcatgattgtattatcactaaggattatcactatacaagaaaagaggtaatatcttctgtttcccatttaattgatgatttacttagtcgaggtgttcaaaaaggtagtaaagtcattgtcatatttgaacatgatgaattaggtattttctttttagctgcggctagtgctatggggttgcatttattaatgccctataatttatcatcagcgacaatcgatgaatggattaattttaccaatgaagtgcaatacgattttgtggtttaccttaagaaagataaacattttgttggaagattaaaagaaaacaacattaatgtgattgatatttcagatcataagatccgggtcagtgatgatatcgcggaaatcccaataataacttattctccgcaatctattgctaactttattgtcctgttcaccagtggtagtacaggtaaaccgaaagccattagtatttcagaatcattagtttgtcgacgaatttattcggtgacagagaaattaaaattcactcaagatgctaaaatatttatgtcaggtttgttgaataatacaacgggagtgattttttctttcggttcattattacatcaatcaacactttttataccggaagacagaaatgtagagagatggcctgattatctttctcgtaataaaatcactcatattatgttacgcccagagtcgatgaagttattcgttaaatcaaccgcagaacataatatcgatctctctgacttacaagttgttgcttatggtgccgcagcgatgccgcctagcgtactggagaaagggcgtcaattaattggctgtgaatggatgcagggatatgggttaagtgaaacttatggtcctttttgttgggtagatgagcaagatcatcgtgataaaagatatctcaattcaatttattgtgttggcaaaattgataatacattggcggtagcggttaaacctattataggctcatctgataatattggagaaattataataaggggtgaaagtattatggaaggatattatgatgtcctttctggagaaataacacctcctgatgagtggtttgccactggtgatctcggttatatagatgaagagggttatttagtcttaaaaggacgtaagcaaaatacttttatgagtgctaacggacatagaatttatcctgaagaagttgaatctattttatcccgaatacccaatgtgaatgtggctacggttgttggtttttctttccatgaaaatggtgttgctattgatcaaccggttgcctgcatgagtggcgagatatcgaagaaatcattacctgaaattgaagatattatttcatcatttttaagtcgtaaactcagtagagaaaaatggccggattggttctatgttactgatgaatactttccaaaaagccataatgataagatattgaaagcagagttaattaagtcaatcgatcctaaaaaactatttacattgaggaatcaataa

SEQ ID NO: 9617 - DNA, 1443 bp, Photorhabdus luminescens
atgaattatgtagaatcacattcaattatttgtaatgctcagatagaagatgtatatgaaattattattaattctgataaatggccaggaatgtttgaaccttgccaggaagtaaaaactctctttagggataaagaaggtgaaaaaatagaaattaaagccttaattaacggtatattaatgcagtgggaatcaaatcgtaaattttatccagaaacattcagtataaaatcaaaactgaatcccccaatgacattagttaaagaaatggaaacgtcatggcgcgtaattaaaatcaattctcagcaatgtgtactgttgttggagcatttatatgatcttgagtctgaagtagccgggttaattgatggtgttgaaacaatagagcaggcgcaccaatttattagtaaagctattgataccaattcagttaaagagctcaataatataaaaaatatcgtcgaatcaacggagggatcggaaaaagtattaacaggaacgattactcattcagtcgtatgtgaggtgccggcacagcaggtttatactttagttaaagatgtctcttgttggacaggtattttttcattctgtgatggtgcagaagttttaaagagatcaggtaatgaagaattagttgaaatcaaagcaaaacaaaataataaagcagtaagttggcaaacgcagcgatattattttgatactatttaccgggttgattatgttatgcctacaccgatgccattattaaaaacaatgaatggcagatggcaaattattcctattaatgatcaacgctgtattctaacggtacaaaggaactggggtttattagaagatgtcagtggtatcgttgatggtattgataatcatgaccaggctaattcctttattatctcatttatcaatgataatactcgaatggagatggatagtataaagagtcaggtagaaagtcataaaaaatcaaatttattaactttctcagcgggatattatattcctcatcaggttgatgatgtttataagatctttttaaatatcgatgactggagcaagatattaccgcattgtgattcagtaaaagtcatttataatgatgataaacatcaagaatttaatatggaagtatcaacaccaaatggaaatgagactttccgtagtatacgattctgtgatgtggataatttattgattgaatattttcaaccagagccgcctttagtattaaagtctcatagtggttcatggcagatattgagtaaagggagtggttcgtacattgtttctagccatgatgttgagttaaattatgaattatgtgcagttaaatttggtacggaagataaagaaaaacaacgagagatagtaaaaaatgctatttcagaaaatagtaaaaaaatggtttttgcttgcaaagagtggttagacactcgtatttag

SEQ ID NO: 9618 - DNA, 1155 bp, Photorhabdus luminescens
atgaataataaaaataaacccaatagaatttcgccagaacttcttgctacttgtggttattttatgccaagaatattcttcttaaattctcaatatgctccccaagttcattggggagatgttgttgcggcattgagtcattttccagcgggaaacttagacttatcctctgaagagttttggtatgaatggatgattaattggtcaaaagtgggtgatagctatattaatatcgctaactcggctaagagtgaagttagtcatgttcgtgctttgaggagtgccgctgcctgttatcattgggcagaatttatgtattttagtgataggagtagaaagatacagctcagagagtatattcgttcatgttttttatctagtataaaatatagtgatttgctggttgaccaccaatatattgtcgtcgataaatttcatatgccgttcttccttatattccctaaagggtataaagaagaagagaatcatcctttgccttgtgttattttatccaatggattggattcaatgactgaaattgaaatattatctttggccgagtttttcttagggaaaaatatggcggtagctatatttgatggaccagggcagggaataaatcttgggaaatcaccaatagctattgatatggaattatatgttagctctatagttaaattattagaagatgatgcccgaattaatagtaatcttctttgtttcttaggaattagttttggtggttattttgctctacgcgttgcgcaaagaattggcgataaattttgttgtatcgtcaatttatccggtgggcctgaaatagcagagtttgataagttgccaagaaggcttaaagaagatttccagtttgcatttatgcaagataatagtcatatgcagtctatttttgacgaaattaaattggacatctctttaccttgtaaaaccaaggtttttactgttcatggtgaattagatgatatatttcagatcgataaagtgaaaaaattagatcaactatggggtgataatcaccagttattatgttatgaatcagaggctcatgtttgcttaaataaaataaacgaatatatgatacaagtttcagattgggttagtgaacaattttggctaaatggctataaaaaaggttaa

SEQ ID NO: 9619 - DNA, 702 bp, Photorhabdus luminescens
atgtcaagaaccgaaagacttatcgtattattgcaatacttgagacagagaaggtaccctgtcagtggtaaattactcgctagtgatttaaatgtaagcttgcgcacactttatcgagatattgctttactaaacagtcagggggcaaatatagagggtgagccaggtttgggctatatattacggccgggcttcatgttacctcctttaatgtttacgatggatgaaattgatgccttagttttgggcaataaatgggttattgaacaaaatgatgttgttttggctaaatctgctcatagctttatatctaagattgccgcagtgttgcctgaagaacagcgtgatcagctatattattcgccaatgtttgtaaaaacagaaggttacagcaaagttacaaataataacttaatgttatctgatatcagaagggcgatataccataaatcaaaaatagtgataacttttattgatttaaataatacacatattgtgaagacgacctgcccactgtcgatctttttcaataatgaattctttttagtttcttggtgtgaattcagtcataattttcttaagttacaagtagggaaaatagagaaactggaagtattgtctgaaaaatatatccaagatagaatattattactaaaaaaatggagtgagaaagagggattgtctgataataatttatcctaa

SEQ ID NO: 9620 - DNA, 345 bp, Photorhabdus luminescens
atgagagaatctgaggaaaaagaaaaaggggaaatgcttgaaattaataatcattattttttcgtcattaatcttaccaatgaaaacttaatcggtgatgtgatttggagcagctctggaaatacgagcactctcaatgttgatgggttaaatccagcaaccgcttcacttatccaagaattctatccagaaagttggaaaaatgattattggcaatggacggcaaaagggaggagatatcaattaaattgttatgacaatgatatctatgtcgctgttgtaattagcgattttggcattagtgtattacccactggcaccagcccggatgcatggaaatggtag

SEQ ID NO: 9621 - DNA, 1104 bp, Photorhabdus luminescens
gtgatgaatgttttaataaatgaatataagaagaaaatggatagtgtaagattaggtgatcctgagagaaagggatttttttacgatgcaaagcaagcaatatggcattgctattcatatgatatctgctcttattttctgaactcggattatgtgactaaaaagaagttgagcattccgctggaaatattttctgcgtcagatcagagtagagttgccagattcattctttatcttaataattctctcatttttaatgatgataaatataatactgatgcagtaagttttatacgtggaaaatttaatgagatgaattttgaagtcatcgctaatgatcttttatctcctttaaaacagtgtgatcttttgactgcaaaacatctaaggggagtgaataacttattggctgcttctttagtggggttgaaagcttcggcgttcttttctgctcatgccctgaatgtcggtatgttctttgatggtagcatgagtgggagagcgcattttgtatcgattgcggaatcttttattgctatatatcagcaagttttacggcaaataaccatcaacggtggggcagaggatgtgatccatattgaaaaatttgtggctgatctatcggtaacatttattgccgctcatgaaacgacgatgcaattgatcattgccacatttctttatattaaaagccatgtaatcacggtgacggaaaataatattaaaagtattgttactgaaacttatcgtttatctagcccagttcttgcggtaaatagagtatttaaagagagattgatatataaaaatagctgtttcaataagggcgatcgagtcctgttttataccggattagccaatttcgatgccacggtttttgaccatccttaccaatttcagcttgatcgtgaaggctgcccactttcatttggtgtaggagtgaaaaagtgtattggtatgaatatcgccatacattttacctgccagttgataactaaaatactctcttgttatcaacttgatgatgttgaaattcatgaagtcactgttggctcgttagccatcggttgttcaaagtttacattgaaaatatcgaagaaataa

SEQ ID NO: 9622 - DNA, 2898 bp, Photorhabdus luminescens
atgaacaactttgaccccaaaatttaccaacacactcccactatcactgttcacgataaccgtgggctggatgtccgtgaaatccattatcaccgagctaccgcagaaaaaaatagtgatatccgtatcacccgtcatcagtatgatgttctcggacacctgcaccaaagtattgacccacgcctgtatgacgcctggcagaaagatagctcggtaaaacccaattttctctggcagtatgatttaacgggcagcgtcctacgtacagagagtgccgatgcgggtaatactgtcactcttcatgatattgaaaaccgtctggtcctgactgtaacggcaacgggtgtcaagcagacccggcaatatgaagataattctctgcctggtcgtctgctatccgtaaccgaacaagagccagacgaaagggcatcccatatcaccgaacgtctcatctgggctggaaacacgccggcagaaaaagagcaaaatcttgctggtcagtatgtacatcactacgatacagcaggagcgacccaactgaatcacctttccctaaccggagcggctttatcacaatcccgtcagctactggttgatggccaagaagcggattggttcggcgatgataaaaagatctgggataagaaattaagtaacgatgtatacaccaccgaaaacaagacggatgctaccggcactctgttgacacaaaccgatgccaaaggaaacatccagcatctggcctataatgtagccggacaattgaaaggaagctggctaacggtaaaaggccaaaaagagcagattatcattaaatccctaacctattcagccgcaggacaaaaactacgcgaagagcacggtaacggtatcatcaccgaatatacttacgagccggaaacccagcgactaatgggcatcacaacccgtcgttcaactgatagcaaggctttacaagacttacgttatgaatatgatccggttggcaacataatcagtctccgtaacgatgcagaagcgacccgcttctggcgcaatcagaaaatggtgccagagaatatctatacctacgattccctgtatcagcttataagcgcaacagggcgcgaaatggcgaatatcggccagcagaatcagaatctcccctctacagcactcccttccgataacaacacttataccaattacacccgcacttatgcctatgaccgtggtggcaacctgacccaaatccggcatagctcacccgcgagccaaaacaactacaccacagacataaccgtctcgaaccgcagcaaccgcgcggtactgagtaccttgaccactgacccgaccaaagtggatgcattgtttcaggcaggtggtcatcaggagacattactaccgggacaaaacctaaactggaatgcacgaggtgaactacaacagatgacaccggtaaaacgggataacctcactgaccgtgacagcgacatagagtggtatcgctatggcaacgacggaatgcggctgttaaaagtcagtgaacagcaaatgcagaatatcctccagcaacgacgagtcgtttacctgtcaggattagaactacgtacaacacaaaacggtgatatcacgaaggaagagttgcagattattaccgtgggtgaagcgggtcgtgcgcaagtgcgagttctacattgggaaagcggcaaaccggaaaacatcaacaataatcaggtacgttacagttatggcaatctcattggctccagccagcttgagctagatagtgatgggcaaattatcagtcaagaagagtactatccatttggcggtacagcgctctgggccgcaagaaaccagacagaagccagttacaaaacgatccggtattctggtaaagagcgggatgccaccggactgtattattacggctatcggtattatcagccgtgggtgggaagatggctaagtgctgatccagcaggaacgatagatgggctaaatttatatcggatggtcaggaataatcccatttcctatcacgataataacggattacatccaaatagtaataacaatggactagaacgaaatcatccactttactatctggatttagctggagtttattataatgtcaacgataaagaagcaattttatctacacttaaaagaagttttgcggcaacttcttggggaaacaaagtcagtgataaaacacaaacaatactttccgcctcagcagaatatggaaatttaaaacacaaaaaacaaatggaatataataacaaaaagttaaatgagacatctcctgatggtaaattcaaatatgcgaaaacaaaattacaagatcaagcggcacatgccgggatcgcatttaacctgcacccgatatccgataacgagaaagaaggatggacatttaattataaagatgaatttgttaacttaaaagataaagaaaaatccttaggaaaaggaaaattattccctggtgtcgaactcctgccggataatccagagcactataaagttcagaatgttagcgaatttatttctgggattgaatccgcctacaaaaataatggagtagagttacatccatttacatcatcattaattaaaaaacacattcttaaaaatgaagaggttttaccaatgatggcgggaatcgcgggtctacatgctgaagttcaggcaatgaattttagatttataaaaggtgatttggatagtaaggtagaaatcggctcaagaagtaaacggagttatgaaatagacatgcttgattcatatatttttactgagcgtcttacaactaaagaaaaagggaaagaattcactgcatgttttaattgtacaggtatattgcaatggccaacgagggttatgacaggaacgatgaggagacaataa

SEQ ID NO: 9623 - DNA, 1131 bp, Photorhabdus luminescens
ttgacctctcttgcttatgttgacgccctttgcgcgcttgatcatccttatcgggtcgatagcgtttgcgaccaattatttgatgctgccatgcgtgagttgacgctgtaccactgtgaaaatactcccggttattctcagtggttgaaggctaacggtctggaagtggaaagactggagaaactggacgattggtcgcgtttgccgcctattttcgctaattatttcaaacgccagttgttgctcagtaccacgggtaggaatgcattggaactgacctcttctgggacaaccggccaaaagagccgtatgcgttacgatgcacgtagtatgcgtgcagctcaaaatatggttgaacggattttcgagtattacggttggaatacgccgcagcagccttgtaattacttgctgctaagctatgagcctgccggtatggtgacgttgggaaccgcgtataccgatcaatatctgtgcaaatatgcaccggtaaaccaagcctgttatgcactgcgccacaatggaaaaagcaatgagtttgatccttttggtgtgatccgatccttacaagaatttgcggcacaagggctgccggtgcggatcttgggctttcctgcatttttgtggttcacgctggaacggatgcaggacatggggttgccgccggtgcagttgcatcctgaatcactggtctttttaggtggcggttggaaaacgcacgcggataaagctattccaaaatccttactgtatcagcgtttaggggaacaactgggtattcctgacgagcggtgccgggatggttacggttcggtggagcatccggtgccttatgttgaatgccgaaatcaccattttcatgtgccggtctatgcccgaacctatgttcgcgataccgctaacatggcggttcaaccctatggtaagccaggttttctgcatctggtatcaccttatatcacttccagcccggcacacagtattgtggtgagcgatttggcggtgctgcatcccgctgctgaatgtggttgtgagttagctaccgattggtttgagttactgggtcgtgccggtaccagtaaaagccgcagttgtgcgattgccgcttctgagttgataaaggagtcctga

SEQ ID NO: 9624 - DNA, 2406 bp, Photorhabdus luminescens
atgtatttagtgaatggtaaggttatctctgacttggagcccgctagcgtattggcggaactgaaaggtaatttggctgagacgctggcttgtcccccaagtgtacaacaggtattggcgtgtgctgagcgcttcgttgatgatctcgataatgttgctgttaagcttgcgctggataccgccgccctcactgcgttacgtcacttctgccatcgcgattctttagaggcaaagttgcggcacgaattgggagaacagcccttttctctgcgtcgctttgactatacacagccccgttttgaaacttggcaaccattgggattggtggtgcatattacgccggccaacgcgcctttactgccatttatggcggtgttagagagcttgctagtgggtaatgtcaactggttacgtcctagtagcagtgatcacggccttaatgcgcagatactggctgaattcctacgtcatgacctgagcggcacgttggcaccttatatctctgtgttgcctttgccgtctgatcaattatcagaattactggcgtgtgctgatgccgtatccgcctggggcagtaatagcgccctgaccgctatccgtagccaattgcggcccggttgccgttggatagattggggacatcgtatcagttttgcttattttgacccgatggctgccagtgatgctgattacgatgcattggctgatgatgtttgccgttttgaccaacaagcgtgttccagtccacagtgtttgttggtcgatagcgctgacgagaacgttttacgggaagtcgttagtgctgtggccgccgcattggcacgacgcgcgacaatatggcctgccttacagacagacatacaggaagcggcggaaatcagcagtcagatggcatttttgaagttggatcacacttttgctgaactccgcggttcggtagaagagggcaatggctggcgagtcgcctggatacagcgtcaagagcttgctccatcaccgttgtaccgtactttgcaagtccgtccggcaccacgtgcacaattggttgagattttgttgccgtggcgcccctatttgcaaagttgcgctctgatagtgaaagaaaaagagctgccgatgttgagtcgtcagttgttggccgccggtgttagccggatatgtcaggccggagttatgcatgatggctatgagggtgagccacatgatggtgtttacgcattgactcggctggcgcgacgcgtctccgtcagcttaaaacctgagcaactgccgggacatgtcgcattagataaagggtcagccaatccgccggaactggcagggattccagtgatggataaagcaaagtttcagaacggcggtgtgacggcaaaagcacaggtgttttttcgtagcggtggcagtagcggcgagccaaagttggcgggtttcagccatcgagattatcacagtcaaatgcaggccgcggcagatggtttgttcgctgctggtctggagccatcccaagaccgggtaatgaatttgttttatggcagtaacttgtatggcggtttgacgagtttcttcactgtgctggataaattatccgtgccgcattacccgatgggcggcccgatagacgatgattttagccaaatcaggcactttattgtcactcagggaatcaatacgctggcaggaatgtcaagcactatccaccgactgtttgaatgtgaagaggctgcgttgcgcgcctatggtgggatacgcaaaatttttactggcggtgagcatattggtgaagagcggtgtcggtttctgtccagttttggtgtacagataattcgctcggcgatttacggttccgtggatgccggtccgttaggtcatgcttgtgcttgttgccaagagggggagttccatctgttatctgatattcaatggttggaaatcttggctcttgatagtgatcagcctgttccgacaggggaaagcggtcgactggtgtttacccctctggcgcgggaagggcaggtggtccagcgttatgatataggcgacttaggttattggctgccagatctctgcgactgcgggttaccaacgccgcggtttaaactgggaggccgtcatggggtgttgacgcgggtaggttctatttttctgaacccaaccgaattatccgccgggttgccgtttccggtgcagtggttggtagggaacagctccagtggttgtgattatatccatatattagccgacggggatgctgagcaggtacgtatgcatctgttgcaacataggatgctgaaccaggttgtcagtggtggattgcttcaattggaagttatcccgacacctgttggacagttccatcgtcacccgcaaagtggcaaaacgccgctggtgctggatagccgattctga

SEQ ID NO: 9625 - DNA, 1272 bp, Photorhabdus luminescens
atgacactatcattacacgatctggttgaatacgcccgcaatcatgcacctttttttaaggatctttatcgtgatctgcctcgatccggttgggcgctaactgatctaccattgatcaatcctgatgactattggcagcaatcgcaatcgctggaaaactggccggtattaaccggtccggttaacggtggtcatgtttttaaaaccggtggctctaccagtgatggtcgattgtcggtattcagttgtagcgaatggcgtgctttcgtgcgcgcatttggtcaagggcttgcacagcaattacagcccggtgatcgcgttgctaatctgtttgtggctggtgatttgtataccagtttattgtttattcacggtgcgttgtcctattcaccagtgccggtagtggagtatccgtttacttggtcagttgatgatcgggcactggccgatgcgattgtcagcttgaggattaatgttttggccggcgtgacggcgcagctattacgttttgccagtaccttgcagcagtggggccagtctattcccggcattgatcgtctgttgtacggcggtgaaagcctgtttccagagcaattgacactcttgagtcaggtatttcctaatgcgcgtattggttcagttggttgtgccagcgttgatgcgggcctcattggggcggcgtctcccgattgctgttacggcgaacatcgggtttttgatacggataccattgttgaaattattgacgaatccaatggtcagccgattacggtgcccggccaaaatggcctgttggttgtgaccaatctgcagcgacgcttgatgccagttatccgctatcctaccggtgacatggcctgttggtgtgaagagtcagggcagccgagtcgcaaattcgctttgcaggggcgagcgggcagcgctcaccgagtgcgagttttctcgctgtccatttttcctgaccatattgcgcgtttactgcaacagcaagagggcatactggcttggcagttattgctgagccgtcagggtggcatggataagatagaactcttgttagcgggcgattcatcactggcgtcatcgacaacatcagtgcatcagacattgttggcggcacaacccgcgatggcaaagttatgtgatcagggatttttgcatgtggaagtcacttactgcgctttggaaaatatggtcactcatccacgctccggtaaattaatgcgggtggttgatcatcgtggttatggtgctgaagagaaggcagcatga

SEQ ID NO: 9626 - DNA, 924 bp, Photorhabdus luminescens
atgagcatgaatctaggaataccattagttcgattattccgggaagaggattctaccggtattagtgcgttatttcgggttgtttacggcgaagattatgtctacccggaagtctatttacctaccatgcttggccgttataacgcggcaaaacagtggtattccgctgttgcggtacaggatggacacgtgttggggcatgccgcactgtggcgggatgaacactgctcattaagcgctgaactggcgttgatcgcagtacatccacaggcacgtgggcagggtattgctaccgcgcttggacgatacttgtgtgatcaggctaagaaaatggggttaagtatcctcacaattaagcaagtgtcgtcgcataaccatagtcagcgtctggcccaaaatctggggtttcacaccacgggattgctgccggactatgtaacatcaccgtttgatcaggcacgcccggaaagcatagtactgggttgtttacctttacaaagctggccgtttccagaggtacattggccttccggttggcaactgtggttgacatcggtgactcaagtgtttggtcaagagcctctgcaaccggaggagttggttgatgcagatatccgtataaccaatcatggacgtcggttggaagtgtggatagaaaagcagacaaccgagcgggtaaaagaggtggcagagttaccggcacacaaactgatatatgtgagactgccggtaggggaagggacgcttcaggcaatggaaattttgcagcaggcgggatttgcctgtacagggtttgtgcccggtcatcatcaccattgggaagctttactggttcgaggacatagtaggaaagagttgaccttagattgtcagtttgctcgtcgtttgcaccaacaaagcatgtttgcttgtgcaggagcatag

SEQ ID NO: 9627 - DNA, 1662 bp, Photorhabdus luminescens
atggcaatagggtatttcctgctcgttggtgataaaacaacctgtggtggtcagattattactggtgaccacaccatgacatttaatgggcgagcaaccgctcgtgaaggggataaggttacctgtggcaaacatcccggtacttacgtgattgttggtggtgtatccgatgtgtttgacatggggcgcaagttggctggcacgttggatagtgtcagtacttgtccctgtcgggctcggtttatcaattcggagatggacagttatgagaagcaagataagactgctgaccgggttgccgctcccacgaatatggcgcaacagcatttctcttctccggtaaaggatgtgggaagcccgcctgcaacgcaggtacctccgccgccgataccggtgtttacgaagtcctgccagcggggtaaagggtgtactgacgctggaactgagcctgaatcggcaaataactttggcagaatggcgatatatcaggtgccgtcatctcctgcgccagccacggcgcaaaagcctgaaccacccccgcaggacaagaaacacccgccggaaccgggtaagccgcgggataaaaaattaccgtggtataagcggtggtttcgtagtggaaaagataatgccgaagcggcggctaccgctgtggccgccactacccgcagcgcggtagcggaaggggaaacgctggtgatgcgttacattggtggcggtgctatcagtgctggacgttggctggcggcaccgaatccggtaacggttgggttgatggggctgttttattcaccgtcgttgaatcagggggaagaggattacttagatccgtatcgcctgagacagatagcggaacagtatggaaaagcaccaactcgtgtacgttttcgctggatcagagatgaaaaaagcggcaggatgacggttcagggatatcacgtcagcccggaaagcggcttggataaagtgccggtttgcatgatgacgctcaatcggaccaccggtaattacgagttctgggaaccgggagaaacccggccgacgattttatggacgccgaatgaacaggaattcaaggctccagcccataccgggaatgaagaacagccgtttattccgtcgcaaataaccgtgttgccgatcccggataaagtgggcagcgatattgaatcgttgccaatgccggaagagaaggatttccgcgattatattctggtattccccattccgaatatgccgccggtgtatgtgtatctgagtaaaccgccggtgaaattgtttgaagtggatttatatagaaactttgctgggcggctgaggaatggaacacacgcggatcatatgccttcggcagcggctgttcgagcgaaattaaaaatgttatatcccgatttggagatggatgagttaagtcttattgaaaaaaatgttgcagcaatcattatcccggcaaaggttcaccagaagttcagtgcaacttatggcggccggaattctcagacgcaaatagaacaggattctaaagacttaagagcagctgtggagcgtgatttcagtacgatagagccagaattgagaaattacggggcaacaaaagcacaacttgaaaacgccagagccaaaatacacaggcttaaccaagaacaggggttatacaaatga

SEQ ID NO: 9628 - DNA, 459 bp, Photorhabdus luminescens
atgacagtcaacatagatgcactcataaatagcttaggaaaatcttatcaggaaatttttgatgacgggctaattccttataaaagtaaaccaagcggtccccttggggtacttagtattggcattgatatggtgaaagaggggatttttttatcgtttgaacggagtagtaaaatattaaacgaaattactttaaggttgcttagggacgataaagcttcatttatattcccaaatgaattgccatcaccattgaagcactctatggatagggtatgggttaaagaaaatttaggtgatccgattaagtcaataccaccaaggcaaattttaagaaaccaatttggttggaaagatttatatcgtttcacagacgaaatcagtatgcagatttcttatgacatgatggaacgagtaaaatcggtaacgtttttacctacctcagaagttcgttggtaa

SEQ ID NO: 9629 - DNA, 468 bp, Photorhabdus luminescens
atgactatcaacgttgaagcgttaattaatagcttgggggaaacctatcaggaaatcttcgatgaagggctaattccttataaaaccaagccaacaggttcttctggtgatgaggtgatatttttggatatggtaaaagaaggggtgtttctagctttttatcgggatggtaagcgtttaaaagagattacgttgactttgcttgatgaaaagaaacctctatatcagtttcctaataagcttccctctcctttggtgcctctgatgtctcgacagtgggtccatgagcagtttggtgaacctaagaaatcacagcaaccccaaatggttatgaaacgtcagtttggatggaaagagttatacacattgcttgatttccacattcctacaagtatgaagatttcttatgacatgatggaacgagtaaaatcggtaacgtttttacttacctcagaagtacgttggtaa

SEQ ID NO: 9630 - DNA, 468 bp, Photorhabdus luminescens
atgactatcaacgttgaagcgttaattaatagcttggggaaaacctatcaggaaatttttgatgaaggattaattccttataaaaccaaaccaacaggataccctggagctccagatattactttaagtatggctaaagagggtattcatttagcgtttaaaagagatggtaagattttatttgctgtagagctttttctgcttgatcagaagagaccttcataccaattccctaatgaattaccttctcctttggagcctttgatgatcaggaaatgggttcacgagcagtttggtgagccagaaaaggctcttccgccgcgaaaatttctaaagaaggatgttggttggacggaactgtatacgctactggattttcggataccaaccagtatgcaggttgattatgacctgtttgagcgtgttgattctgtaatgtttttacctacctcagaagtgcgttggtaa

SEQ ID NO: 9631 - DNA, 462 bp, Photorhabdus luminescens
atggtgatcaacgttgaagcgttaattaatagcttggggaaaacctatcaggaaatttttgatgaagggctaattccttataaaaccaagccatctggttatcccggagactctgatatatctcttgatatggctaaagaagggactttcttatcatttgatcgagaaactaagacattcatagagatgactttaactttacttatacctgagcgtcccagttttgtttttccgaacaacatgccatatcccttaattaaggaaatgaaccgccaatgggtagataagaatttaggtaaaccaattaaatcagcacctccatttgaagcattgacatatagatttggttggacatatctttattactatcagggtaagtcggaaattagtatgcaagtatcgcacgatgttctagatcgagtcagtcgagttacatttctacctacaagtgaagtgcgttga

SEQ ID NO: 9632 - DNA, 468 bp, Photorhabdus luminescens
atgatagatgttattgaaattattaatagtttggggaagaccgcagatatgttagttgaaaataaacttattccagaggaaaagtttgagtttgctttcgaaggttattctagatttagtgttgaaccagagacgggtcttactttagttttcgatattatatcaacagtgttgatttctgttcaattcacattaatcaacactgttgatgatactggtacatatagtggtgatatgcctgctccattccttcacaaaatgaataaagctattgtcagagcatttatgggagaacccgattacagtagtggaccggagagaattccggtaattggcttagtaggcggatttgatgcctatactcgtaaactaaatgatcagtacccaaatacagaaattcgcttcctttatcaaactgatcttcgtgtggatgcactgttatttgaacagtcggtaaataatgattga

SEQ ID NO: 9633 - DNA, 468 bp, Photorhabdus luminescens
atgacagtcaacgtagatgcactaataaatagtctaggaaagtcttatcaggaaatttttgatgaagggctaatcccttataaaaccaaaccaacaggataccctggagcttcatttattgctctgaatatggctaaagagggtatgcatttagcttttaaaagagatggtaagattttatttgctgtagagctttttctgcttgatcagaaaagacctttataccaattccctaatgaattgccttctcccttgaagcctttgatgactagggtatgggttcatgagcagtttggtaagccagaaaaggctcttccgccgagaaaatttctcaagaaagatgttggttggacggaactgtatacgctactggattttcggataccaaccagtatgcaggttgattacgatctgttggaacaagtgaagtcagttgcattcttatccacatcagaagtactttggtaa

SEQ ID NO: 9634 - DNA, 468 bp, Photorhabdus luminescens
atggctatcaacattgaagctttaattaatagtttaggcaaaacttatcaggaaatcttcgatgaaggattaattccttataaaactaagccatcaggttatcccggagactctgatatatctcttgatatggctaaagaagggattttcttatcatttttgcgagaaaataaagtacttacagagataacgttaactttcattaatcacaaacgacctaattttatatttcctaataaattgccttcccctttgataccgctgatgtcccggaaattaattcatcagcattttggtaaacctgaaaaatcacttccaccaaggaaaaggttaactaaagaaattggctggactgaattatataccttattggatttccgtattccaactagcatgcaggttgattacgatttgcaggaacgagtcagactagtgacttttttacctacctcagaaatccgttggtaa

SEQ ID NO: 9635 - DNA, 2901 bp, Photorhabdus luminescens
atgaatcaactcgccagtcccctgatttcccgcaccgaagagatccacaacctgcccggtaagttgaccgatcttggttatacctcagtgtttgatgtggtacgtatgccgcgtgagcgctttattcgtgagcatcgtgctgatctgggacgcagtgctgaaaaaatgtatgacctggcggtgggctatgctcatcaggtgttacaccattttcgccgtaattctcttagtgaagcggttcagtttagcttaagaagtccattctctgtgtcaggtcccgattacgccaatcagtttcttgatgcaaacactggctggaaagataaagcacctagtgggtcaccagaagcgaatgatgctccggtagcttatctgactcatatttatcaattggcccttgatcaggaaaagagtggtgctagtgccattatgaatacgctggtggagcgccgacccgatatcggggctttgttgattaatgataaagcgatcaatgaggtgataccgcaattacaattggtcaatgaaattctgtccaaagccattcagaagaaactgagtttgactgatttggaagcggtaaacgccaaactctccaccacccgttacccgaataatttgccatatcattatggtcaccagcagattcagacggctcagtcggtattaggtaccacgttacaagatatcactttgccacagacgttggatctgccgcaaaacttctgggcaacagcaaaaggaaaactgagtgatgcgactgccggtgctttgactcgcctgcaaatcatggcgagtcagctttcgccagagcagcagaaaatcatggtggaaaccgtcggtcagaatttctatcagctaaattatggtgacagtttgctgacggcgaacagtttcagcgacatgaccgtactgactgatagaacaagtttgactgtacctcaggtagagctgatgttgtgttcaacggttggcggttctacggtggttaagtctgataatgtcagttctggtgacacgacagcgacgccatttgcttacggtgcccgctttattcatgccggtaagccgcaggcgattactctgagtcgcagtggagcggaggcgcattttgctctgacggttaacaatctgaccgatgacaagttggaccgtattaaccgcacagtacgtctgcaaaaatggctgaatctgccctatgaggatattgacctgttggtgacttctgctatggatgcggaaacgggaaataccgcgttgtcgatgaacgacaatacgttgcgtatgttgggggtgttcaaacattatcaggcgaagtacggtgttaccgctaaacaatttgctggttggctgcgcgtggtaaccccgtttgccattacacccgcaacaccattcttagatcaggtgtttaactctgttggcacctttgatacaccgtttgtgatagataatcaggattttgtctatacattgaccaccgggggagatggggcgcgtgttaagcatatcagcacggcactgggccttaatcatcgtcagttcctgttattggcggataatattgcccgtcaacaggggaatatcacacaaagcacactcaactgtaatctgtttgtggtgtcagctttctaccgtttggctaatttggcgcgcacattggggacaaacccagagtctttctgtgctttggttgatcgattagatgcaggtacaggcatcgtctggcagcaattggcaggaaaacccatcatcatggtaccgcaaaaagattctccgctggcggcggatattttgagtttgctgcaagcgctaagtgtgatcgctcaatggcaacaacagcgcgatttacccattgaaaccttacttttactgttgagtagcggttctaccttcaccgctcaaggcactgacgatcaattgaattttatccgtcaggtgtggcagaacttgggcagtacatttgtgagtgcaacattattatcccgtagtggtgcaccattagttgataccaacggtcacgctattgactggtttgctctgctctcggcaggtaatagcccgcttatcgatcaggttggtctggtgaccgatgcaggtatagaaagtgttataacaatggtggtcaaaacacaaagcttatctgatgaagataagaagctggcaatcactactctgacgaatacgttgtatcaagcgcagcaaactcagcaaggcgtggctgtcagtctgttggcgcaaactctgaacgtgagtcagtcactgcctgcgttgttgttgcgctggagtgggcaaacaacctatcagtggctgagtgcgacttgggcattgaaggatactgttaaaatcgcggctgatattcccgctggctatctgagcctattgcgtgaagtggtacgccgctccttgttgacccaacaattcacgctaagtcctgcaatggtacaaactttgctggactatccagcctattttggcgcttccgcagaagtagtgaccgatatcagtttgtggatgctctataccttaagccgttacagcgatctactgctccaagtgggtaaagccggtggtggtacggaagatgatgtgttggcctacctgcgcgtggctaatgctgctacgccgttgagtcaggcggatgctgcacaaacgttggcaacgctactgggttgggagacaaacgagttgcaagccgcttgggaagtattgggcgggattgccaaaaccactccgcaactggatacgctgctgcgtctgcaacaggcacagagccagactggccttggcgttacacagcaacagcaaggctatgtcctgagccgtgatagtgattataccctttggcaaagcaccggtcaggcgatggtggctggcgtatctcatgttaagggtagtcactga

SEQ ID NO: 9636 - DNA, 4695 bp, Photorhabdus luminescens
atgttatcgacaatggaaaagcaactgaatgaatcccagcgtgatgcgttggtgactggctatatgaattttgtggcctcgacactgaaaggtgtcgatggtcagccagtgacggtggaagacttgtacgaatacttgttgattgacccggaagtggctgatgaagttgagaccagccgagttgctcaagcgattgccagcatacagcaatatatgactcgtctggtcaatggttccgaaccggggcgtcaggcgatggagctttctaccgctaacgaatggcgtgacaatgatagccaatatgctatctgggctgcgggggctgaggttcgaaattacgctgaaaactacatttcccccatcacccggcaggaaaaaagccattatttctcggagctggagaccacgttaaaccagaaccggctcgatccggaccgggtgcaggatgctgttctgggatacctcaatgagtttgaggcggtgagtaatctgtatgtgctcagcggttatattaatcaggataaatttgatcaggccatttactattttattggtcgtaccaccaccaaaccatatcggtattactggcgtcagatggatttgagtaaaaatcgtcaagatccagcagggaatccggtgacgccaaattgctggaatgattggcaggaaattaccttgccgttgtctggtgatacggtgctggagcatacagttcgcccagtattttataatgaccggctgtatgtcgcttgggttgaacgtgacccggcagtacagaaggatgctgacggtaaaaatatcggaaaaacccatgcctacagcataaaatttggctataaacgttatgatgatacctggacggcaccgaataccaccacgctgatgacgcagcaagcagatgaaagttcagaaacacagcgatccagcctgctgattgatgaatcgaagactacactgcggaaggttaatttactggctaccactgattttagtattgacccgacggaggaaacggacagtaacccgtatggccgtttgatgttgggggtatttgtgcgtaattttacggggactccacatcaaaaccgtcctgctgtgtatggttacttgtattgtgactcagccttcaatcaccatattctcaggccattgagtaaggattttttgttcagtacctatcgtgatgaaacaaatgatcagaactgcttgcaattcgcggtatacgataaaaagtatgtgattactaaggttatttcaggcaagccaaccgaagatcccgaaaataccggttgggtaggtaaagttgatgatttgaaactgggtactaccggggcctatgtatatatcgaccaagatggcctgacactccatatccaaaccacgactaatggggattttgttaatcgtcatatatttggatataacgatattgtatatgattctaagtctggttatggtttcacgtggtcagggaatgaaggtttttatctggattaccatgatggcaattattacacctttcataatgcagcgatcaactactatccggctggatatggtggtggatctgttcctaatggaacgtgggcgttggaacagcgagttaatgagggatgggctatttcccccttgcttgatgctcaccatactattactgtgcagggcagttatatcgcttgggagggggagacacctgccagttattatttacctatcccagacggtacaatgttgctagattggtctgataaaataaattttgctattagtcttaataagcttgaatctgtatttacgtctccagattggccaacattaaccactatcaaaaacttcagtaagatcgccgataaccgcaaattctatcaggaaatcaatgctgagacggcggatgggcgcaatctatttaaacactacagtgagcaaactttccaacttgccagtggtgcaacctatcctacgacttatactttgtccgaagcggatttctctactgatccggataaaaactacctacaggtttgtttgaacgttgtttgggatcattatgaccgaccatcagggagaaaaggggcctattcctgggtcagcaagtggtttaacgtgtatgttgagttgcaagatagcaaagctccggatgccattcctcgattgatttcccgttacgatagcaagcgtggtctggtgcaatatttagacttctggacctcatcattacctgcgaaaactcgtcttaacaccacctttgtgcgtactttgattgagaaggctaatctgggattggatagtttgctggattacaccttgcaggcagatccttctctggaggccgatctggtcactgacggcaaaagtgagccgatggactttgatggttcaaacggtctctatttctgggagttattctttcacttgccgtttttagttgctacacgctttgccaacgaacagcaattttcgccggcacaaaagagtttgcattacatctttgatccggcgatgaaaaacaagccacacaatgctccggcttactggaatgtacgtccgttggttgaagtacacagcgatctatcacgtcacttgggagatcctatcgatccggatactcaggcttatgctcatccggtgatataccagaaagcagtgtttatcgcttatgtcagcaacttgattgctcagggagatatgtggtatcgccaattgactcgtgatggtttgactcaggcccgtgtctattacaatttggccgctgagttgctagggcctcggccggatgtatcgttgagcagcacctggacaccgcaaaccctggataccttggccgccgggcaaaaaacggctttgcgtgactttgagcaccaattggctaacagtaatactgtcttacccgcattaccgggcaataacattagccacttgaaactggcagataatggctactttaacgaaccgctcaatgttctgatgttgtcccactgggatacgttggatgcacggttatacaacctgcgtcataacctgaccgttgatggcaagccgctttctctgccgttgtatgctgcgccggctgatccggtagcattgttggctcagcgcgctcagtccggcacgttggcgaatggcgtcagtggtgccatattgacggtaccgccataccgtttcagcgctatgttgccgcgagcttacagcgctgtgggtacgctgaccagttttggtcagaacctgcttagcttgttggaacgtagcgaacgggccggtcaagaagagctggcgcaacagcaactgttggatatgtccagctatgccatcacattgcaacaacaggcgttggatggattggcggcggatcgtctggcgctgttggctagtcaggcgacggcgcaacagcgtcatgaccattattacacgctgtatcaaaataacatctccagtgcggaacaactggtgatggacacccaaacgtcagcacaatccctgatatcttcctccaccggtgtacagactgccagtggcgcactgaaagtgatcccgaatatctttggtttggctgatggtggctcacgctatgaaggggtaacggaagcgattgccattgggttaatggctgccggacaagccaccagcgtggtggccgagcgtttggcaaccacggagaattaccgccgtcgccgtgaagagtggcaaatccaataccagcaggcacagtctgaggtcgacgcattacagaaacagttggatgcgctggcggtgcgcgaaaaagcggctcagacttccctgcaacaggcgaaggcacagcaggtgcaaattcgaaccatgctgacttacctaacgactcgtttcacccaagcgactttatatcagtggctgagtggtcaattatccgcgttgtactatcaagcgtacgacgctgtggtctctctgtgtttgtccgcccaagcttgctggcagtatgaattgggtgattacgccaccacgtttattcagaccggtacttggaatgaccattaccgtggtttgcaagtgggagaaactctgcaactcaatttgctccaaatggaagcggcatatttagttcgtcatgagcgccgtcttaatgtgatccgtactgtgtcgctcaaaagcctattgggtgatgatggctttggtaagttaaaaactgagggcaaagttgactttccattaagcgaaaagctgtttgacaacgactatccggggcattatttgcgccagattaaaaccgtgtcagtgacactgccgacgttgatcgggccgtatcaaaacgtgaaggcaacgctcacccagaccagcagtagtacgctgctcacagcagatatcaatggtgttaaacgtctcaatgatccgacaggtaaagagggggatgcgacgcatattgtcaccaatctgcgggccagccagcaggtggcgctctcttctggcattaatgatgccggtagctttgagctgcgtttggaagatgagcgctatctatcgtttgagggcacgggtgcggtctccaaatggacgcttaccttcccgcgttcggtggatgagcatattgacgataaaacattgaaggcggatgagatgcaggccgcactgttggcgaatatggatgatgtactggtgcaggtgcattataccgcctgcgacggcggtgccagcttcgcaaaccaagtcaagaagacactcttttaa

SEQ ID NO: 9637 - DNA, 3132 bp, Photorhabdus luminescens
atgagtacgcctgatactgctctttatactcaaaccccaacagtcagcgtgttagataatcgtggcctgtccattcgtgatatcggttttcaccgtgttgtgattggcggggatattgacacccgcgtcacccgtcaccagtatgatgcccgtggatacctgaaccacagtattgacccacgcttgtatgatgcaaagcaggctgataactcagtaaaacctaattttgtctggcagtatgatctggccggtcatgccttgcggacagagagtgtcgatgctggtcgtactgttgcattaaatgatattgaaggtcgtccggtaatgacgatgaatgcgacaggtgttcgtcagactcgtcgctatgaaggtaataccttgcccggtcgtttgttatctgtgagtgaacaagtttttgatcaggaaacttctcaagtgacagagcgctttatctgggcggagaacaccacagcagagaaagaatataacctctctggtctgtgtatacgccactacgacacggcgggcgttacccggttgatgagtcagtcactggcgggtgctattttatcccaatctcaccaatggctggcagaagggcaggaggctaactggagcggtgacgacgaaactgtctggcagcggatgctggcaagtgaggtctatacaacacaaagtacaaccaatgccatcggggctttactgacccaaaccgatgcgaaaggcaatattcagcgtctggcttatgacattgccggtcagttaaaagggagttggttgacggtgaaaggccagcgtgaacaggtgattgttaagtctctgagctggtcagccgcaggtcataagctgcgtgaagagcatggtaacggcgtgattaccgagtacagttatgaaccggaaactcaacgtttgatgggtatcactacccggcgagccgaagagagtcaatcagaggcgagagtattacaggatctccgctatgagtatgatccggtggggaatgtcatcagtatccataatgatgctgaagccacccgcttttggcgcaatcagaaagtggagcctgagaaccgctatgtttatgattcgctgtatcagcttatgagtgcgacagggcgtgaaatggctaatatcggccagcaaagcaaccaacttccctcacctgctatgcctgttcctgccgacaacagcacctataccaattaccagcgtacttatagttatgaccgtggcggtaatttggttcaaatccgacacagttcacccgcgactcaaaatagttacaccacggagatgaccgtttcaagccgcagtaaccggacggtattgagtacattaacgacagatccaacccaagtggatgggctatttgatgccggcggtcatcagaagacgttaataccggggcagaatctggattggaatatgcggggtgaattgcagcgagtaacaccggtgagccgcgaaaatagcagtgacagtgaatggtatcgttatagcagtgatggcgtgcggctgctaaaagtgagtgaacagcagacgggcaacagtactcaagtacaacgggtgacttatctgccgggattagagctgcgcataactggagtggcagataaaacaactcaaaatttgcaggtgattacggtaggtgaggcggggcgcgcacaggtaagggtattgcactgggaaagtggtaagccggcagatatcgacaacaatcaggtgcgctacagttacgataatctgctcggctccagccagattgaattggatagcgaagggcagattcttagtcaggaagagtattatccgtatggcggcaccgcggtatgggcagcgaaaaatcagacagaagccagctacaaatttattcgttattccggtaaagagcgggatgccaccggattgtattattacggctaccgttattatcagccttgggtgggccgctggttgagtgctgatccggcgggaaccgtggatgggttgaatgtgtaccggatggtgaggaataaccccatcacattgactgaccatgacggattagcgccgtctccgaaccgaaatcggaatacattttggtttgcttcatttttgtttcgtaaacctgatgagggaatgtctgcgtcaatgagacggggacaaaaaattggcagagccattgctggcgggcttgcgattggcggtcttgcggctgccattgctggtacggctggcgcggctctccctgtcattctgggggttgcggccgtaggtgcagggattggtgcgttgatggggtataacgtcggtagcttgctggaaaaaggtggggcattactcgctcgactcgtacaggggaaatcgacgttagtacagtcagcggcgggcgctgctgctggggcgagttcagccgcggcttatggtgcgcgagcacaaggtgtaggtgttgcatcagccgccggggcggtaacgggcgcggtgggatcatggataaataatgctgaccgggggattggtggcgctattggggccgggagtgcggtaggcaccattgataccatgttggggacttcctccacccttacacatgaagtagccgccgccgcggggggagcggctggtgggatgatcaccggtacacaggggagtaccagagccgggattcatgccggtattggcacctattatggctcctggattggttttggtttagatgtcgccagtaaccctgccggacatttagcgaattacgcggtgggttatgccgcgggtttgggggcggaaatggcgatcaacagagtaataggtggcggattcttggggaggttattaggccgggctgtcagcccatatgccgccggtttagccagacaattagtgcatttcagtatagccagacctgtctttgagccgatatttagtgttctcggcgggcttgccggtggcattggaactggtctgcacagagtgatgggaagagacagttgggtttccagagggctaagtgctgctggtagtggtatagatcatcttgctggcatgattggtaatcagatcagaggcagggttctgaccacaaccgggatcgccaatgcgatagattatggaaccagtgcgataggtgccgcacgacgggttatttctttgtaa

SEQ ID NO: 9638 - DNA, 156 bp, Photorhabdus luminescens
ttaatcaataaaaacatcggcacccaaatgacaatatcatttaaaggtactcatcttgtcacagcgactattcaaacttctttaaatccttcattcagaatgggggtaaaagataaagagcaagccatgagtattatgagcgcactaaaaaattaa

SEQ ID NO: 9639 - DNA, 303 bp, Photorhabdus luminescens; identical to SEQ ID NO: 8820

SEQ ID NO: 9640 - DNA, 336 bp, Photorhabdus luminescens; identical to SEQ ID NO: 7802

SEQ ID NO: 9641 - DNA, 1506 bp, Photorhabdus luminescens
atgacgctcaatgacttaatcgcgctggatgaccccggccagttccgcctgcgggcactggcgctgcttcagcaacaaggtgattatattcgccagctggaagaggccctgaaacaggcgcaacgctggcgttttggcgcgcacagcgaaaccctgcctgccggtcccaaacgcagtcagtttgaggaagatgccgataccgatatcgcggtgctggaaacccggctgtcacgcctgcatatcaaggaaaacgcgaccccggcccagcctaaacgtcagcctttgccggcgactttaccccgtgaagatatccggctggcgccggagacggagagctgcccggattgcggtcatgccctgcgctttttgcgtgatgaaatcagtgagcgactggaataccgtccggccacgtttatcgtccggcgctatatcagcccgcagtacagctgcgcgcgctgtcagtgtgtgcatgctaaagcccagcccgcccatcttattgaaaagggccttccagagccggggttgctggctcaggtggtggtcgctaaatatcgtgaccacctgccgctctaccgtcagcagcaaatctatgcccgcagcggtgtcaccctggcccgcagcaccctgtcggactgggtggggcaggtggcggtggcgttgcaaccgttagccgatgccctgaagcagacgctgctgacgtccccggtgctgcatgccgatgagaccccgttgccgatactggccccgggaaaaggccatacccagcgagcttacctgtggacgtctgtcaccggccccgatacctcgccggcagtggtatactatgagctgcatcccggccgcagcggccgttatgcccagagcctgctgaaagactggtcgggcggcacgttggtgacggatgactatgccggttacaacgcactgcatgcccgggcggatatcaccgaagcgggttgctgggctcacgcccgccgcaaattctttgaccaatacaaagcgagccaaagtccggtggcgaaacaggcgctggatggcattcgtgacctgtacaagctggagcgaaaaatcaaacaccggccgccggataaacggcgtcagtggcggcagcgttatgcccggccgtggctgaatgagttccggtcctggttgcaaacgatgcagacccaaacggcccccaactcggggttacgcaaagcgatagattacacgctgaagcgctggtcggcgctggtgtgttatctggatgacgggggggtgccgatagacaacaaccgggcggagaatgcggtccggggtgtggcgctcggccgaaagaactggctttttgcgggttcactggccgcggggcaacgggcggccatgataatgagcctgctggaaacggccaaagccaacggacatgagccctgggtctggttacgtgatgtcctcagccggctgcctgtctggccgaacaatcggttgaatgagctgttgccctggcctgagaatcccttccgttaa

SEQ ID NO: 9642 - DNA, 267 bp, Photorhabdus luminescens
atgaaaaatttgtttgttattatgttacttctctccgtaataaccgggtgctccggtaaaaataacccaaacagacaaacacaagcagaagagggattgaaatttgcattttcatccggcggcaattttatcttaactcacgcttgtaccgataaaatcgattatttagggccagacgaaggggggaatgaccagatagaaatagcgataaaaaacgataaacaatgctttgctcactttgatgctttaatcgtaatgttccggtga

SEQ ID NO: 9643 - DNA, 1104 bp, Photorhabdus luminescens
atgagtactaaagttacacctatcccatcatttggtcgtgatatggctatcaacgagtcaactgttctgattgatcaggagcacatcaacacgctaatagaaaagatcgatatttcgcaacctgcggcggtgatcggctatggtgctcagcctatgggagggattgcccgttttgctgatacgttattggagaatgtaaaaaccaaagaagctgatgaggtaggccaaaaactctcggatttggtcatgtttattcgtgagcatgatgcgctgtccccagaagagaaaagtagtcgctttctgagaaaattaccgttgatcggcgggatttttaagaaagttgaacgcactatgattgatcaaaagacgctaacacaacaggtcgataccattgccactcatttggatagtgcaatgcttaatttgctgcgtgatatcacggtgttagatcaactctacgatcgcaatctaggtttttataaagaaatatcgctctatgttgaagcgggcaaacagaagttgcggcagattaaaacggtggagttgccctcattgcagagaaaggctgagacgtctcaagatatgatggatgcgcagagtgttaaagatctgctggagaatattaatcgttttgaacgccgtcttcacgatttggaactgtcaaagaccattgctatacagactgccccacagatccggattgtacaaaataataaccagcaactggcggaaaagatccaaagtagcatcctttctacattaccaatctggaaaagtcagatggtactcaatctgtcactgaaagctcagagtcgagcggctaaattgcaaaaagaggtggccgatacgaccaacgaattattacgcaaaaatgctgaaatcctgcaacagagcagcattgcaacggctactgaagtggaacgctctatcgttgacattgaaaccttgcgcgatgtgcagagccgtttagtcaatacgattgaggatacaatgcgcattgcgtcagaagcgcgcattaagcggactgaaattgagaaagagctctcctcaatggaaggtaatttacgtcagcgtttaactgcggcggctaatgcacaatattag

SEQ ID NO: 9644 - DNA, 1050 bp, Photorhabdus luminescens
atgcctacacctcaatcatcgtctgaccgtgatgcggcacaacagcaggaacagggagtaatatctctgttcggtagcatcaagcggtctctatcacgtgtactgtttcatatcaaaatctttgtcctcgcttttatactggcttgtgttgttctgtatactccttggtcttttttggtcttgcctgcgggtgatggtcatatttccagcatagtggtgttatcagtctatatcggattattggctctctatccgtcacgtccacataggcccgcgactttggccggttggttggtggtggtgttgagcccgctggcggagctgtgggctgccgcactattgtttggcgggctggcggctttgctcatcacgattatcagacaacgtaaactagaggtaagcaggttcccattattactgatgacagcgagtactattgtcgcgttgtttagaattgatgcccatgcgattcctgtttggtttggtgtcgtattttttgtcgtcgtgctggtaacggtgttgattgagccttggaataattttcgacggcagaaagcgctgcaacagcaacaacagcttgttgctcgtcaacaggcagaggagcagcgtcggcaagatgagacacaggcagagtttgctgaatactatgaacaattggctcagatcaaacgttataagtctggtatggcgtatgagatgcaggaattggttaacctgattgaggagaaaacgcaggcgatcattgactgtatgcaggctgatgccagggatgtcactcccggtaagttatttctcaaccgttatttgccaatgattgtcaaagcattggagcgttgtgtttcgttagaggagcaaagtgctgatagcgcccaattcgaagaggtgaaatccctgacttatcaagggataaaggaaatgagcgtagtatttagcgaaatgcaccagcgtctgttagataacgatattgacgatctattggtagatctaaaagtaatgaatcagttggtccgttcccaagggtttgctgctaagtatgatcaaaaaggctga

SEQ ID NO: 9645 - DNA, 429 bp, Photorhabdus luminescens; identical to SEQ ID NO: 7532

SEQ ID NO: 9646 - DNA, 1083 bp, Photorhabdus luminescens
atgaataatgaaacttatgtggcaattaacgaatctctgtttgaactatctgaacacggattaacagatgctgaacgagggcaggccctggcagagttagattcgtatgtaaagaaaacgcgagaaaaatttcttggctatcaagccaaccaagaactccactattcatcggaatttagcaagtacttagatgttcagttaaataatgttggcgacccgtttatggcgggcaatttcagacttaactcaaagtttgttgagcgtgccgtactggattattttgctaaactttggaacgctcctggcagagatagcaccactccgggcgaggcatactggggctatgtgttgtcaatgggaagcactgaggggaatttatatgcactgcgcaatgcgcgtgattatctagctgcaaaagttctctgggttgattcgaatgcgaacagctcccttgaacaaggggagttcgtaggtggtaacgagaactcgcttacacccgtacttttttattccgaagatacacattactcaattgataaagcaaaagatattttggcgctctccactttctccaaactaggggagtctctttatccagggcaatgtcccatcaagacgagtgatggaaaatggccgacaaaggttccgtccctcccaacgggatctgttgatatagctaagcttagtgtattggtggatttttttgcatcacgtggtttccctatagtggtaaacttcaactatggaacctcttttaaaggtgcgcttgatgatgtaagtggcgcgattgatctgctactaccgatacttgagcggcacggcctcaaagagcggactcttgaaattaccttggaaaatggcaaagttattaaaagccttcgtaatggctattggttccacattgacggtgctttgggggctgcgtatggtccgtttttagagaaagcgagagagcagggaatagatattggtgagggacatcttccttcatttgatttcagaaacccagttcattctatcgtgaccagcggacacaaagaaatgggtgctccgtggcctaccggcatttattcttccaaatga

SEQ ID NO: 9647 - DNA, 429 bp, Photorhabdus luminescens; identical to SEQ ID NO: 7532

SEQ ID NO: 9648 - DNA, 459 bp, Photorhabdus luminescens
ctgaatttcctaactgtagattatataggcgctcaggattccacattagcgggctcgcgaaatggtttttcggccttgattctttggcactacctgactaaatactcccataaagaccagattgaaaaaatcgtacatcaactccagatgagtgagagcgcttatcagaaactacaggcattgagtgcggaacttggtcgtgatctttacgtccatcgctcgccactctctctcagtatcctgttcctttgtcctaacaacgacattgttgaagagttctctctctctactgagacaaaaaatgggattgagtatgcacatcttttcgttatggaacatgtgacggatgagatgcttaacttgctcatagatgcattacgccagccgggtgcctttgacagaacaggagctctaaataatctgtcgcaactggtcaacccgggaactggattccgataa

SEQ ID NO: 9649 - DNA, 615 bp, Photorhabdus luminescens
atggagttaagtctgtttgctgcattctggattgtatccgttctgtttatcatcactccaggtgcagattgggcttacaccatctctgcgggtatgcacggtcgcgcagtacttcccgcggtcatgggattactgtgcgggcacctcattgcgacaattgttgtggcagctggtgtaggagcgattgttgctggtacgccaatagctctgacagtgttaacagtagccggagcgggttacctgctgtggcttggcatcaacatgatccgtcatccttccgtacctacagcaagcaatgagcgggaggtaggttccaggtcccaatgggcgataaagggactctgggtcagtagcctgaacccaaaagtcttcctgctatttctggcactgttgccgcagttcaccaatccaacagccgcttggccgatcccggtacaaattatggcactgggtctgcttcacattttaagttgtggcgtaatttatctgatagtcggatacggttcccgagcaatcctaaaaacccgcgcacaggccgcgcacattgtcagccgggtatccggctctgtgatgattatcatcgcagtactcttattggcagagcagttcatctga

SEQ ID NO: 9650 - DNA, 465 bp, Photorhabdus luminescens
atggataagattgatcgcaagattcttgctgagctacaggcggacggtcgtctttccgtgaccgaccttgctgaacgggtaggtctcagcctttcaccatgtcatcgccgggtacgatcactggaacaagcggggattatcagaggctatcgtgcccatcttgatcccagcagccttggttttaacttttccgcgattgtgttcgtaaccttgcgtgaaggggacaggttggcaatcaggtcatttgaagacgctgttacggaaataccgcagattatcttggcgcaaaggcttttcggtgatcctgactatctcatgcacgtcgttacgcatgatctgccagcttttcagaagctctatgacgaacggttgtctagtatgcccggtgttcagcgcctaatatctacactcgtcatgaaaaccgttatccaagatcgccctcttccgttggcatacggcatttaa

SEQ ID NO: 9651 - DNA, 291 bp, Photorhabdus luminescens
ttgccgtcaggagaagaaacgcgagccattgtctgcctggctagtcaaaatacgatagctgagtttaaagtgacgccttcatacgctttaaatattactccacagaaaaaagtcacctttacaacaaaaagtgaagattttgaaggtaatttatgggagatttatccgaagaaagggagcataacggatgtaagctacaaagaagaaggtgatttctcagtttatacccgtctttgctatgctcccggggattcactcccttgccgccgtgatgcatctttaaatcaatag

SEQ ID NO: 9652 - DNA, 1668 bp, Photorhabdus luminescens
atgagtaacgcaaatgatataattaactctttaagaatgtgcagtgttgcgttgggttgggatgccgttgttgcttatgatcgaaataaagttaatcaattattgcttcagcaatatatagaaaagagagctgcgggggtgcaatatcctcctataagttttgaaaatgagaagtatggaataaaactccaggatgtcgttttaggtgtgccactcatttcatttgaggattccaaaattacggccagtcaggccacagcaactatgaaatttatttctggttcgattgtctatacaaactctaatggtcaagttattaaatgggaaaagatcagtccagcgaataattatgctatcaagcttaatgtaaatctggaatatggtaatggggttgttgagaatatcggtaatggggtctctgagaatagtggtaaggttgtcatcaaatttgagaaaggtactttactggatatagaaggattaaatgatgctccagcagagattgtgcagtattttaggcaatatattcagtctaatcctaatgaatatattctaggtgtattaaagcctaataatggtaaaaatagactttatcctaaaaaatttattgttcgcacacaaccagcccctagcggaacattacgagattctaaaaactatggtgatggagctgtactgctttttattgccactaattataatgcaggtgggggtaacctgccaggagataactatccttacattattccagaaggaaaatcggcagctctcattattgggaacgcaaccctattcggtaatatatttgctgaacattttaaaaaatatattgatgatgctgcttttacaaccatcaattcagggcagaatagtcctgtaactttgcagtttactggaggatatacaccgacaaatgaaattatagatggttctgtaacttttttagactcaacgactagatataagagctgtgatgagaaaggagaggtgcaggttgctcacctgccatttaataaatttactatagctgctgatgttgaagataatgaaagtaagcatgttgttttacaattccctgagaaccatacttataatcatcgattctcagcatcttgggattattacggcccggcagggtggatacatcaagattatttaaatgattacacttttagctgtgatgggaaatgcaaggctgaagtttctctgaaggaaaataatattatttcattttcaacggttggcaagataaccgttaaatgtattaagtcagaacatagtagattaagtcttattgaaagtaatggaacagagaagatggcaaatcagctcacagataaaattaataagactggttttttcgaattacctgatatcaatacattttatattcagcatattctgtttccgaactcggaagttttggaatttgatcagattgctgttcctggagatttggtcttattcggcgatattagccctaccttgacaggtctgaaagttgaacccgcagagatacttctgtctgccaataaaacccaacaatttactgtgaccccagctaagaatgttaaatggtcaatcagccctgtagatctgggtagtatcagtacttcaggactttatacagccccttcagtggcctctattggtgagtcgaaaccgtga

SEQ ID NO: 9653 - DNA, 1026 bp, Photorhabdus luminescens; identical to SEQ ID NO: 6127

SEQ ID NO: 9654 - DNA, 3684 bp, Photorhabdus luminescens
atgactgcaaaatttgaacgattacaacagctcgcccggcacgtcgatttttcggctcttattccccctttgttggcatttcctgccgataaagcgtttgccatcaccgcggtttctccacatgctgatgctgagctgttacgcaccatctacagcaaatatattacagagcatcacgattgggtaaaacaagtagaggaagtatgtggtccacctctctggattgttcgtagtgcaggtctggaagatggtgatattttcgtcaatgcgggtggctatgcgagtgtcatttgccatcgtacagcagattttgccgacactgttgctgaggttactttcagtggttttgaacctcaagctatcgcacaacaacggttaatcaatcctgattatcagccacagccagtcacttgttttgttcagcggttgattcaaggcactccacctcaagtggaacttttacaggcaccctatctgacagctgatgtatgtcatagtttgtacaaaattatcaggcagttacatcagcacttttctgaaattgcgttggatactgagtgggtattggaaacagatcatggattggtatcggccaccggactgaccttagccggttctaatggtgttcggggagaactggcgtttggttttggctttgcggcggcgcaatcgcccggttcaagggtaaactcggtcgcctatcattggccaacattagccgctcccttgtggtatggcacacaattacgtcaagtgaacgtagataaactttggttagtacaggtgcgtcctgctcctggttacacgcttgaacgtcgtgttcaacggttaaccgccgaagtacgcaccgagctggcgcattgtatgcgagcagtaccggtggcagcgctattacccccttcttttccctctttaggtagcttcctttctgcatcgacattgaacgatgcttggtctcgttacctgcgttttcccctgtctgtgcaaacggctcttaccgctgtcttcgttgaatctggggtgggcagtgaacatgctggtatcatgttccgacaacaaaatttgccggtttttcttacccaactaacggatatacccgctgttccttgggtagtcattgatagtatgggggaattggcctactttagtgcacaaaagccacttatcgaattgaaaacggaaactgccgaatcggttaatttgcctatctcagtacaacgtgtgtttgacgacagtgaatccttgcgaataacggagcttacatctcaacgtgttaccgatattctgcaaaatgcgttgattggcttacctgtgttaacggaaaagacctacaccacacttaaacgacgcacggttttcccaacagacacttggctacaaaatggtaatgctatccgaagccccagtttaacaggttggctcctcgcacaggcaggagagagagctattgagtttttcccctctgattggccgacaactgatgcaacggcagattatctctgtgctcttaccgctaaaagcaatccgcaatctgtgttaccgcgcttatgcaaagctatcccaacgcttgcaggcaggctcacccgattcaatgatctgtgcttaattatgcagttaattaaaactgaagcatggattgaaaaattgccgtctatccaattaacgtcattggtcgatgctgcgataactgcaccgtatagcgatgcacgcttgttgttagaatgtatactccatgtacttgcagatacagaaattctgtccatttacgaggatactgaacggttaaatattgtatatactctggtcaatgtagcagaatctacgctttctccggcctctctattagagataatacatcacggccaactagcaccgactgcactcgctagtttggtgtgtgccccaaaagcatgtgctgcctatctggcgtttttaactcctttgagatgttttaaggctgccgctgcattagctggagccagcgaagttgctgatttactgcaagccaccgctagcctaatggagactctacataaagcaaacttaccgacattgcagggcctttgtcgcattgacttggtggatacttatgatcaagtgcttaaagcggtattaatcgatgtggtcgatcggcgtgatcccagtacacatcagcgttacttggatttgctaagtggttggattgcatttgcccaactgtcgactctttctgccacggaggcggcggcattgcgttctttcctaaggtggatagagcatgttcgttatcaacccatgccagacaattttttgcttgagttaaaagaagacatggtggaatgtttgggcgacgacttcttgcgctggcaagttttaatacccattgctggcaatatgatgcctgatcaactgcctatggaaaatgctcatcaactacataatcttttacatcagtggatgttggctcactttcgagctcactccggttctgaactgcctgctcccctacgcaaactgataaatatcgcagatggttttggtgatgcacgctcttgcctgctgaggttaacacggaacattctagagatttcactcccctttgtagtacataaggccagcttcctctttaatgagaaggaattgatcgttgaatttgccgaactaccgaacgctccggaagaggacattggccgtttacatgtattcgaagcgttggcattgcgtattgtcgaatggaaacccatatggcgagtatcaccgaatcgagtctgtcagttaggaacttggacgcttttcttgcgcatgcagcgtactgatggtgcccgttggcaagctgaggatctccatcaattggtgctctggttacgagtgctgttcgatacagcttacgacttctcgtatgttcctaacgatgaagtttcacatgtatatgaaatggttggtcattctccttggcgtgacctgtttcgtgcttatgccgcttaccgagcagcggttgatttttctattcaacgtatcacagtctattcattgccctttgccacaactctagcagcactctgcctgaaccagtttgtacgtgatgaggtaattggagcttgcattgccggttttgaaggtgcctggaaagcttttcgttgtatggctgaagaattggagaaaacagaagctgaccaaaatcaatggcatgtccttcacaccacagcagggcaattgggattgctgctttcagcgatgtggccggaacagacactgttgaggatggtacaagtgccgctatcacctgttgccgctgagcgaataggtgtaagtctgttgcatcgtcgtgacttgactgccacattgcaacagctaattgcagagccagaaaatgcagctttgcgcgatttggtattacaccatgtacctgaaatcgctgtgaatgcaagctctgccgccacgattgcagatgaagttgcaggctggcaaagtaaatttaagcgctgcaaggaatacctactcgcttatcatgctaatttactctctgacagccaatgccagcaatgcgtcaaacagcttgggttggtgccttatggcataactgaggaaattgaaacctatattcaacgtgctctgattcacaccgcagcagaggagaaaggtcgttttaaactggatgaagttgaccctattgctattattcgtgccataggcacggaggcttga

SEQ ID NO: 9655 - DNA, 354 bp, Photorhabdus luminescens
atgtcaatatcagccagcctatcatgcagaaagattttgggagaaatcatgtcaatatcagtgaattacattcggcaattaattatcaaagtcgcctgcgatacgacaggtgatagtgtagaagaattaatcgggcgcgggcggctggagatccctccacgtgatgcaattgaatttatggtacgcctggaagcactgttcgactgtaccttgggatgtttgcgatacgagcctttgtcaatagagatcgatgaattttcggcaatcgtgaacaatgcccttaacgtgcgcgtatctactgcatcaacattttgttgctcgtcaacaagcagaggagctgcgtcagtgagatga

SEQ ID NO: 9656 - DNA, 117 bp, Photorhabdus luminescens
ctggcaggatttgctgaatactatgaacaactggtccagatcaagcgttataagcccggcatgatgtatgagatacagagagtgaaggttgaaaaatttatgagaattactgcatga

SEQ ID NO: 9657 - DNA, 438 bp, Photorhabdus luminescens
ttgcgtttatttgcaccggatgataagtcgtttgcggcagtggctgaacaacctatctctttgcaggaactggttcagctcaggcgtttggcagtacgtagcaatggcttcatcataacgccacccgagttgagtacggtagtggttgctccagtgaatgaagcagagttgcgtctcagcactttgcgtattcatccatgttgccctttgctgtgtatgaatctcggcagccggcaggcactattgattaggcgtagagtgatctgggggcgtcctaatgagctcttcgcaaccttgtgtgaactgttgaattctggtgagcgagtaccctatgaggtactggagcgcagtgttgctggaaagatcagtcccgcggctgtggctgaactcgtcagaatgatagttcgtttgggtggcctattaattgagcccttatga

SEQ ID NO: 9658 - DNA, 1854 bp, Photorhabdus luminescens
atgcaatccatttttcaatcggcctggcggcatagcattgctcgcttggcctctttagatattgccaagccaaaggcgattccgcttgaacagtcaggtaacagtatatatcagtacattcgtgcagcaatcttggcttgtgccccggtaagtaccattatcatgattgtcgctaccgtgctgggtactgtatgtaatgttggccaatcttatgtgctgggtgggttgactgcgctagccttgcaaggtcagcaggaacaagtgttgatgatgcttgccattattatctcactttgggtgtctgcgccactgttgcaagctgttcacagcctggcccttttgtattcaagccaaaacctgcgtattggtgtgacagaccatctttctacccggctaatgcatgctaagccgatgaatctggcggagaactctgtcggcaatcttgtcgaacgtgttgagttagcttctaatagcctagaagacgttgtgggtttggtggcgcagacagtggtcaagttactctctgtggcgcttctcactacattggtgttggccagcgtatcagcacctatggcaatggccgctgggatatggatgataacggcattattactttctagttatttagcctataccggtatgaatattgttgaggacgccagcgatgctcatgccaaagtgatctcagatctggcggagatagtgactaacgtacctttgatcaggagctttgttgcttatcgctcggagcgacacagtttcagtcaggcattgcgacaagatctttacgcctgtcggcaggtacgtagctactgggtatttgtgttgctgattgaaagtacctacaaatggttatttggaatagctatcttgctctatattggtctgcaatatgggcaaggtcaactgacactgccccagctaatcacgacctgttcccttatcatttcgctatcctggcactttgagtccgttgcattttattttgttgatatttttgactctttgggggtgctgcggtccagtttacgagaattatcctcaattccggtggacattgaatcaaacgagtcttcaccaatattaccggtacccggacaaattgtgttatccaacgtgtgtagcagttatggtgcaacatctgtacttcgtgatgttagcctgcgtatcgaaccgggtaccaaagtaggcattgtgggaccttcgggatcagggaagtctactctgttagctgtgctgcgtggtgatatggtaccggattccggtacagtggaactgcatggattgcctttagccaagttttcgatgagcagtttgcatcgagtgtcgagtgaagctttgcaatctgctttgatgttcaaccgttctgtacgggaaaacgtaacctatggttctgctgtcagtagcgctgaagaagtctctcatgcgctgacaatggcgcaagctatgatgttggtggaagggttgcctcaggggctggatactttggtcggagagcgtggagcatcaatttccaccggtgaacggcagcgtctgagtgttgcgcgcgctttgcttaagaaatctccattacttatttttgatgaagcaacatcctcggtagatacaatttccgaaactcgtatcctcaattatttgctcgataaaatgccagaacgtacggtgatagttgtaacccaccgtgttgcgacattgagtcgctttgatctgattgtggtcatggaacaagggcagattgttgatataggaacaccgagtgaattggaggcacgcaatggcctttttcagcgtttactgcatcgtgaagaccaatctgtgccggaactaatatcaatggatcctaagaatgagtga

SEQ ID NO: 9659 - DNA, 717 bp, Photorhabdus luminescens
atgatattgatgtcacctattttgctaaaaggagtcactttggactggtctgctcaccggcgctggagttgggaattctttgcagggatgcaggaacagaagctagcactgagtaatgcaaatggcgagttcgaggttgaagttcctgtgtgtgaatatattcaggctttgaaaagcggtgaagggcgattggctaacttgtatgcttccgggtggcgattctttgagcataacccagatatgttgcaggactttaatgagcctatacctgctattggtgatctgttacaaggcattccggagaagttgttcaagcctcttctatggatattcatcggtgctgattgttcgggcacagctctccattacgatgtattggaaactcatgcttggctggccgtgattgagggcaagaaacggttagccttacatgcgccagtttgctgggaccatgagtatgagcaacagagagctcaagccttacaagtgctcgaaacccgttgcaaccaaggagagtggtgctacctggaggtcaacaaaggtgatttgttatacattcctgcaacttggtggcatgaggtggtgaatgaagggccgacgattagcttgactaggaactttgtatcgccagagattgctcgcacagtaaccagttgtgcacgagccttagagtttcatcaattacgtccttggttggaaggagggatgacctcatga

SEQ ID NO: 9660 - DNA, 1260 bp, Photorhabdus luminescens
atgaaggatcgcgtaaaccttagataccgtgttcaccctggcctgcgctacgatcctgttgaacctgggcgtatagagatcagtattcccctaggcactaagcgactgcgtgtgtctagtaaaataagatcattattggaacaaataaagtcagaggctgttctggtcggaacaattatagtccagcgtctggggatttctgtgtttgaggctatggtgaagtaccattttctgtttccggaagatgcgagtaccgccttggaaggcggactttgtatacctgtttcggaaccggcgggacagtcaattagcgtctttgattttgatgaactccaggccgatgatgccgtgttattacatgctcctatcttgacgacaactggaggagagatatcggttgcaggtggtggtcaacacgtgcgttcccagttggtacagtgcttgagacatcctctgggtacagcgggaaagggtgttttactggaccttgatttcggtactcggttggagccagaacgtctgtgtctgttcgatctcggtgatatcgtataccgccctagtatggatagtgctaccgatgttggtgaacggcttacctatgtgtgccgtaatattgtggagtgggatgcatgtccaataatcctagggggagatcatgcccaagctttctacagcataagtgctttaagcgagcgttatccacgtctgggggtgttgcagtttgatgctcatcctgatttgtatgctatggggactccctgcgatttgcagcttagccatgctaatgtcatgcactgggttcgtcgtatgccccatgttgcatcaatttggcagattggtattcgggattatttttgtcaacctactgaaaacctccagttagaagtggatcctaagttccatatgctctcggcttttgaagcagagaccgtgggctacgagcgcctattcaggaatatggatcgttctttaccttggttcattagttttgacgtcgatgtgctgtttggtacggaagtaccgcagacagcaacccctgtactgggtggcctgaattactatcctctgttggcttgttttgagcggctgttaagcgagttccgtattgttggtatggagtttgtcgagattggtgatgcttcgcaaggtgcccacggggcagccgcagtggctgctcggttgcttagtcgctatctcttccatttgagtaaggcgatggtggccggccattgtatctattcaccttttcatcaaaggtga

SEQ ID NO: 9661 - DNA, 9129 bp, Photorhabdus luminescens
ctgaatacgttcgtacctaaagttatggtctttaggtcgggaagaatgtcaaatctgtatcgacaaacgacaaacgacaaacagcttttcgcagcgcgaagggtttcgcttaaaaacaggcaaaggagcattgcaatggtttctatatccaaagacttcacgaacctgctcaataccctgatcgatggacagattgaggcagcaagtcgtcagaccgaatggtttaatatgaggcctgatgagcgtgccgactacatcaggcaggtagacgagcggttacaggaaatgcagcagagtacgctgagtgtgctggctgctcagcattttcagatgcaggacagccccgtttctgtcggcgaccagttgcagacattgcagcaaagacggcagcagatgaacgatgtgcccggcacacctgcgatcaacgcttacaagcagcaactggaccgcgacatcctgttatacagccgacagcagatgaccataacgcattttgacggcacttggcgtaaagctttgaccatgctcaatcccggcggctctaagaccttgaatacgacgactctgagagagaacgcggcaggcaagcaggttaagctggatatcaagatcaaacgtctggaacagcaactgactatgcaggtggctgcctccacgttgttcggcccaaaatacgtgatgctgttttccgaattacaggcctacaaggaggtcaatgctcgctacaacgccttactaaaagcatcctctacggaagaggccgcagctctcggcgggctgaccacggtgcctccggcctccgatgatctgccggtaaatatttcgttgctgatgatggaggagcgtcctggctacatccgcatgaacgtcgcactagttaatgccagcaccgatggccgcttcaaagatttcttcctagagaacggcagattagttgtgtcggcggacaaggtattcaacttctccttcggtaccgcagcccgctccctagcctggcaacaacaataccggctcaagagtgagccaccatcctttcgctcgccgacctatgcgccaattcgctcggtgctggtcaaaaccgaattcgtcgagaagtacttcgccaactacctagtttcggaaagcaccttgcgtgaaggcttcaaggcgcagttgctgggtaacggtcgcaaaatgctgctgaccagcgttgaccgtaaggtgccgaaccaggtcgggattcagatatccggccaggtttcgaataccaccatcacccgtgaggtaccattggcaagcgccttgagtgacctgatcaaccagaatgctgatatcgctagcttccagactatcggcctggaggggtttcgacagaacggttaccatccggaccgtgacgggcttttcgttaatatccatgagctggaacgttcagtcggttttgccagtcgtcagtacttgttggaaatgccccagggcaacggttacctatccgcgacgccctttggggtgatgaacgttgacgacaacaaggtcagcagcagccacttgagcaaggcgcagaccgacacactgtatcaatacaacgccgcatttttcgagaagctggaacaactgcgtgacggtggtacgaaggccagtcgtctgttcaaaggcagcgaagatcgcaaggcgttcgagcagcagctggtgcgtttgctcgaacgtaaccacatcacccccgcaggggtgttggcaccggagtacttccgtaacaacatgcgcgatatcaagggtaataacctaaacaaagcactgtgggaacaggcgttcgccgcttcggtctggcgaagcagcgataatgacccgctgctgttcgggctggcgacgagactggtgaagaacccggctgtggttaaggtcttgcaaaatggctatgtgcaaagtgacattgtccaggctagggggctattggcaccgttgtacgaacaatggcgcattcgggccatcgaagtggaaatccagcgggttgccagcgccaatgcggcacagcatccaagcaatccgaaagtacaggttttcgatcaggctgcggttgatcgatcgctggacgacaaactgctcactctgttactgactggttcccagggacttgagagcgccgatgcgcaactgcgtccggcggttgaggcggtgctgttgagcaatgagggcaggagcttacgcaaacaggtcttgttccatgctttgcgtccagtagccgatagcttttccaaggccgcggtcccggtcaatcctcacgctgcgctgggtgacggcaaggtcatgattaataaccggctgaatcagcccgatccgtatctgatcctcaataccagctctgaggagcagacgtatcacgaggattcgtacctgatcaaggacgataaataccgcagctacaaccagttccgtccggacccgaagaatgacgctacacgctacatgaatgacctggacaccccgttcgtggggggaatttccgggaccacccagaccgtcagtaatgccttaccggaattattcggtggcgcgttgagcgtcaagcaatattggcaattccagatggccaatgcggccttcatgatccgtaacggctatcactcgttcttcgaaaccctctatgtcgctgcgcgttacgaaccagaaggtgcggacagtatcggcaaggacatgttgcagatgttcgacaagtaccgcgccgaaggcagcaagagagagttatggggtgaactgtatgacggagtgatggcgcgggtcttaccgatcattaatcagggcttgccagcggctgacgaattccatccaccgcgttttacctacatgggtccaaaaccggcgctgctggggcaggcggtgaaggatctcgaactcaaggctgggctggtgtctgtaggtgatggatttgagccccgacaaggcagtgctgacatccatcagtttgccactgatcctgcactgttcgccaaaacccacaccatcagtgctgaggtgctggtcaggtcggggcacctcccggcaaaggggagtgcccagttggtgaaggtcaggtcaggcttatacgagatcgagtacactaaacaaaatgctaatagcatatcttcaagtagcgtgtcggcgtacttcctcggctacaatggcctgaaccaggccaatgcggtacccgcttatgtggacattcctaagcatgtggccgcagggagctttctgttcaccgggacactatcgggcggctcgctagtggtgaccagcctcgatgacaatacctaccgggtctaccacgatggccggttcaacagctcgctgctgtatgacaacgtggtgatggcggtcgactacaaagattaccagatatccgataccgctgggggttttgccgcagcgtacatgcagtacgtcaatggtgagtggcaactggtgttccagcgacaggaatatcaacgagatggacagatggtttggccgaaactgcgcggtgatgtggagccgctctcaatccaaatcgccggcagtcaggtggtggagcgtaaccaagccgaattcgccacttaccgcgagcaggttcaccaacaactgaagacggtggcgacgcagtttggggtgtcggtcgaaggagttaccgacggcgtctacaccgagggggagttttctcctgagcatccggcgattgccgcatggacccggttgcgtgaagcggttcaggccaaggtcaaagccaacatggacccggtggcagataaactctaccagctccagcaagcacgacgtacctcaagtgatacggccttgatcgaccagcagatcaagcaactcaatcttacacaggactactacagggcgcagtatgatccaatattgcgtgaagccagttctgtcgaaaagacctggctctggcagcagatcaaggccaaagatggcagcgttgcggtggtacagattgatgatacggccattcaaggcgaggagcgtaccagcagcgtgggagaacgttacgcggcctccgaggtctatcagcgcggggcacagggtaccgggttcaatgatggtttgcgtaacttccgtgagatcaagatccccggggtggatgacaaaatgtcggtcttggagatgaagcgacggtttcttgagggaaaactcacccacgagcaacgggaagccttgagcgctcgcatcgccgaaatcagccaagccgagtacattgacaaggtactgcgacagaccgcaatgttcagtgaggacttccatgatgccggcagtgtcttcaaccgcttagtaccacaggacttttatctgtcgctggtcggtgaccgaaccggtggccgttgctaccctttggtcaggaccatggctgtggcattggcgggtggtggggaggccggcatcaacagcttagtacaaaagctgttcttcgcttccgccgacccgcaggcgggcagctccacgctgctcaagaacagcctgatcagtctgcactacaatgtcgaagccgttcaggcttccacggagctgggccagttcaatttgtccgaggtggtgtcgcgactggccgcaacaaccggcacttcgatgtttgcactcaatacccagaatcactcgatgatggtagggagcactgtcacggccgaaggccgtcgctactacttctatgacccgaatgttgggatctttgctttcgacaacaccaagagtctgtccagagctatggagcagcacttggtagtgcgcgggctggccgcgcactatggctcgttcggcagcaagtcagtgccggccttcaacttgattgagatcgatacccgcaagatggcagaggtacctgtaggcaatggcctgaacgtggccgacctgacccggttcgaggaattggctagtgttatcgggcaacggcggcaggtcgaacaggtggtgagtgtacaagagtgggtcatggaagacttgcgactgagccctgcactgaagacctttgatgccgagcaatggggtgcacggttcgaagtcgccagtgcccggctggcgcaagagcaccaactggacagccgctggctaccgattatcgctacgacggaagaccagggggaaggtcgctaccgggtccagttcattaaccgtgaccaacccgagcagacccgttggttgatcaccagcgatagcacctttgtcgaattccggcgcttcattgatgagcacatggctgtactgaacgagcactttaccctagagcatggccggatgcggctccgcggtggagttggcgaggctgctccggtggatgggttgaacgctgggtttgcggttcagacgctgatccagtggtttgccgacaagaaccgccacgatgcggcaagcggagtgatttcgcctgatctggccaccgcgctcaaggtccatagctacctcaacttggtccagatggctcacggtggcgtacaggatatagctaaggttaccgcgttggtgcgtacggcgctgcgcggtgaagtggtggccgctgaaacctcgttaaaggactttgcttcgaatctgggccacactgtcaatgaaggtgccggtgtgttgtttggaggagctatggtcggtttggatgcttatgaactggcccacgctgagaacgatgtgcagaaggcggtgttcggtacccagttagcgttcgactcggcgagcttcgtcactggcgcagccggggtgggggctgggttggtcggtgcttcaacggccggggcggtactcggtggggccagcgtaatccttggtgggctcgcggtgggctttacggcactggctcaagcctttggtgcggtcgctgaggatgccaaggcggtaggccgttactttgatacggtcgacaaggcgtacaaaggcaacggctatcgttatgacaacaagaacaaggtgctggtgcctcttgccggggcggtgatcaagagccttgacttgcgcaagcaccagatcagcttcgacagccagtacatctaccgcacccattcgggttctaccggttcgggggaaatcaattacttcttctgggtcggtgactttccgcgaatggtccatgaccgtggtcaggcgattgaagtgcgtagcggtattggttacaaggatatctcccggcctcttgaacacagtgacagcaatgtcgtgatcctgccgggtacacctaagtcctacatcagctacgaatacatgttacttcccggtgctaccacacgccatgatgctggcttcgacgtgatccgcaggcttgaggaagacaaacgattcgactacgacttctatatctttccgggtgaggagacaatccgcaggattcatcatgagtacgtcgacaccccaatcgaggtggtgctcgatcagcgcaaccggcagctggtggtgcccgagctacccaaagagctgcacagctttttacgctacgagatcaagggagcgggtggcgagtacctgattggccttaacgaaggcacccaagttaagctcacgagcgatagcgccagtgcattgtcgcgctggatcattgatagcagtcaactcgccagtgacagcatcagcgtgtcgaagaaccaactggtggttggcggggtggtagtcgaacttgacccgacccagaacgggcaggtattggtggtcaacggcaagggcgaggtacgagaagttgactttgccggcctgacaactcaggtggtaagcgaagatgcgggcaagtggcaggtgcccggccagcaaatcgagcagcacctgagtgatctggccaaagcgcatcagttgcacgggcagtacgtagtggtggagaactacagccacaacggacgagatgttggtcgagcgttctatgatgtaggcaaggagcggatgttgttcaccaacaccacccacgagcagaccagacatgcccaactgggtgcggtgatgggtgaccatgcctatttctacgacgccgacaatgcggcagcgtggcgggtagacatcgccaccggacaggtcgacgcgcaatttgagccttggtttaatcaaaatgcgggccagatcagtcggctatggcaggagggagatgcggtctacctggcacgccgttatcgactaaaagagaaggaggctgaattagagaaggaagctgaactgtgctatcggatcctcagtgatcgaatggagttggtcagtgcggtgggtgatgatgcgctgatccagcttttagcacgtaccagccagcatagtgatgtgcttaaggctatactccagggctacgagagcaaaagtatacagcgtgagacgccgatgtatacgttgggcacacggctgctccagccgaccagtgcggcgctggtcacggtgttcggcgtggatgcggctggcgtggcgcaccgttactggatacgtaccggcgatgggactctaatcaagccgaatctggcaccaccggcagatcagaccccgcactttaaagagaacgaacaaacccgcagtgcctggccgatcccggccgacttggtgttagcggggagcatgccgcagcccggcggtaaagaggtgtttttcttctacagtaaagagcaaaaggttctgttccgacaggaaggtcccgggcaggctgttctcgacgctagccatcccactgcattgcgcatcagtactccagcgttagccaacttggtcaacctgaacggtagcctgcttgccatcaccgaggatgggcgtgtggctcggctcgatgcactggggcagcttaactacgaagcggttaatgagcattggctcaagggacgtacccactggtggcaggacctggctagcgtcgccgacggcagagctactttggcggtgttcggaatcaagggtaccgacggcaagagcctgctgccagtgtggtaccacaagggtcaggtaatagtggcctcggctcctctgcaagacaaacgtttgcagttcttgggttttgaagtggatggctccggtgcgcggctgttcgaacccgccagcggcaagttgtatcgtcagccgcctatgactgccgatgcgctggctgccgcgtttggtaccgacgaggtgcttgaagtctcgtcacagcttcccgccgccggtgagctggcgtctggactgcacctcaaggcggtggagcaagtcgatgtcgggctacgactgaccaccgtcaaaggtgagatcctattgcaaaccaatgacggcaaattgcagctagtcgccgtcgataaaggctggcagcaggacaacttcgctcgtctgccacaggcacttgctgaggttgctgataagtggcgaaccaaaggcgtgctgaccttgcaaggcgatgacacacaaggttggttcgatgtcggcagtggtcaagtgttctcctacggtagcatccaggctaaagacaatctgcgtttcatcggaattgctgccgggaagaagggcgcgtatgtgtacagcccaacggaccaggcactgtaccgggtcaaggatgatagtgtgcagaagctgaatcattacactagtgtcgagcgtattggttcgtcgctgttgattcggggcgggggtacgggtggtcgccgggacgacttgaccccaccgctgatcaccggtgtcgacagtgtggtgttgcatggcggtgctgataacgatacctaccgcctcagccaagagatgtggtcgcattaccgcacggttatcattgacaacgatgacccgggccaggctctggaccgcttgatcatgccgatggttgatgcggaaaaaatcctcgttagtcgccatgaggataacttgatgctgactgactcggccaatggcacgaccttggtggtgcgcaaggtgttcggtagccaggcggtgacgcaccagcatttgcaaatcgaactggaaggttcttcgtcggtgatgggagtggaccatctggtcaagaactttatccagaagagttacattaatggggagctggtagaactgtcttgggccagtagacagcccgtcatcgagcctcatgtgattcattccgttgccgcagtcccggacacgggagggccgagcctagcgaagctgagcggggctatggcttcgttccctgatatcggcggtgcccgcgagcacctgccgcaaaaccgtcagtccgcgccggcggcgctggtgccaccgctgtcttga

SEQ ID NO: 9662 - DNA, 324 bp, Photorhabdus luminescens
ctgtctccggactctggtcgaatcattcctcttgtagtagaagcagatcatgatcaaatccaccaaaggcttacggtcaagttattgcaaggtggtgaatacattcctgatgttttcgggtgtgaacaatcggcctgcttaagtgatcctccggcaggtattggcattgcgtggatatgtgttgcatcaggtcgggctgaaaggtgttacaaacgtgttacttggaatagtaagattgcgtatttgctggagtgtgaattgatgttgagctacagagagaagaatgttaataggataaaacagaatattctcgctgctggctga

SEQ ID NO: 9663 - DNA, 594 bp, Photorhabdus luminescens
atgactcagaaggagaacaccatgcaacgagaacaagttcttagtcatgccttaaacttactggagcaacatggcttatccatcacaactgaggtactttttggctcgcttaacatggatatcgaatatctcaagcaattctggcccgatcgggaagctctactttatgactgtctacgttatcacggccaacagattgaagtctggcagcgacagatattactggatgaaaatctgacaccagaacagaagctactagctcgttacacagcccttgatgaaaaagtaaaagagaaacgctacccaggctgcctatttatcgcagcctgtagcgcattccctgaacctgaccaccctatccatcaattagctgaattacaaaaacagagttcttctcgttacactactgagctattacatcaactggatattgaagattgcgaactcgttgctaaacagatggagctgattctggaaggctgcctgagtaagctactactcaaacgggatattggtgatatcactacggcaaaactgctagcagaagatgttttagctattgccttatgtcgcaaaaatggtgcgttaagttaa

SEQ ID NO: 9664 - DNA, 1728 bp, Photorhabdus luminescens
atgattaaacgtactctgatgctatttttgctgctttgcagcccccttcttaccccggcggcagcaaacgcactgtttgaacagccggggcaaaacccatatttgccagtagatcaggcattcatgtttgattttcagcaaaaaggcgacaaattgacgttagactggcagatcaaaccgggttattacctttatcacaaacaacttcatattgagccgcaacaggccacactgggtaaaatcacgttgccacaaggtacagctcatcgagatgagttctttggtgaaactgaagtttatttccaacaactcatcgtcaatgttcctgttacaaaggcgaacaacaattctaatatcgttgtcacttatcaaggctgtgccgccgcaggatattgctatccacctgaaacccgccttgtcccattgagtgcagttattccatcaaaaacaactgacgccatatctgctgaacctgttcacaaaacgccagaaagtgcatcgaatgatcaacaacatttgcctttctcaccactctgggcaattttgattggcatcggtatcgcctttacaccttgtgtactaccgatgtatccattgatttccagcattattcttggcagccaacgccctaaaagcctaaaacagatattttggttagcgctaagctatgttcaaggcatggcagtcacctatacactacttggattgattgtagcagcggcgggtctacaatttcaggccgcactgcaacatccgtatgtactgatcggcttatcagtattgtttatactgctggcactgtcgatgttcggcctctattctctgcaactgccttccgctgttcagacgcgcttagtcaactggagtaaccagcaaaaaaacggttcacttttcggcgtattcgctatgggggcgttagcgggattaatttgctcaccttgtactaccgcccctttaagtgcgattctgctttacattgctcaaagtggtaataccgtggcaggtggcctaaccctctatctttacgctttaggaatgggattaccgctcattgctgtcaccctatttggccacaaactcctgccacgcagtgggccttggatgcagtatgttaaagaagcttttggcttcattattcttgcactacccgttttcctgctggaaagggttatcggtgatgcatggggaatacgattatggagcctgctggcagtcagttttctaggatggggatttgttctgacgattagaagccaaaacggttgggtacgagtcatacaactgatattgttaattctgatgctgatagctactcgcccattgcaggattggttttggggtacaacggtcacacaacagtcgcaacacagcctaaatttccgccagataaataactggcaggaattagaacagataatgacacaaaacagccataaaaccgttatgcttgatttctatgctgactggtgtaccgcttgcaaagaatttgaaaaatatactttcagcgatccacaagttcagtcacaactgggtgataccttactgttacaggccaatgtcacgaacaacagcccgcagcagaagcagcttttagaaaaacttagcgttcggggattgccgactattttgttttttgattctcaggggaaagagatccccgattcacgggtaaatggctttatggatgccacccgctttaatgaacatttgcaacatctgccaaaatga

SEQ ID NO: 9665 - DNA, 1302 bp, Photorhabdus luminescens
atgttagccgtagaattgattatcgttctgctggccatcttcctgggtgcaagattagggggaattggcattggatttgccggtggtcttggcgttctggtgctggctgtaattggcgttaaaccagggcatatcccatttgatgttatttccatcattatggcagttatcgccgctatctctgcaatgcaggttgccggtggtctggattatctggttcagcaaactgaaaaactgctgcgtaaaaacccaaaatacatcacgatactcgcacctatcgttacctatttcctgacactgtttgcaggtacaggtaacatctccctgtcagcactgcctgttattaccgaagttgcgaaagagcaaggcattaagccatgccgtccactttccactgcggttgtagcggcccaaattggcatcaccgcctcaccaatttccgcggcggtcgtttatatgtcttctctgatggaaggccacggcgttagctatatccatctgttaatggtgctattaccatccactttcgccgctatcgttctgatgtctttcatcatctcctgggcgtttaattccaagttgtctgatgaccccatttacttaaagcgcttggaagacaacttggtaactctgcgtggcagcaaacaaattgagattaaaccaagggctaaagcttccgttctgttattcctgtccggtgttatcagtgttgttatttacgctatcgtcaatagcccaagcatcggtctggttgaagaacctctgatgaacaccactcacgccattctgatcattatgttgagtgtcgcaactatcacaacgatgttctgttcagttgatactgacgccattctgaactccagtacctttaaagcgggtatgagcgcatgtatctgtattctaggtgttgcatggctaggagatacttttgttcaggcaaacatggattggattaaaggcaccgctggagacttaatccactctcaaccttggttgctagcgatcattttcttcttctgttccgccctgctctattctcaggcagccaccgcaaaagcgttgatgccgatggctttggctcttaacgtcacaccattgaccgccattgcctctttctcagcggtttctgggttgtttattctgcctacctatccaaccttggttgccgcagttcagatggatgacaccggcacgacccgtatcggccgttttgtatttaatcatccattctttatccctggcaccattggggttgctctagctgttgccttcggtttcctattcggcagtatgatcctctaa

SEQ ID NO: 9666 - DNA, 1425 bp, Photorhabdus luminescens
atgtcaaacaacattcgtatcgaagaagacctgttaggtaaacgagaagtccctgctgaagcctattatggtattcacaccttacgtgcgattgaaaacttccatatcagtaacaacaccattaatgatgtacccgaattcatccgtggcatggtgatggtaaaaaaagccgcagccttagctaacaaagagctacaaactattcctaaaaaaattgctgacatcatcatcaaagcatgtgacgaagtgctctataccggcagatgcatggatcagtttccggtcgatgtgtttcaaggcggtgccggtacttcactcaacatgaataccaatgaggttctggcaaacattggtctggaactgttaggccataaaaaaggcgaatatgagtacctgaatcccaatgaccatctgaataaaagccagtcaactaacgacgcctacccaactggcttccgcatcgcggtttataactccatcctgaaactgatcgagtctattgagctgttaattgtgggtttcgataaaaaatccagagaatttaatgacattctaaaaatgggtcgtacccaattacaggatgctgttcccatgacactggggcaggaattcaacgcattctctatcctgttgaaagaagaagttaaaaacctcaaccgaacctctgaattactgctggaaattaaccttggcgctactgctatcggtacccgcttgaatacagcaccaggttatcagaaattggcggttgaaaaactggcggaagtttcaggtttaccttgcgtaccagccgaagacctgattgaagccacttctgactgtggggcttacgttatggtccacggtgctctgaagcgcctggctgtcaaactgtctaaaatttgtaatgacctgcgtttgctttcttctggccctcgtgctggcctgaatgaaatcaacctaccagaattacaggcaggctcttctattatgccggcaaaagtgaacccggttattccagaagttgtgaatcaggtttgcttcaaagttattggtaacgatatttgtgttactatggcgtccgaagcaggccagttacagctcaatgtaatggaacctgctatcggtcaggccatgtttgaatctatctccctgctaagcaacgcttgccgcaacctggtagaaaaatgcgttaatggcatcacggctaacaaagaagtttgcgaaaatttcgtattcaactcgatcggtatcgtgacatatctgaacccattcatcggtcaccataatggtgacattgttggtaaaatttgtgctgaaaccggtaaaagtgttcgtgaagtcgttctggaacgaggcttactgaccgaaactcaattggatgacatcttctctgtagagaacctaaaatgcccatcttacaaggcaaaacgttttgacgattaa

SEQ ID NO: 9667 - DNA, 489 bp, Photorhabdus luminescens
gtgcgttggttgccatttatcctgatatttttgcttgtctatatcgagtcagccttatttgtgcgtgttgcctctgaactaggtgtactgttaactctgttactggtgttgtttacttcttgtatcggtatctctctggtacgcagtcagggcataaagaattttatccagatccagcagaagctgattaatggggagagtccggctgcggaaatgataaagagcgtctctcttttactggcgggtttcctgttactcctccccggtttttttacggattttcttggattgctgttgttattgccaccggttcaaaaaacattagtgatgaaactgatgccacatatcaatttctatcgtcctcataatagcggtgggtttagacgggatagtaatacttttgagggggaatacgagcgtaagcaggatgacccttcccgaacgttgaaagaccataaacccgatgacgacgagcataagcctcattga

SEQ ID NO: 9668 - DNA, 294 bp, Photorhabdus luminescens
atgaatattcgtccattgcatgatcgtgtaatcgtcaagcgtaaagaagttgaatcaaaatctgctggcggtattgtgctgactggcactgctgcgggtaaatccactcgtggcgaagttttggctgtgggcaatggccgcatccttgaaagcggtgatgtaaaagcactgtgtgtgaaagttggagatatcgttatttttaacgatggttacggtgttaaatcagagaagatcgacaacgaagaagtgttgatcatgtctgaaagcgacattctggcaattgttgaagcgtaa

SEQ ID NO: 9669 - DNA, 1647 bp, Photorhabdus luminescens
atggcagctaaagacgtaaaatttggtagcgatgctcgcgttaagatgctacgtggtgtaaatattcttgctgatgcagtaaaagtaaccttgggccctaaaggccgtaacgttgtgctggataaatctttcggtgctcctgcaatcactaaagacggcgtttccgttgctcgtgaaattgaactggaagacaagttcgaaaacatgggtgctcagatggtgaaagaagttgcctctaaagcgaatgatgctgcgggcgacggcacaacaacagcaactgtattggctcagtctattgttactgaaggtctgaaagccgtagccgctggtatgaatccaatggatctgaaacgcggtattgacaaagccgtggttgcagcagtggcagaactgaaaaaactgtccgtaccttgctcagattccatctctattgctcaggtaggtactatctccgcgaattccgacgaaactgtgggtaaattgatcgcagaagcgatggataaagtcggtaaagaaggtgtaatcaccgttgaagaaggtactggcctggaagacgagctggatgtcgttgaaggtatgcagtttgaccgtggttacctctctccttatttcatcaacaaaccagaaaacggttctgttgaattagaaaacccatatattcttctggtagataaaaaaatctccaacatccgtgaactgttgccagttctggaaggtgtagctaaggcaagcaagcctttgctgattgttgcggaagatgttgaaggtgaagcactggcaactctggttgttaataccatgcgtggcatcgtcaaagttgctgcggtcaaagcgcctggcttcggtgatcgccgtaaagcaatgctgcatgacattgctgtcttgactaacggtaatgttatttctgaagagatcggcctagagttggaaaaagcaacgttggaagatctgggtcaggcaaaacgtatcgttatcaacaaagataccacaaccatcattgatggcgttggtgaagaagatgcaattaaaggccgtgtttctcagatcaatcagcagatcaaagagtccacttctgattacgaccgtgaaaaactgcaagagcgcgtagctaaactggctggtggtgttgctgttatcaaagttggtgctgcaacagaagttgaaatgaaagaaaaacgcgctcgcgttgacgatgctctgcatgcaactcgcgcagcagtagaagaaggcgtggtagctggtggtggtgttgcactggttcgcgttgcagcggctattgttggtctgaaaggcgataacgaagatcaaaacgtaggtatccgtgttgcaatgcgcgcgatggaagctcctctacgtcagatcgttgacaactcaggtgaagagccatctgttatcgcaaacagcgtgaaagcaggtgaaggcaactacggttataacgcaacgactgaacagtatggcgatatgatcgcaatgggtattttggatccaaccaaagtgacccgttctgcactgcaatttgcagcatctatcgctggtctgatgatcaccactgaatgtatgatcactgacctgcctaaagatgataaagctgatttaggtgcagcaggcggtatgggtggcatgggcggtatgggcggtatgatgtaa

SEQ ID NO: 9670 - DNA, 909 bp, Photorhabdus luminescens
atgcacaaatttaatcgatccaccgaaatggctgtattcgttcaagtaattgagtcggaaggtctctctgctgctgctcgtaagctcgatatgacgccgtcagcagtcagtaagcttattaatcgacttgagatgcgacttggtgtacggctgctgaatagaacgacacgtaaacttcagttaacggctgaaggttctgttttctatgaacgtagtgtcagaattttggaggacatcatagccgcagaacaagaagcaaatcagggaaccgcgctacgtggacggatacgtgtgaattgtcatgttgcgtttggaaaacattgcttgatgcctttactaccggatttcctgcaacgttatccagagatcacactcgacatctcattatgtgacttgatagtggatttacttgatgatcgtagtgatgtggcgattcgtaccggtcctctggacgattcatgtttcatggtacgcaagttgggggcaagtcgaatggttgtggtaggatctccttcataccttgaaaggatggggataccctctatgcctagcgatctagggcgctacaatcgacttggttttggttttacccgtcatatgaaagcttggcctttcatcgattcggaagagtgggggcaacaattgccttcagggaacttgctacttggtgatggagaaaccatgcgtaaagctgcaatagcaggacttggcttagcacgattagctcgtttccatgtggatgctgatattcggagcggtttgttgctacctgtacttgagaactataatcctggcgataaggaagaaatatatgcagtttttgtcggccaaggtaggcagctcccatcacgggtacgggtatttctggactatctgacagagcgtatccacattggtgatggatggtga

SEQ ID NO: 9671 - DNA, 345 bp, Photorhabdus luminescens
atgcgaattaaagttttgctcagtgcttcagtattgttactattggcagggtgtacaacgactaaccaattaacttctggtggttcacaggttcgatttgttgatactaagccaggcagcgagtgccagttattaggtgaagtaaccggtactcaaagcaattggatgactggtgtaagtaatgaaagcagctcaatgcgtggggcagccaatgatttacgcaataaagccgcagtcatggggggaaatgtgatttatggagtcaccagtccgagtgaaagtctgttatcgagctttgcgccactggacagtaagatgatcggtcaagtctataaatgtcagtaa

SEQ ID NO: 9672 - DNA, 1029 bp, Photorhabdus luminescens
atggcgcacattataaccccaaagatcatcatcagagaagactggttgaaacaacttacagatgttattaccgatcctgatgaattattacaattattatctttagataaacacccgaccttgaccaaggggagcggcgcacgtcgcctgtttccactacgggtacccagagcttttgttacgcgtatgcaagtaagcgatcctaatgatccgctgctacttcaggtcataacgacaccagaagaattcacgcttacgccgggtttttctaccgatcctctggatgaacagcgcagtgctgtccccggcctattacataaataccgtaatcgcgcactgttgctggttaaaggaggatgcgcgattaactgccgttattgcttccgacgtcatttcccatacgaagataacaaaggtaataaacgcaattggcaacaagcgttagattatattcagcaacatcctgaacttgatgagattatcttctccggtggcgatcctttaatggcaaaagatcatgaacttgactggctgatcagcaatctggaaaagatttctcatattaaacgactgcgtattcacactcgtctgcctgtagttattcctgcccggatcacaacaacgctttgcgatcgactggcacaatcgagattacaggtgatcatggtgacacatatcaatcatgctaatgagatcgaccaatccttacggaacagtatgatattgctgaaacaagcaggtattacgttactcaatcaaagtgtgctgttacgcggtatcaataatcattctgatactctggctgacctgagcaatgctctgtttgatgcaggtattctaccttactacattcacgtgctggataaagtacaaggagccgctcattttatggtcaatgatgaagaagccaaggggcttatccgggaattgctgacaaaaatttcaggttatttagtaccacgtctcgcaagggaaatcggcggagaaccgagtaagacacctcttgatctgggattaaggcaaaactaa

SEQ ID NO: 9673 - DNA, 567 bp, Photorhabdus luminescens
atggctacttatagtaccaatgaattccgttcaggtcttaaaatcatgttagatggcgagccgtgcgctattcttgaaagtgaattcgtgaagccgggtaaaggtcaggcgtttgcccgtgtccgtattcgtaagctgatttccggtaaattgctggaaaagacgttcaaatctactgactctgtagaatccgctgacgtgatggatatgaacctgacttacctgtataacgatggtgagttttggcactttatgaataacgaaaccttcgagcagttagctgctgatgaaaaagcagttggcgataatgcgaaatggttagtagaacaagctgagtgtatcctgacgctgtggaatggtcagcctatttctgtgactccaccaaactttgttgaattagaaattactgatactgatccaggtctaaaaggtgataccgcaggtacgggtggtaaaccagcaaccttgaacactggtgctgtagttaaagtacctctgtttgttcaaattggtgaagtgattaaagtagatacccgttctggtgaatacgtttctcgcgtaaaataa

SEQ ID NO: 9674 - DNA, 315 bp, Photorhabdus luminescens
atgtcctggtttgttcttgttattgctggtttattcgaagtcgtctgggcggttggcctgaaatatactcatggtttcacccggttgataccgagccttattacagccagtgctgtggcgctcagtatgggattgcttgcttatgcaatgaaaggtttaccaataggtacagcttatgcggtctggactggaataggtgcagtgggtaccgctatttttggcattatagtgtttggtgaatctgcaagctttgccaggattttaagttttgctctgattatcgccggtattatcggtctgaaattgtccagttaa

SEQ ID NO: 9675 - DNA, 885 bp, Photorhabdus luminescens; identical to SEQ ID NO: 7045

SEQ ID NO: 9676 - DNA, 354 bp, Photorhabdus luminescens
atgaatcaaatacctaaacgttccgatgagccgattttttggggattatttggtgccggtggtatgtggggcgcaattgtggctccagccattattttactcgtcgccatccttttgccattggaagtcgcgccggaagcgttaagctacgcacgaattctggctttctgtcagagccttattggtcgtgcgttcctattgctgatgattattctaccactatggtgcggtttacaccgtatccaccacggtatgcatgacctgaaaattcatatccctgcgagtaaatggattttctacggcttggcagcgattctgagtgttgtcgctatcatcggcgtttttactctgtag

SEQ ID NO: 9677 - DNA, 393 bp, Photorhabdus luminescens
atgacgactaaacgcaaaccttatatccgcagcatggctcccaactggtggcagaaactgggcttttaccgcttctatatcctgcgtgaaagtaccgcagtgacgactatgtggttcagtatcttactgatatacggtctattcgctctaaaaggtggtacccaaagctggcatgaatttgtcacgttcctgcaaaatcccgtcatcctgctggttaatatcatcactctgctaggtgctctgctgcatactaaaacctggtttgagctagcgccgaaagcagctaacatcgtgataaaaggcgaaaagatgggttctgggccagtaatcaaactgctatgggccgtcactattatcgtcaccatgattatcttaggtatagccttactttaa

SEQ ID NO: 9678 - DNA, 735 bp, Photorhabdus luminescens
atggttgatatgaacaccctgagaatggaggtcatgcgctataacccggaaagtgaccataaaccccattttataacctatgagattccttatgatgagcagacttctctacttgatgccctaggttacattaaagacaatctcgctcccgatctctcttaccgctggtcttgccgtatggctatctgtggttcttgcggcatgatggttaaccgtgtgccgaaactggcctgtaaaaccttcctgcgtgattatcctcaaggaatgaaagttgaagcgctggctaactttccgattgaacgtgacctggtcgttgatatgacccacttcattgaaagcctggaagcgatcaaaccatacatcattgggaatgaccgtagaccttctgacggcccaaatattcaaactccagcacagatggcaaaatatcatcaattttccggctgtatcaactgtggcttatgttatgccgcttgccctcagtttggtctgaaccctgaatttatcggcccggcggcgatcacgctggctcaccgttacaacctcgacaaccgagaccacggtaagaagaagcgtatgccccaacttaatagccagaatggggtatggagctgtacattcgttggttactgttctgaggtctgtccgaaacatgtcgatccagccgcggctatccaacaaggcaagatcgaaagcgcgaaagacttcatgatcgccatgctaaaaccacaataa

SEQ ID NO: 9679 - DNA, 1797 bp, Photorhabdus luminescens
gtgcaaatctttaatgccgatctcgcgattatcggagccggaggcgcaggcctacgagccgcaattgccgccgctgaggctaatcctcagatgaagattgctctgatctcaaaagtttacccaatgcgtagccacactgtggcagcggaaggtggatcagcagcagtcacccaagctcacgactcctatgacttccatttcaacgataccgtatccggtggtgactggttatgcgagcaagatgttgttgaatatttcgtcgaacattgcccgacagaaatgatccaactagaacagtggggctgtccgtggagccgtaaggaagatggttccgtcaacgtgcgtcgttttggtggtatgaagatagagcgcacttggttcgctgcggataaaactggcttccacatgttacacacgctattccaaacctcccttaagtatcctcaaattcaacgctttgatgagcattttgtcctcgatattctggtagatgaaggacaagcgcgcggcctagttgcgctgaatatgatggaaggcaccaaaattcagatcagggctaatgccgttattatggcaactggtggcgcaggccgtgtataccgttacaataccaacggcggtatcgtgaccggtgatggtatgggcatggcattccgtcacggcgtaccactgcgtgatatggagtttgttcagtatcatccaaccggactgccgggttccggtatcctaatgacagaaggttgtcgtggtgaaggcggaattttggtcaacaaagatggctaccgctatttacaagattatggcctcggccccgagacaccattaggcaaacctgaaaacaaatatatggaactgggtccccgtgacaaagtttctcaggctttttggcatgaatggcgtgccggtcgtactatttcaactccacgtggcaatgtggtttatctcgatctacgccatttgggggagaagaaattacttgaacgcctacccttcatctgtgaactggcaaaggcatatgttggtgttgatcccgttaaagagcccattccggtccggcctactgcacattacactatgggtggtatcgaaactgaccagaaatgtgaaactcgcattaaagggctgttcgctgttggtgaatgttcttccattggcctgcatggtgcaaaccgccttggttccaattctctggctgaattggtggtctttggccgtctggcgggtgaagaagcagtaaaacatgttcaacaaaccaaacccattaatgaccgcacattggatgctcaggcatgtgatgtagtcgcacgtttgaacaacttgctgaaacaaaaagggacggaaagttggtcgaagatccgtgatgaaatgggtatctcgatggaagaaggctgcggtatctaccgcacccctgaactcatgctaaaaacgatcgataagattgctgaactaaaagatcgcttcaaacgggtgaaaatcaccgataacagcaatgtgttcaacactgatctactgtacaccattgagcttggctttagcctggatgtagctgaatgtatgattcactctgcgataaaccgtaaagagtcccgtggcgctcatcaacgtctggatgaaggttgtaccgaacgtgatgatgaaaaatgcctaaaacatacgctcgctttctatgaccctgaaagtgttcctcacctagaatacagtgatgtgaaaatcaccaaatccatccccgcaaaacgtgtatatggcggtgaagccgcagcacaagagaaaaagtataaggagcaggagaatggttga

SEQ ID NO: 9680 - DNA, 1026 bp, Photorhabdus luminescens; identical to SEQ ID NO: 6127

SEQ ID NO: 9681 - DNA, 414 bp, Photorhabdus luminescens
atgggattatcaagtagtcctattgcattacaggcagataatgggttctatttaagtcgaattgttcgaggaggaggttttgattttattgaagttaataaatctattattgatatttacacaaaatattctgcaacacaacttagctctaataagatagcacttcgtgcaagcaatggcctctatttaagtcggatatctctggctggtagcgattatatagtagcgacaaaatcagatattgatgtttattctatttttactttagaatatatcgatgataatgtgatagctttgtgtgcagataatggaaaatatctgagtcgaatcaatatcgggggtatttttaactatattaaaccggataaatatgacttggatatatattgccagtttaaagttataaaattgtaa

SEQ ID NO: 9682 - DNA, 978 bp, Photorhabdus luminescens
atgagcgaaacagcaaactggcagccaagtgcagctatcgccaacttgttgaaacgagcgactattttagcagaaatacggcgctttttcgcagatcgtggggtattggaagttgaaacacctgcgatgggtcagtttacagtgactgatatccaattgttttcttttcagacggagtttgttggcccaggtgccgcagatggtatgactctttatctgatgacaagtccggaatatcacatgaaacgcttgctggcagcaggaagtggccctatttatcaacttggccgctgtttccgtaatgaagaggcgggtcgttatcataatcctgaatttaccatgctggaatggtatcggcctcactatgatatgtatcgtttgatgaatgaagttgatgatttacttcagcaaatcctcgactgtgaaagtgcagaatcactctcttatcaacaagctttcttgcgttatttggatattgatccgctatcagcagagaaagaaaagctgcgtgaaatcgccgccaagttggatctgagtaatattgctgatatagaagaggatcgggatactttattacaacttttatttgctgttggtgttgaaccgcacattggtactgaaaaaccaacttttatctaccattttccggcttctcaggcttctttggcggaaatcagcaaagaagatcatcgagttgcagagcgttttgaagtctattttaaaggcgtcgaattggcaaatggcttccgtgagctgactgatagtcatgagcagtgccagcgttttgaacgggataaccgtaaacgtgcagcgttgggtttacctgttcgaccgattgatgaaaacctgattggtgccctgaaacaaggaatgcctgaatgtgccggtgtggcgcttggtgtcgatcgtttggtgatgttggctttaggggctgaaaaactcagtgatgttatggccttttcgataactaaggcgtaa

SEQ ID NO: 9683 - DNA, 1077 bp, Photorhabdus luminescens
atgcaaactccaattaagacaatgataattggtatcattttaacttcatcgatgtcaggcatcgcgcaagcagcagataagattgttatcgcccatcggggcgcaagtggatacttacctgaacacactctgccggctaaagcgatggcttatgccgaaggtgctgattatctggaacaagatctggtcatgactaaagatgatgaactgatagtcttacatgaccattaccttgatcgtgtaactgacgttgccaataaattccctaaccgtgctcgccaagatggacgctactatgccatcgactttactttgtccgaaatcaagtcattaaaattcacagaaggtttcgatattaaaaacgaccgacaaatacaaaatttctccaatcgtttcccaatatggaaatctgatttccgaatccatacttttcaggaagagattgaatttgtgcaaggattaaataaatctaccggcaaaaacatcggtatttatcctgaaatcaaagcaccgtggttccaccagaaggaaggaaaagatatttctactaaggtactagccgtgctaaaagcgtatggttacaccaagaaaagcgacaaaatttatctgcaatgttttgataccaacgaacttaaacgcatcaaaaacgagctggaacctaagttaggcatggatctgaaactggttcaacttattgcctacaccgactggaatgaaacttatgaaaaacaatcagacggcaaatggacaaattacagctatgactggatgttcaaacccggtgctatgaaagaagtggcacaatacgctgatggtatcggccctgattaccatatgcttgtggagaagtattccacaccaaccaatattaagttaactaatctggtaaaagaggctcacaccaacaatctggaagtccatccatacacgattcgagttgatcaactgcctaaatacgccaccagcggcgatcaacttttcgatatcatatataaccaagcgggcgtagacggtgtattcaccgattttcctgacttgggtgtgaaattcctgcaaaaacagcatcaacagaaataa

SEQ ID NO: 9684 - DNA, 1353 bp, Photorhabdus luminescens
atgttaagtattttcaagccggcacctcataggtcccggctgtcaacagaacaggtagatccagtctatcgtcgcttacgttggcaaatttttatggggatcttctttggttatgcagcttactatctggtaagaaaaaactttgcacttgcaatgccttatctggttgagcaaggtttttccaaaggtgagctcggtttcgcactatcagggatctctatcgcatacggcttctccaaattcatcatgggctccgtatccgaccgttctaacccacgagtcttcttacctgcgggtctgatcctcgcggctcttgttatgctgtttatgggtttcgtaccctgggcaacgtccagtatcactatcatgtttgttctgctgttcttatgtggttggttccaggggatgggttggcctccttgtggtcgtaccatggtgcactggtggtcacagaaagaacgcggcggtatcgtttctatctggaactgctcacataatgtgggtggtggtttaccaccattgctatttctgttgggcatggcgtggttcaatgactggaaagccgcactttacatgccggctttcgccgccattctcgttgcattgattgtctttgccctgatacgtgacacaccgcaatcctgtggcttgccaccaatcgaagagtataaaaatgactatccttctgattatacagagaaagatgaaaatgagttaaccgctaaacagattttcatgcaatacgtgttaccgaacaaactgctgtggatggttgctatggctaacgtattcatttatctgttacgttacggtattcttgactggtcaccaacctatctgcgtgaagccaagcatttcgcactagataaatcttcatgggcttatttcctgtacgaatatgccggtatcccaggcacgctactatgtggttggatgtcagacaaaatatttaaaggtaaccgtggtgcaaccggtgtgttctttatgacgctggttactatcgcaactatcgtattctggttgaacccaccaggtaaccctactgtagatatggcttgtatgttgattattggcttccttatctacggcccagtgatgctgactggtttacatgcccttgagctagctccaaagaaagccgcgggtacagccgccggctttaccggcttatttggttacttaggtggctctgttgctgcaagtgctatcatcggctacaccgttgactttttcggttgggacagcggctttatggtaatgattggtggtagtatcttgtccgttattctattgctaatcgttatgattaccgaaaaaaaacataaacaggaaatagcccaccaatatggctaa

SEQ ID NO: 9685 - DNA, 432 bp, Photorhabdus luminescens
atgacgacccgttataacagtgatttttatggttggactcaggagcaagccagtttgcttcgttccggtgatttgagccagttggatagggaaaacctttcggaggaaatagaaagtatgggaaatagccaaagaaacgagctggaatctcgtcttgaggtactgtttcttcacctcctaaaatggcaattccaatctgaacggcaaggtcggagctggaagcttacgattgaagagcagagaagaaaaatagcccgtcgtcttaaaaaaaatcccagcttaaagtcagaacttagcgaaatttcctctgatgcttatggtgatgccattattgcagcagagagggaaactaatattaggcgtagtgtatttcctgaaacttgtccttggacatttgagcaaataatggatgaaaatttttggcctgaatag

SEQ ID NO: 9686 - DNA, 1158 bp, Photorhabdus luminescens
atggaagttttcaataaggaaataactatgccaagtaaagactatgggttagttgataaagtttttaacgaaaattttaaaggaatgcatgtagaaacaataacagtaaaaatagcatcttcaggtactaaatatactaatgcggcaggagacgttagcaaatctacttttggacatgtatgggttgaatttcagggtgaatcaatcggatggggcttgggtgataataagcaagtaggaggagttgagaacataacttttagagattcaatcgcatacgataaatcaaaaatttccagtgttacatatccaatatattcagaaagtgtggttaataatatgagaaattacatttctgatttaaaaaatggaaatttctatgattttaagccgaattataacctccttactaataactgtatagattttgtaaactcaattcttcgagtttcacattatgataatgataaaaatggtatagatttcattcaggagttacggggaatgagtccaaatgccgtattagataattttgaagaaattgttgaagatcagaagagtacagagacaccacttattattgatttaactggcgatggtattattaccatagcggaaaatggttctatatattttgatcatgataatgatggtattgttgaaagttcaggatggatagaagccaataatgcatttctggtatgggataaaaatggagatggaaaaataaataacggaaatgagttgttcgggaataattctatattaaaaaatggagtcaaatcagtaaatgggtttgctgcattagcagatcttgacgataattttgatggtatttttgatcaaaatgatagtctatggaattcattagagttatggattgatgccaataaagatggtatcactgatgatggagagttgtataaattaagtgaatcaggaatctctgctataaatcttacctataaagaaaatggattcaaggatataaatggtaatattcatgggtttgaaagctcagtactctggaataatggggatacgactaagatagtggatgtgttttttgctgtggataaaaacatacagatggagtcactaaattcaaatattgacataatagggataaataatacttttagcgagattatattatga

SEQ ID NO: 9687 - DNA, 582 bp, Photorhabdus luminescens
atgagtcatttttttgtaaaaaataagaaatattttctctactcaatgttctttttttcttttattgttcagagttcagacatgaacatacaagataccccatcgattgtcttcaatcattcagatgattttttatcagaattctctattccaatgcctaaaaatgaagatgaatatcatgcattagtaaagaaagcaaatagtggtaatgtagatgcaaactggatgcttgctgtaatacaacaaacagaaggttatcgtcaagaagccagtgaaaaatataagttatctatatcaagaaatgataaatataagttaagatctatggttaatttgggatttattttagaggatgaaaataaatactcagatgcgagagcacttttcgaattggctgggaaaagtggatattttgagggctatcgcactattggaacaaattatttaaatgggattggtgtaaatcaagattttaataaggcaaaagagtattttaataaaggaagtcaaattgggtgtcatgaatgcacatttcttattaataattggagtgatgttattaaattgaaaaaatcagaatag

SEQ ID NO: 9688 - DNA, 1101 bp, Photorhabdus luminescens
atgctgaaaattattcaatccccatccaaatatattcaaggacctgatgccctgctccatattggtcaatataccaaaaccatcgccgatcacgttttggttatcatcggtaattccgcgatgaaattggtgggagatacggttcatagcagcctggaacaatacgaaattactcgtcattttgaagtgtttggcggtgaatgtagtcggaatgagattaaacgcctgtctgacattcttaaaaaacatgaatgccaagccgttattggtatcggtggcggcaaagtacaagatacggcaaaagcggtcgcttacgaatccagattacctgttctgattgcccccactatcgcttccactaatgccccaaccagtgctctctctgttatttacagcgatgatggcaaatatgaagactatctgtttctcccaacaaacccagatattgtcctaatcgataccagcattatcgctaaagccccaacccgttttctgattgccggaattggcgacgcgctggcaacttacttcgaagcccgcatttgtggagccggctataaacctcgaatgacagagggtgggatatcccgtaccgcagtcgccctcgctcatctctgttacgaaactttgttagaagagggctataaagcaaaactggctgttgaaaccgacgtcagtacacctgcggtggaaaatgtcatcgaagctattacttacttaagcggcctaggctttgaaaatacgggtgtagccgccgctcattccgtacacaatggctttaccgtattagaagaatgccaccacatgtaccacggcgaaaaagtcgccttcgggatattagttcaactaatactggaaaatagcccaaatgaagaattagatactttacttgatttctgtgtacagatgggactaccggttactctggatcaacttggcgtgaaggatggtgaaaaactgaaagaaaaagtgatggcagtggcaacagcaagttgtgccgaggacgaaaccattcacaacatgccttttgaagtgacaccggaaaaagtgtacgccgctattatggctgctgaccggatgggacgcgactggttgtattaa

SEQ ID NO: 9689 - DNA, 243 bp, Photorhabdus luminescens
atggtgggaaatgtgtgtttttttgatctatgcccggatctctgtattggaacaagcccttcttctccattaggcttggggaatctggcttctggagtgcttgagtggatcagacagtttttctggcaaggtattcccccttcggaggcttatcttaaaatgatccatgaagctttatccgttcctcccggcgctaataacttaagaatgaattgtcgtttgttaacctccgaggcaggatga

SEQ ID NO: 9690 - DNA, 249 bp, Photorhabdus luminescens
tgggaaggaggtagccgaaattatctttggaaccaaataaaagcagatattttaaacctacccataaaagtacttaatgaagcagagacgacggtattaggcgcttctttctttgcttggtttggcgtcggttgctatgagtcgtctgaaaaagcccgtgaacagttttcttatcactatgaaccttatacaccaggtgaacaccaagaagcttatgattcattagttcaagattttatacagcagtag

SEQ ID NO: 9691 - DNA, 180 bp, Photorhabdus luminescens
ttgtttctttactcacttgtaaaactacggcaagttcagcagttgttaagattcatggtggtgaagaagatccatgattttttgatgacgttcatttctcataaaggaatcccttttatattgggacagaataggattattctaaccaatatcagaattaaaaaatcacgccttttttag

SEQ ID NO: 9692 - DNA, 453 bp, Photorhabdus luminescens
ttgcatggaagagcgaaaagtttaaacagggaaacgcagggtaatggtgactcttttaacatgcgggttaagagccatttttcgagtaaatcgcttatcgctcagcaagccgtgacttggataagagaaggaatgataatcgcacttgatgcaagttcaacatgttggtatctggcaaagcaacttcctgatattaatattactatttttaccaatagcattcgtatttgccatcaattatcaaagaagaaaaatattcaattaatcagttcagggggagttttacatcgtaaatatgcttgttatattaattcatcgcttattacacaattaaaaaatttagagatcgatctatttattttttcctgtgacggcattgatgcaaatggcgatttatgggattcgaatattgataatgcacaatttaaagaaattaacccgaattctgcttaa

SEQ ID NO: 9693 - DNA, 885 bp, Photorhabdus luminescens; identical to SEQ ID NO: 6610

SEQ ID NO: 9694 - DNA, 675 bp, Photorhabdus luminescens
atgtttttatcaactacaattacacaacagcgcgctaccgctttaatttggctttcgctatttcacattctgattattatttccagtaattatctggtgcaactacccgtctctattttcggttttcataccacgtggggagcctttacttttccatttattttccttgcaacagatttaacggttcgtatctacggcgcaccactggcaagacggatcattactaccgttatgatccccgcattactgacttcttatattatttctgccctatttttccaaggcgagtggcaagagtttaccgcgctgcttgaattcaatctctttgttgcccgtattgcctgtgccagctttatggcttatttccttgggcagatactggatgtatacgtcttcaatcgtctacgccggagacgcaattggtgggtcgctcccgcagcagcgatgtttttcggcaacttacttgatagcctagcctttttctctatcgctttctaccgtagcaccgatgctttcatggcggctaattggatcgagattgggttagtcgattactgctttaagctattaatctgcttactctttttcctacccgcttacggcattttattgaacctaattttaaagtacttctttgcctatcaaactaacaatagccacattcaagttcgctga

SEQ ID NO: 9695 - DNA, 255 bp, Photorhabdus luminescens
atgcccgatgtgtttactcatccagacaaaacccttgatacacaagggcttcgctgtcctgaaccggtaatgatggtacggaaaactgtgcgtcatatggaagcagggcagatgttattaattcttgctgacgatccggcaactacgcgtgatattcccagtttctgccgttttatggagcatcaactggttgctcaagaaacagaacaaatgccttatcgctatctggttcggaaaaaagagagtcaactctga

SEQ ID NO: 9696 - DNA, 2286 bp, Photorhabdus luminescens
atgtactcaaattcaaacaaaaatagtgctcatcaacataaccaccagcatggaagctgctgcgcgacgacgacttgttcagatcaggctaaacaagttagtgaacatttacatcatcatgaacatgaacatggtaaggcttgctcacataagcatcacccttcccatgatacacaagagacacaagcacctgagcttttggcaaaccaacgtttcagttgggtggttaatggtatggattgtccaagttgtgcccgcaaaattgaaaccgcggtcagcaaaattgcagaagtgaaacaagccaaggttctattcgcaacagaaaaactagttgtggatgcagatacagatatacgttcagcggttattcaagccgttaatcaggctggatttactctacgcaattccgattcaagtcagaaagcagaaaaaagcagccgctggaaagaatttgcaccaatcatcactctttcactgatgatgctgataagttggggaatctctcacatcaatccctcatttggccgtattgcctttatcatcaccaccgtgattggattggtacctattgttaccaaagcctggcagctcatacgatcaggcacgccattcgccattgaaacattaatgagtgttgctgccataggtgcactgtttattgatgccaccgctgaagcagcaatggtactactgctgtttatgcttggtgaaatgctggaatcttatgctgccggccgtgctcgtcgaggggtgagtgcattaatggcattggtgccggaagaggcactactggtaaaaaacggtgagaaaaaaattgttccagtttcagaccttcgccctggcgatattatcgaaattgctccaggcggacgtttacccactgatgccgaattactcaattcattcgccagctttgatgaaagtgcgctgacaggcgaatctattccggttgaacgaatgcagggagaaaaagttccggcaggttgtttatccgtggatcgtgcaatccaaatgaaagtgctgtccgaacagggcaacaatgccattgaccgtattctgcaactgattgaagaagccgaagaacgccgtgcgccgattgaacgcttcattgaccgctttagccgaatttacacgccactgattatgctgttctctgcgttggttatcatcattccaccgactgtattcagccaaccttgggaaacatggatctaccgtggtcttactttgctactgatcggttgcccttgtgctttggtgatttccacacccgccgccattacctctgcccttgcaacagcaacccgccgaggtgcattgattaaaggtggtgcggcgctggaacaattgggactcatcaccactatcgcttttgataaaaccggtacgctgaccgccggtaaaccacaagtcacagatatacaaccagcagaaaatatcagcgaatctcagttattagctttggcttccgcagtagaaagcggctcccaccacccactggctaaagccattttgcaatgcgcagaaagtaaaaacgttaatattaccgaagccgaacaccgtaaagcgctggcaggggttggtgttgaaggtcagttaaacgataaacgtattcttgtcagcgcgcccggaaaactgccagcaaacacgttatctgatcgttggaaacaaaaaattgttcagttagaagattgcggtaaaaccgttgttgccgtgatgcatgatgaacaatttgccggccttatcgcgatgcaagatacgttacgtcaagatgccattgatgctatccgtttactgaaagatcaaggtattaaatcagtgatgttgacgggggataacccacgtgcagcaactgcaattgctggtcagttaggaatagatttccgcgccgggttaatgccggaagataaagtcaaagcggtcattgcattgaataaagatcacagcacaatgatggttggtgacggcatcaacgacgcacccgcaatgaaagcttccagtatcggtgtcgcaatgggaagcggtaccgatgtcgctctggaaaccgcagatgcagcattgactcacaaccgtctgaccggtttgtcggaaatcatcaccctttcccgcgcaacgcacaataatatccgccaaaacattgctattgcattggggctaaaagggatcttccttgttaccagcctattgggtatcacaggcttgtggatggcagtactggcagattctggcgcaaccgctcttgtgacggcaaacgcggtaaggttattgaggattaaactgaaataa

SEQ ID NO: 9697 - DNA, 627 bp, Photorhabdus luminescens
atgagctggccatttattgcagtatttctttctggttggttgtatgttgatgcagcttaccgtggcccaaactggcaaagatggctattcaggccagtcactctgctattgttgttattgtgggcatggcaagcgcctgagctgcatatttcaggttatctaatctgttttgggttatttactgctttaatatcagatgctctgcgcatgctccccagtaagtattcactattctctctaagcacattattcctctgttatctgctctacacgataagctttatcatgcagatgaatttcagtttcttcttcccgctgccattaattttactggttcttggctccattattctgctggttatttggaataaactggaagaaaggcgctggctggtcgttgcctcagttgtcatgctcctgataatggtgtggatggcaggtgaacaatacttctcccttaatacagcgtatggtttctccctattagctggcactgtcttgttgttactgtcacatagtgtctggttgattaaccattaccgtttccagttcaaatcttctaaggcgattgttgcaacctgttattttatcggccattttttgattattcgttctatttatctttaa

SEQ ID NO: 9698 - DNA, 282 bp, Photorhabdus luminescens
atgcttattcaattgggcaaactgttaatgatctgcgtttggggatttctgatctttaacctgatccatccatttccaaaaccattgaagtattttatggatatcgccatgattttcatggtggtcatgcatgcatttcaaatgctgcttctaaaagccagtcagcccaaagaccaaaaactctctagcctgatacaaaccaagatcttcttttttggtgtctttgaactactgtcaatgcagaaaaaacaacggaaagagaaaagtcatcacccaaaatag

SEQ ID NO: 9699 - DNA, 585 bp, Photorhabdus luminescens
atggcaaagaaaccacaacggcaatcgatgggacaaatccgcattattggcggaaaatggcgaggtcgaaaattacctgtaccggatagtccaggattacgtccaacgacagatcgcgtcagagagacgctatttaactggctagccccgattatccaagaagcacactgcctggattgctatgcaggaagcggagcgcttggattagaggcactttcccgttatgcagcacaggttaccctgattgaatatgaacataatatagctaaacaactttccgctaatttggatctgctcaatgcccaaaatgccgaagtcattaacgacagtgcattaacctatttatctcaaccaggaacatcctacgaggtcgttttccttgatcctccttttcgtaaaggaatgcttagcgaaaccataaaattgttggaagaacaaaattggctggcagatgaaagctggatttatgttgaggctgaatccgaatcaacggcgattgatgtccctgttaactggcaacttcatcgtgaaaaagtcgccggacaagtcgcataccggctctatatccgttacttacctgcataa

SEQ ID NO: 9700 - DNA, 1275 bp, Photorhabdus luminescens
atggcaaaagagaaaaaaagaggctttttctcctggttcgggcgtggccgtcaggaagaacagcaaaaagaagagcaattagcagtggagcaggcagaacagcagcgtgttgctgaggaagctgcaagattggcggcagagcaggcagaacaacagcgtgttgctgaggaagctgcaaggttggcggcagagcaggcagaacagcaacgtgttgcagaggaagccgcaaggttggcggcagagcaggcagaacagcaacgtgttgcagaggaagccgcaagattggcagcggagcaggcagaacaagtacaaaccgaacagccagttatatcaaaagagcaagagcgtccgactaaagagggctttttctcccgcttgaaacgcagtttggttaaaactcgtcagaatttagggtccggttttcttagtctattcagtggtaaaaagatcgatgatgacctgtttgatgaattggaagagcagttattgattgctgatgttggtgtcgatactacccgtaaaatcattagcagtttgacagaacatgccagtcgtaaagagctaaaagatgcagaagcgttatatgccaaactgaaagaagagatgtctggtattctgactaaagtgaataagcctctggacattgaaggaaaaacgccgtatgtcattctgatggttggtgtaaatggtgtgggaaaaaccacgacaattggtaaattggctcgtcaatttcaggcacaaggtaaatctgtcatgctggcagccggggatactttccgtgcagccgccgttgaacagctacaggtgtggggggaacgtaaccatattccggtagtggcgcaacatactggcgcagatcctgcttccgtgattttcgatgctattcagtcagctaaagccaaaagtgtcgatgtcctgattgcagataccgcgggtcgtttgcaaaataaatctcatctgatggaagaattgaagaagattgtccgagtgatgaaaaaactggacgaaaatgctccacatgaaattatgctgatattggatgcgagtaccggtcagaatgcgataagtcaggctaaactgttccatgaagccgttgggttgacaggcatctcattgacaaaattggatggtactgccaaaggtggggtaattttcgccattgctgatcagtttgaaattcctattcgttatattggggttggtgaaggaattgaagatctacggccatttaaggcagacgactttatagaggcactttttgcccgagaggattaa

SEQ ID NO: 9701 - DNA, 666 bp, Photorhabdus luminescens
atgattcgctttgaacaggtcagtaaagcttatctggggggacggcaagccctgcaaggggtggattttcatttgcgccctgcggaaatggcatttctaatgggtcactcaggggcaggtaaaagtaccttgctgaaactcatctgtggcattgagcggcctagcgccggacatatctggtttgccggtcatgatatcagtcggttaaaaagccgtgaggtaccttttctacgtcgtcagattggtatgattttccaagatcatcatctgctgctggatcggaccgtatacgataatgtggcaatgccgctgattatttcaggtgcaagttctgaagatatccgtcgtcggacttccgcggctctggataaggttggtctgctggacaaagcgaaaaatttcccaattcagctttcagggggagaacaacaacgagttggtattgctcgtgcggttgtgaataagccgactgttttattggcggatgaacctaccggtaatctggatggtgagttgtcagaaggtattttacgactgtttgaagaatttaatcgggtaggggtgacagtgctgatggcgacccatgatatggcactgattgaaagacggaaatatcgtatcctgactctgagccagggccgtatggcgggagagtataatggttaa

SEQ ID NO: 9702 - DNA, 975 bp, Photorhabdus luminescens
atggttaaaaatgtgcgtaaggcagcggggaaagtaacacgatcgagaagtaaagttttacaaggaggatggcgtgagcagtggcgctatgcttggatgaatacgttgacagatatgtcacgtcagccgttggcaactttgttgaccgtgatggtgattgctatctccctgacattaccaagtgtttgttacattgtgtggaagaatgtcagccaggctgcggaaaaatggtatcccacccctcaactgacggtatatctcgataaatcactggatgatagcagtgcgcagaaattaataagtgagttgaaagcgcttgatggtgtggacaatgtcaactatctctcacgtcaggaagcaatgacagaattccgcgcttggtctggctttggtggcgcgttggatatgttggaagagaatccgttgcccgcggtggctattatcacaccgaaaatcgattttcagagttcacagacgctgaccacgctgcgtgatagagtttctcaggttaaaggtattgaagaagttcggatggatgatagctggtttgcccgtctggcggcgctgactggtcttatcggtcagattgtgacagtaatcggtattttgatgatcgttgcgctgtttttggtcatcggtaatagtgtgcgtctcagtattttcagtcatcgtgatacgattaacgtgatgaagcttattggtgcaacggatggctttattttgcgcccgttcctcaatggtggtgtgttgctaggggctttgggggcaattttatcgttaattttatctgcactattggtgtggaaactttctgatgttgtaacagaggttgccagcgtgtttggtacgacatttaatttacatgggctttcatgggatgagtccctgctattagttttgctctctgcaatgattggttgggtcgctgcttggttggcgacaactcagcatttgcgtcattttacgccagaataa

SEQ ID NO: 9703 - DNA, 249 bp, Photorhabdus luminescens
atgaaccaacgttcaacatacagcggtacagtctatcaccagaatgtgcatattcaagctacagatccgtggaaaagtaataattttagcaccgaccatccctataatgggatcgcagaacaaaaaataacagatagttttatatttatgcaattaactttatttgtactatccccgataaatattaactccatcccacaaaagtatccgctaggttcactgggaaagtacaagcgcctttttaattaa

SEQ ID NO: 9704 - DNA, 858 bp, Photorhabdus luminescens
atggccaaagaaatgcaaaccttagcgttagttcctcaaggaagtctagagggctatgtccgtgcctctaatacctatccaatgctgacagcagaggaagagaaggaactggctgaaaggctgcattaccagggagatctggatgcagctaagaagctgattctgtctcatctgcgcttcgttgttcatgtcgctcgtagctatgctggttatgggctacctcaggcggatttaattcaggaagggaatattggcctgatgaaagcagtacgtcgttttaacccggaagtaggggtgcgtctggtttcttttgccgttcactggattaaagctgaaatccatgaatatgtactgcgtaactggcgtattgttaaagttgcaacaactaaagcgcagcgtaagctgttctttaatttgcgtaaaactaaacagcgcttagggtggttcaatcaggacgaagtagaaatggtcgccaaagaacttggcgtgaccagtaaagatgtgcgtgagatggaatctcgtatgtcagcgcaagatatggcgtttgatatgtctgccgatgatgatagccaggaaggtcaaccggttgcgccagtgctgtatcttcaagataaagcttctgattttgcagacggcattgaagaggacaattgggaaaaccatgcggctgataaattatcggtggcgatagaaagcttagacgagcgcagtcaggatattatccgttgccgctggttagatgatgataataaatctaccctgcaagagttggcggataagtatggtgtttctgcggagcgtgtacgtcagcttgaaaagaatgccatgaaaaaattgcgtgtggcaattgaggcataa

SEQ ID NO: 9705 - DNA, 1140 bp, Photorhabdus luminescens
atgaaaattgttattgcgcctgattcatttaaagaaagtctcagcgccttacaggccgctgaagcgatagaacaaggatttcgtgaaatctatccacaagctgaatacattaaattgccgatggcagatggaggagaagggacagttgaatcgatggtagcagctactggaggaaagattgtacgtctgttggtcactggtccgttaaatcagccagtggatagtttttttggcgtgctaggtgatggagaaaccgctgttattgaaatggctgcggcttctggcttacatttggtgccgatggaaaagcgtaatccgttgataactacgacttatggtaccggtgagctgatgttggctgctttggatcaaggtgtcagaaagataattttaggcattggcggtagtgcgactaatgatggcggtgccggtatgatgcaggcgttgggagcctgtttgcttgattctgatggtaaagcgttggggcttggcggggctgcgctaagtcggcttgctaaaattgatctttccggtttggacgcgcgtttgaatcgaactgaaattatcgttgcctgtgatgtaattaacccgttatgtggtgagtttggtgcatctgccattttcgggccacagaaaggggcgacaccagagatggtgaaagaattagatgcagctctgcgccattatggtgaaaaaattgaattactgaccggcattaaggttattgacgtacccggtgcaggagccgctgggggaatgggtgttcctttacttggttggctggacgctaaattgcaaccgggaattgatattgttatctccacgctggaattggcaaaggtagtacaaggcgctgatctggttattacgggtgaaggccgaatagacagccagactatttacggtaaaacgccgattggtgttgctcgtatcgccaaaaagtatgctatttcaaccattgcattggttggcagtataagtcaggactatagcattgttcatgagcatggattggatgccgttttctcaattatgtccggcgtctgttctctttctgacgctcttgtttgcgggcatgagaatttgagggtaactgcccgcaatgtggctgcggtctggaaaatgggtcagctagaataa

SEQ ID NO: 9706 - DNA, 399 bp, Photorhabdus luminescens
atgaagctaactattgaacaacttactgttttgtcagcacaagatattattgatctaaagaaaatctggcctcaacaggctccagagcaatggcaaagttggttaaaaaatgaaaataaactgttcgctgctcgctttaatgatagattactggccgcagtaaaagtgactttcagtgatcaatccggcctgcttaaagatttatgtgtccgtgaaataacacgccgccggggggtgggtttatatttgataaatgaaataaaagctcagcatcccactgttaatcaatggaagttaagccttgaagggttctcagatgctaacgaaccggcattaaaaggttttatgagcgcctgtagtttttactacgataccaagtcaaattcttattctagctga

SEQ ID NO: 9707 - DNA, 1113 bp, Photorhabdus luminescens
atgaaaatcatagcaggtaaaacgctattagcaggctgtattgccatgatgatgagtcactcactgtgggcacaagagatcaaagtggcgattgtaggagcaatgtctggtccagttgctcaatatggtgatatggaatttactggcgcacgtcaggcgattgcagatatcaatgctcatggtggtattaatggtaataagctggtgggggttgaatatgatgatgcgtgtgacccgaaacaggctgtggccgtcgctaataaagtgattaatgataacattcgttatgttatcggccacttatgctcttcatctactcaaccggcatctgatatctacgaagatgaaggcgtcattatgattacacccgcggcaaccaatgccaatttgacaactcgtggctaccagatgattctgcgtacgaccgggttggattctgatcaggggccaacggcagcaaaatatattgctgaaaagattaaacctcagcatatagcgattgttcacgataaacagcaatacggtgaagggttggctcgatctgttcttgataaattgaaaaaagcgggagccaatattgtcttgtttgaaggcgttactgctggtgacaaagacttttcggctctggttgcccgcctgaaaaaagagaatgtggattttgtctattttggtggttattaccctgaaatgggacaaattctgcgtcaggctaaacaggctggtctgaatattcgctttatgggaccggaaggtgtaggtaactcctcgctatccaatatcgccggagtcgcttctgaaggcatgctagtcacattacctaagcgttacgatcaggtaccggtgaataaagctattgttgaagcgatcaaaggaaagaaaggcgatccgacaggtccgtttgtctggaccacctatgctgctctgcaatctctggctgcggcaatgaaccgtaccggtagtatggaaccgactgatttggtgcaagacctgaaagcgaatccagtggataccgtaatggggagactaagctggaatgccgttggcgatctaaaagggttcgaattcggtatttttgaatggcatgcagatggttcttctacttctgtgaagtaa

SEQ ID NO: 9708 - DNA, 927 bp, Photorhabdus luminescens
atgtcggagcaatttctctattttttacaacagatgttaaatggagtgactctgggtagtacttatgcattgattgccattggctatacgatggtttacggcattatcgggatgattaatttcgctcatggtgaaatttacatgattggtagctatgtctcctttatggtcattgcggctctgatcatgatgggaattgatttgggctggttgctgattactgctgcttttttaacatcaattgtcattgccgctgcttatggttggagtattgagcgagtagcttacaggccagttcgccattccaaacgcctgattgccctgatttcagcgattgggatgtctattttcttgcaaaactatgtcagtctgtcacaaagttctcgcgatctggcattgcctggcctgattaccgggcagtgggtattaggcgaaagtgatggattttctgccagtattagcgcaatgcaactgaccatctggatagtgacatttcttgccatgctgatactgacaatgtttatccgctactcccgcatgggacgtgcctgccgtgcttgtgcggaagatgtgaaaatggcgagtttgttgggaatcaatactaaccgagtgatttccttaacctttgttatcggtgcagtaatggctgcaatagccggtgttttgttggggcagttctacggtgtaataaatccgtatatcggttttatggcaggcatgaaagctttcaccgcagcagtattgggaggaattggcagtatcccgggggcgatgattggtggtttgatcttgggaatttctgaagccctaacttctgcttatctgagtacagaatataaagatgccgtttcctttgctctgctcattgttgtgctgttgtttatgccgactgggattttaggccgtccagaggtggaaaaggtatga

SEQ ID NO: 9709 - DNA, 1278 bp, Photorhabdus luminescens
atgaaacatgctaattgggtgaatgccattatcgcctcagccgctttatttgtgttgtctgtctttatgatggggatgcagttatcgctggatggtacgcagttggtcgtccatcatgccgatgaagtgcgatggttatggattggtattggctgtgcggttgtgtttctgttccaattattgcgtccggctgttcagcagataatgaagaaagtaccgattaaaagctggtcattgccggatttcgatggctcaaccaaaggacaaaagttactggcaatattggtcattattgctgcaattatctggccgtttattgtctcccgtggtagtgttgatatcgctacgctgacattaatttatgtcatgctagggctgggtttgaatgttgtggttggtttatcggggttgctggtacttgggtatgcaggtttttatgctatcggtgcttatacctacgctttgctaagtcactattatggattaggattttggcagagtttgccgctggcggggttaacggctgctttatcggggttgttgttgggttttccagtattgcgattgcgaggtgattatctggcaattgttacgcttggttttggtgaaattgttcgcattctactgttgaataatactgaaataaccggtggtccgaatggtatcagtcagatcccaaaacccactttcttcggactggaatttaatcgtagtgtgaaagaggggggttgggatactttccacaacttctttggtttgaaatacgatccaagtgatcgggtcatttttctctatctggtggtgttactgttggtaatactgacagtattgattattaatcggctactgcgtatgccattaggtcgtgcatgggaagcgctgcgtgaagatgagattgcttgtcgctctcttggtttaagtccaacccgaattaaactggctgcgtttactatcagtgcggcatttgccggttttgcgggtactttatttgctgcccggcagggttttgttagcccagagtccttcacttttgctgaatctgcttttgtgttggcgattgtagtactcggagggatgggctcacagactgcggtgattctagcggccattttgttggtggtttcccgtgagatgatgcgtgatctgaatgcctacagtatgttgctgctaggggcaatgatggtattgatgatgatttggcgcccgcaagggttgctaccgacaaaacgccgtcatgttaaattggaacgacaggtacagggaggaaagcaagcatga

SEQ ID NO: 9710 - DNA, 774 bp, Photorhabdus luminescens
atgagtacaacaccattattgcaagtttccgatctgaccatgcgcttcggtggcttgctggcggttaacaacgttgccctgaggttaaatcagagggaaattgtttctcttattggccctaatggtgcagggaaaaccacgatctttaattgtctgacaggattttactgtccgactagcggtacgataaagctgcgggaaaaacatctggaagggttatctgggcaggctattgctcgtatgggcgttatcagaacattccagcatgtgcggttgttccgggagatgacagtgatagagaatctattagtggcgcagcatcagcatctgaaaagaggtctttttgccggtctttttaaaacgccggcattccgccaggcagaatctaaggctgtagattgggcgataacttggttagaacggattggcttgttaccactggcaaacagacaggcaggtaatctggcatatggtcagcaacggcgtttggagattgcccgctgtatggtagctcgtccggaaattttgatgctggatgaacctgctgcggggctgaatccgaaagagacagaggaacttaatgctttaattgctgaactgagggaacatcatcaagtttctgtattgttaatcgaacatgatatgaaattggtgatgggaatttcagatcgtatctatgttgttaatcagggaatgtctttggcgcaaggacggccagaagagattcgtaacaatccggatgttatccgggcatatctgggcgaggtgtattaa

SEQ ID NO: 9711 - DNA, 702 bp, Photorhabdus luminescens
atgttggaatttaagcgggtatctgcccactatggggaagttcaggtgttgcatcaggttagcctgaatattcagcagggagaaattgtcactctgattggtgcaaatggcgcaggaaaaacaacattgcttagtaccttatgtagtgaacccagagcaaccgaaggttctattatttttcgtggtaaggacatcacccaatggccgacatctcgtattatgcgtgaggacattgcgattgttcctgaggggcgcagagtgtttgctcgtatgacagtggaagagaatttggcaatgggcggtttttttgctgataagactcagtatcagcagcgcattgagcgggtttatgatctatttccgcgtttacaggaaagacgtcaccagcgggctggaacgatgtccggtggtgaacagcaaatgttggcaattggccgtgctttaatgagtcagccacagttattgttgttggatgagccttcattgggattggcgccgatagttatcattcagattttcgatactatccagcagttgagggaagaggggatgacaatctttttagttgaacagaatgcaaatcaggcgttgaaattggctgaccgaggatatgtattggaaaacggtcagatcgtactagaagacagcgggtctgcattattggttaatgaagctgtgagaaatgcgtatttggggggatag

SEQ ID NO: 9712 - DNA, 402 bp, Photorhabdus luminescens
atgtctagaataaccattgttgttgattcagatgagcagaaagcagagttttattctaattcccctgttccagtacataaagacttaaatgcagttggtcctttgagtgatgtgactatatcacctcatgctagtgtggaagtatttagaatagatacaccaataattccagaatccagaagatctctgagagttgtaaataccgggctatcaaatagtgtcacggctaaattttactggtctcatagttttacctctgaatggtttgagtctggttctatagatgtaggattaggagaagagaaggtgttaaacgtgcctaataactctttttattatagtaaatttgttatctataataatacggataaagttgcttatgtgacggcaaatttggtttaa

SEQ ID NO: 9713 - DNA, 1260 bp, Photorhabdus luminescens
atgcatacagaaaatgttttagacataagaaccattgtggctaatgaatatgccgtaaaaacgagtgcagtagagtgggatgttactgatattgtaaaaaatgcaatcatcgggggaatatcttttataccttcagttggccctgctatatcttttttagtcggtttattctggcctcaatcgaaagaaaatatatgggaagggattgtcaaacaaattgagaggatgatagaggagtctgcgttaaagacgattaaaggtatccttgctggtgatattgcatatatacaagagcgaatggcaaccgttgctgaccttcttgataagcatccaggatctgaagaagcgaggagtgcttttaataatctggcagaaaatatagatggttatcacaaaaaatttaataatttttcggatgatgttaactatcaaatattacccatgttttctactacggttatgatgcagataacatattgggttgctggtttagagagaagaaatgaaatcgggcttagtgatattgatattgaaaaagtccgaggattaatcaaaaagacggtagaacaggctaatagttatattaataatatatatgatagagagcttaatgatgctcttaataactcgacggctgacactgttgcaaataatgttatgtctgttcatggtcactgtcgtttacatggggttgaatatatcagtatttgggataaattaagtgaagccgagtcggtaaataatagaatctatgttgatgttttaagttattctactttctttgatcgtcaaacagcaaaagccagaattcaggcattgactccagagaaagatatggctccacctctcaaaccggctcttaatggaggaaaaagaagaaagatagattcgttaacggggcatattgtgcgtattggaggggctccgagagtcggagggctgaccgttgtttttgatgatggtaatagccatcgattaggtacaatatctggtgagacggcatctatttctctgaatggcagtcgaattaccagtttggaagtatggggcaatggtgctgttgatcaagcggtctttactttgagtgatggtcgttcattgtcatttggcgcacctggaacatctcgatataggaaattttatgttggtgaaagtcactatattgcagggatatatttgtccagtgattacagcccattagcaggtcaggcagcaaatatcgctgtatcttatcagttaataaatgatgatgaaaaataa

SEQ ID NO: 9714 - DNA, 780 bp, Photorhabdus luminescens
atgacatggctttctcgtgatgatagttttgatcctgatagctttggagtaccggtagtagggattgcggctgaactaggccagcatgactcaggatttcatcaacatgaaatgggacaattattatttacccagcaagggtgcatcaatatcaccctggcagatcacttatgcatacttccaccaactcgggttgcctggattccaccgcgtattattcatagagcagaaataaaaggctccgtcgggtatcgttcgatttatttagatgtaaatcggatcggatatttagcagaacacgttgaggtattggaagttacacctctgttacgcgaagtattagagagaatagcgctggctccctttaatacagattggttacaaggatctgctgctaacctattggctgtttgttttgacgaaatccatctggcaaaaagagaaccgacattattaccactcccttttgaccgccgtttggcccgtattcctatgaccacactgccaccaacactcaaaatactggcaatgaatatcggagccagcgaaaaaaccatcagtcggatatttcgccgagaaacaggacttagctatcaacaatggcgacaacagtggcgtttaatcaagtctatagaattactagcaaaacagggtaatttgtcatctgtcgctagcgaattagaatttgccagtgatagtgcttttgcaatctttttcaagaaaatgaccggtcgatcaccaagagaatatatgtctgcttataaggaacgtagttattga

SEQ ID NO: 9715 - DNA, 1164 bp, Photorhabdus luminescens
atgcaacgtaaacttggacttacgctggcaacagcgctaatgatgtttccacaaattgtagaaaccatctatagcccggcattaaccaatatcgcaaaggaatttaaagtgagtgctgagcaagccgctcaaactttatctttatattttttcgcttttgctatcggtgtagtcgtttgggggcgtatgtgcgatctcataggaagacggccaacgatattgagtggattattactctatagcggtgcttcattaatggcattgttcagcgtccaatttgaattattactggccgccagaatgttatctgcattcggtgccgcagtaggctcggtaggaactcaaacaataatgagagattcttatcaaggaagtgaattagctcgtgtgttttctatcatgggcgtagctttagcagtaagtccggcagttggcatggtaagtggttctattttggtgtacttctggggatataaaggtgtcttttccggcttatctttacttgcggtattactatcaggttggtctgctatttgtctgcctgaaacccgcccagtgtcaatggtaacaatatcgttaatagatactttgattatcatgcttaaggatgtagcaatttggtgcaatgcgctgttaatagcgttctttaatctatgtttgtttagctattatcaattggccccattcgattttgaacggttgggactttcctctgagatgtttggttataccggattgcttttggcgctgggagccggtattggtgcctttttaaatagattcttgttgaacaaaaggtggcattcatcgaacttaatgttgcttgcttctattatcaccctgataggaggggggatgataatggttctggaagatacctggttgtttatcttgcctatggttttgattgttgtgtcttacggaattgcagtccctaatatcttggcttctgcattgattaattatacggatagattgggaacagcaggagcgctattaggcttgctttattatttgatgttaggcataggtcttgcgctagcgggttggagccaacatcttggtgttgtcttgatgtgctgtggttgttttattttattgttagttataatcaattttttcatgttaataaggactgaaaataatatatcagttacggaataa

SEQ ID NO: 9716 - DNA, 297 bp, Photorhabdus luminescens
atgttcgaacaacgcgtaaattctgacgtactaaccgttgctactgtaaattcacaagatcaggtaacccaaaaacctttacgtgattcagttaaacaagcactgaagaactattttgctcaattaaacggtcaagatgttaatgatctgtatgagctggtattggctgaagtggaacagccattgttggacatggtgatgcaatacacccgtggcaaccaaacacgtgctgccctgatgatgggcatcaaccgtggcacactgcgtaagaaattgaaaaaatatggcatgaactaa

SEQ ID NO: 9717 - DNA, 966 bp, Photorhabdus luminescens
atgcgtatcggacaataccagctgaaaaactgtcttattgcggccccaatggctggcataactgaccgcccgtttcggtcactatgttacaaaatgggtgcaggtatgacagtatcggaaatgctttcttccaaccctcaggtctggaagacagacaaatcccggctacgtatggttcacagtgacgaaccgggaattcgttccgtgcaaattgctggaagtgatcccgatgaaatggcagcggcagcgaagatcaacgtcgctaatggtgctcagatcattgatatcaacatggggtgtccagccaagaaagtgaatcgtaagctagcaggttcggctttactacgttacccagaattggtcgaaaagatcctttctgccgttgtaaacgcagtagatgttcctgttacgctaaaaattcgcactggatggtcgccagaagaacgaaactgtgtaaagattgcccaattggccgagcattgtggtatccaagctctggcgatccacggcaggactcgttcctgtttgtttaacggagaggcagagtacgacaatattcggacagttaagcagactgttgccatcccggttattgccaatggcgacattactgacccgcttaaagccagagcagtgcttgaatacaccggggctgatgccctgatgataggccgcgctgctcagggaagaccctggatcttccgggaaatccagcactatctggcaacaggagaactgctgtcaccgatgccgattggcgaagtgcagcatttaatgaacgagcatatacaggaattgcacgacttttatggtccaagcaaaggagcccgtatcgcacgtaagcatgtatcctggtatctccgggagcatgctcctgatgaccagttccggcgcacattcaacaccatagaggatgccagcgaacagctggaggtgttgggggcatatttcgaaaattttgcgtaa

SEQ ID NO: 9718 - DNA, 891 bp, Photorhabdus luminescens
atgccctggatacaacttcgattaaatactacaggacagctcgctgaatcccttggagatgctctaatggaaaatggagcagtatcagtcacctttcaagacagccacgataatcccgtattcgaacccttaccaggcgagactcgtttatggggagacacagatgtcatcgggctttatgatgctgaaacagatatgaaagcagttatcagccagctcgaacaagttcctgagttgggtgaaagatttattcataaaattgagcagttggaagacaaagactgggaacgtgaatggatggataacttccatccaatgcgctttggcaaccgcttgtggatctgtccaagctggcgcgacgtccctgatccagatgctgtcaacgttatgctggaccctgggctggcttttggtacaggtactcatccaaccacatcgttatgtctgcaatggctagacagtctcaatctggaaggtaaaacggttatcgattttggttgcggctccggcatactggcaattgcggcgctaaaactcggtgcaacgcacgctattggcatagatatcgacccacaagctattcaggccagccgagacaacgcagagcgtaatggcgttctggagcatttaacgttatatttggcgaaaaatacaccaaccgatcttgaatctgatgtagtaattgctaatattttggcaggccctctgcgtgaacttgcccctgtgattggtgcattaccaaaaccgggtggcctgttaggtttgtcgggtattttaacgaaccaagcagaaagtgttattcaggcttatactgataaattcgtaatcgatcctgttgcggaacgggaagaatggtgtcggatatctggggtaaaaatagcaacaaattga

SEQ ID NO: 9719 - DNA, 1452 bp, Photorhabdus luminescens
atgagaatgcaaagtgaagttatcttacctctgcttggctatcttgcactggtatttctcctgtcagtttacgcttatcaacgccaccagaaaggccccttcctgaccgaatatttccttggcaaccgttcaatgggcggctttgtattggcaatgaccattactgccacctatatcagtgccagctcattcatcggcgggccaggagcagcctataaatatggtctgggatgggtattactgtcgctgattcagttgccggcaatatggctttccctgggtgtgttaggtaaaaaatttgccattctcgctcgtcgctataatgccgttactcttaatgacatgttgtatgcccgttatggcagtcgttttctggtttggtttgccagcctaagccttttagtcgcttttgttggcgcgatgaccgttcagtttattggcggtgcacgcctgctggaaactgctgcgggtatcccttatggtactggattaatgattttcggtatctctatcgctctctataccgcatttggaggctttagagcgagtgtcctcaatgatgccctacaaggactggtcatgttgttaggcactgttctactgctggtagcgattatctataaggcgggaggtctgtcagaagcggtcaccacattacgaacaattaatccggagctggtttccgcacaaggtgcagaccatatcctcaacgggcctttcatggcatcgttttgggtactggtctgtttcggcgtaattgggttacctcataccgccgttcgttgcatctcctaccgcgatagcaaagctgttcaccgtgggatcatcatcggaaccatcgtcatgacgatcctcatgtttggtatgcatttagcaggagcacttggtcgagcgattattcctgatctgaccattcccgatcaggtgattccaacattgatgatcaccgtattgccaccattcgctgctggaatttttctagccgcaccgatggctgccattatgtccacaattaatgcacaactgctgcaatcttctgcaaccatcgtcaaagatctctatctaaacttgtttccacaacaaatcgtgcaggaaaaaaaattagcccggatttccagtttttctaccctgattcttggtttattgctacttttagccgcctggcacccccccgaaatgattatctggctgaatcttctggctttcggtggcttacaggccgtattcctctggccattagttctgggcttgtattgggaaaaggccaatgcctatggcgctatcagttcgatgattacaggggcaacaagctacactctgcttgctagtttcaatatccatctattgggcttccatccgatcgtgccatcattgctacttagcctattggctttctggatgggcaatgccatcggccagcgattaccgccaaaagccgtcagaccacactaa

SEQ ID NO: 9720 - DNA, 243 bp, Photorhabdus luminescens
atggacagacgatttgttcaatcccataaagaagcactttgggctgtgttcctaacgcttgcttaccttattggctggctattgacagcctatttacccagcaatgctcccggtgtcaccggcttacctcgctggtttgaaatggcatgtttgttactaccagttgtattcatcatcctctgctggttaatggtgaagtttattttcaaagaagtcccgctggaggatgagaatgcaaagtga

SEQ ID NO: 9721 - DNA, 1188 bp, Photorhabdus luminescens
atgaaaaataaatctttattatttatcgttttaatggcttttctttctatgggggggttggtttcatcggatatatttctacccgccttgagtaagatgggaaactattatcacgttagcgaatctagtatacaaagtacaataactatatttctatttggtatagccttttctcaacttatttatgggccattaagtgattgtttaggaagaaaaacggttcttatttctgggatgattatatggttgatttcaacaatcggtattttttacagtacacatattagtgagttactattattgcgtttatttcagggaataggcgcttgtgctggtattacattaagtcgtgccattattagtgatctgatggagaaagaagaggcagccaatttgtatctgattattttcccttttgtgggaatgtcacccgctatcgcacccatgatcggcggtatgttaagtgaatattatggctggagatcctgttttttatttcttactttatttataacagtcacgcttatattgtgcttgctagttctgaaagaatcactaccaataaataaacgccaaaaattaagtattaaaaatgtattggttagtacttaccaagtgataataaataaagaatttctttactatgcagcaataccttgcttcgcttatacggcatatttttcttatttgattgaatctccatttattcttaccgctatgggattaccagaaaaatatgttggttacacctatataatgctctctttaagttatgtgttgggtaatcttattgctaaaaaattaagtcgtcgtcagggcgtgagaaagacaatttctcatggttatctcatctttgttgttggaggtattgctttcacgatacaaatgttttttagttcctacccattgataacttctgtgctaacaatatcagtattgactttcggtaatggttttttattgccactaggtactgcatcggcaattgccacgcattctcaagcggctgggacagcttccggcgtaatgggaacattgcaattaggtagtgcaggactggcatcattgtttattggttatatatctcaccatgaacctattaaagtggcatctatcatcacagttgtttctttggtcggtagtattatttatataacgggtaatagaggcggtaaagaaaataagtaa

SEQ ID NO: 9722 - DNA, 174 bp, Photorhabdus luminescens
atggttaataatatagatgtcacattacgtgatggtggatacctgaataattttaattttacaacagaatacgctataaagcatgttgaagcgttgactaaaagtggcgtggaatggtttgaaatcggttatcgcaatggttctttcaaccgtcattccgcaccgtatttctga

SEQ ID NO: 9723 - DNA, 1617 bp, Photorhabdus luminescens; identical to SEQ ID NO: 7120

SEQ ID NO: 9724 - DNA, 810 bp, Photorhabdus luminescens
gtgcggaatgaaggtttcaaacctatctctaatattggcctaacaggtatgtctccggatagttatatccgagatattcatcaatcggtacctgaggcaagattggtagtcattgctcatcctcacaatatcaatgctgatgatatttatgcaatgaagatgaatggcgttagtttgcttaggttatgtattaaagctgataacccgcagccatgcttagggttgtgcgagattgctcgaactactggaatggctgtgggtattaattttacacgagtgagtcagctctctatcagtaaaattattgaagttgccaaacagtgtgaacaagcgggtgctgatattatttacctggcggattcaaatggtagtttgctccctgaacaggtagcgcagatgttttataggttaaagtctgccacgcaattgcaattgggattccatcctcatgataatttgggtcttgccacagcgaacagtattgaagctatgagagctggagtcaattttattgatagttctctatcagggatgggaaaaggtgccggaaatctcaatttggaaagctggctatcatttctcaatctgagccaaaatagtaaacaatatgaccttgaacgagtatttaatcaactcaatgaactgcaatcccattgtttttttgccgcctccaggcgcgatcttatcgatataatgatgggtatgtacaatttgagtgtggagaataaaacagctctcgaagaagggttacgaaatggtattaattatgcgtttcaggttgttaaatctttgcgaggagcaacgacatga

SEQ ID NO: 9725 - DNA, 744 bp, Photorhabdus luminescens
atgatacagcataataaccatgctggatgtttcagccttgaagcggtaattctcgcacctgtgatgccgttttgggatcatggcgatttttgcactccattgcgcatattattacagaaaatgggatatcaggtgtctattattgatacattatccttaattaattcatctgatcctgactacgctattaatattattgaatctgaacttaatcaacgttttttccagccttatttgcttatcggttttgcgatgtcaggtactctggcgcaattgcttgcgtcgcgcctgaaaaacctcacgggagtaatctcagtgagtggtcctgggtatgctgattcgttactgactaataagctggaacaattaatagcattactgaatagaaatcagctagatgaagcgatttctgtgttacatgactttgttattcctgaaggtgggactccacttcctaaaatgcctgcgatacctggtcatttaagaaatactgctcgggaacgtatgatagtgggattttcactgttgctacaactggatgccagagcaatattgtgcaattacaaaggaaaatttctgagcatagttggcggacgttcgcaattagccacagaatgtaatcaggtggtcaatactaatcctacgcactgttttgttgtcgtggatggagcaggaatgcggccttgggaagataagccgttatttattaacaatgtaattaacgattggctaaaaatcttatga

SEQ ID NO: 9726 - DNA, 2166 bp, Photorhabdus luminescens
atgaataaaaaaattcttattttacctggtgatggtattggtcaggaagtatgcgatgccgctcttcccgtttttcaggctctaaatcttcctgtgacattggaaattggggatattggttggacttgttgggaaagagaaggtaacccagtgcctgccaatacttgggaaaaaatagcttcagtagatgcggtgttactcggcgctattactagtaaaggtaaagaagaagcacaacaagcgttgccaccgcatctgcgtgtgaaaacgagaaattatgtgtcacctgttatccaattacgccagcgtttgggattatatgcaaatatccgcccagtacgttatgtagaaggggaccgtaaaccatttcgctgttgtgttatcagggaaaacagcgaaggactatatgcagggttcgattttaaaggaattcccgctacggcaacgacttggttacagcacccaaatatagataaatatggtcctgaagaagctgcatggacagtccgtctacaaacccgttttggtttagaacgtttgtttatcactgcatttgagtatgcaaaggaaaataactactcccgtgtaacctttgcggataaaccaaatgtaatgagggaaagtgggcactttgcaaaaggtattttcgataccgttgcggcaggttaccctgaaataaaagcggatatccacaatgtagatgcaatagctttatggatggtaaaaaaaccgcatgaatttggtgtcattgtctctgagaatatgttcggtgatattttgtctgatttggcagcgggcgtaatgggaggtcttggtttagcgcctagcgctaatattggtagtgatattgcatactttgaacctgtacacggtagtgcgcctggtatggcaggtaaaaataaagccaatccggcagcgatgttttacacaatagcattactactggaacatcttggctttgctgatgcagcacagcaaattaactgtgcagtagataatgtgatacgtgaaggacgaactgttacttatgatctgggtggtagcgcaacaacccaacaaatggcgcaggctattattagtactctaagtaaaaaatgcactagctattctgcatcggttattactgttggtgatgagctcctgagtggaaaatatcctaatactaatcttcaggatattagtgaatatctcacggagcagggatataaagtgaagcaacatcaggtttgcgctgatgatattaaccagattgctaccgcagtggttcgtaggctagggcaggatactctcattgttgtgtgtggcggtcttggcccgacactggatgataaaactcgtgaggcgatagcaaaagtggcaggtagtcctttggaaatacgtgataacgtctgggtggaaatacagaaacaattggaaaaactgggagtatattgtgatcactctaatcgattccaagccatgtttccgtctggagcaaaggttattcccaatgttacaggtacagcacctggcttcagtcttaatgttgatagtagcaaaatagttgtgttgccaggacctccgtcccaaatgcgattaatgttgtcggaagaacattctatccctccagtagctggcatgagagagcgaaactaccattggacactaatcggcgttagtgaaagtaaagtcggtacgatggtgaacgcattctttgatggtgttgagtgtgatattcactatctgtggaaagcgccttatgtagtagtacaagttattactcctgctgatgcccctctttccgtacggcaattggttaattttggtgccatgtttgaaaacaaattggttagtgattgccagatgactgctatggaaaaactcagtgagcaataccgtattaactggttcacagatgatgatgaattaaatacatatctacacacaacatatgcagtaaataatccttcaaagtctctttcggtgaatattactgcgtttccttctataagttcatttttgtctggtgaagaaatgcttgggcagatgaccctgacaaccatagatgatgaaggacgacaacattcggtggattttccatgtaataaattgctactgcaacaatctataccagaatatgccgcttggagtgtcctgtgcgcacgtgcatcgaaagaggaaatgtaa

SEQ ID NO: 9727 - DNA, 756 bp, Photorhabdus luminescens
attgctactgcaacaatctataccagaatatgccgcttggagtgtcctgtgcgcacgtgcatcgaaagaggaaatgtaatgcaaactacacaaattgatcaaattaaaaagcgtttaatggagcttgacagcgcggccatatcggatgcaatggatagtttgcatattcctgctggactggctggaattatgccacgtagtaatgtcgggattaaaatggctggacccgcttttactgtacgttatgaacctatcattccggaacagggcaagtttcttaatgctggaaactacattgatgaagtacctgctggatatgtaatagtggttgataatcaggggcgtacggattgtaccagttggggtaatatcttaacttttaaagctgtacaaaaaggaatcgcaggctctgtaatttatgggtcagccagagacttgtctgaggttcgcagattggaatatcccttatttacgacgggggtttatatggtatccggaaagaatcgtgccaaggttgctgcaacacaatgcactttagatattggcggtgtagttatatctccaggagattggatttttgctgatgataatggtgcgttagccatcccgcagcagtatttgctcaccgttattgagcgtgcggaaaatgttgacaaaactgaacaagctattattgaggctataactaacggagaagatctggttaacgcccgcgaaaaactgggatatgccgtaccttggaaaactgtgcaatga

SEQ ID NO: 9728 - DNA, 882 bp, Photorhabdus luminescens
atgagtcagatgtttatagaatactgggagagaaaacttcgttttctggatgtacattatcatgctcgccccgatagttacattcggaggtacaatgtgcttgaagctggaagggaatatgtccgacatggtggtggagttgtacttaaaaaccatttggggagtgttactgcttcgtcgtcactggctcaggaagcaggacttccggtttttggttcggtagtattgaatgcaacctctggagggctggcaattaactctgttatccagtcactgagtcagtaccagttctgtaaagttccgcggttgctggttcatctgccgactattgtccctacaagccataaaagtgtaatgaaacgtacttgggcaaatgctttcgcacaaactttagcacagcaacctttgtctgttgtcgatagcaatgggcggttgcataacgagatccatgagttaattagttttgcgcagcagcataatgttgtgttgtcatcaggccatgcttcacgttatgaagttacgcaacttattgatgcgattaccgctgctggtggttgtaagttcatgctgaaccaacctgccagtcctatgacaggattaaaagcaaaagatcttaaggcgttgggtaaacatgattggctttatgtggagcaaacggcattaactgtttatcttggttatcagacaactgaggatttttttgaagtgttatcggaggtgaataatgttgtctatagctccgatcttggacagccagttcagccagatgttaagcaatggttgaacgatagtgaacgctggtttaaaaccgctggccttggtgaagaacacatccgagatatctgtttactgaatccactgcggatgttggctccggattag

SEQ ID NO: 9729 - DNA, 1053 bp, Photorhabdus luminescens
atgaagctcatggtatcagtcatgaaaatattcattaccgatgaacaaaaagccgaacttgaacacctccatcacacctgccgtgataagagagagtgtgatcgcatcaaagcggtcctgctggcctctgagggctggagttcagtgatgatcgctcaggccctgcgtcttcatgaaacgaccgttaatcgtcatatcagtgattaccttaatcaccgcaaaatcaagcccgaaaatggcggctctcagagccatctcagcgaaacacagactcaggaacttatcgcttatctgaccgcgaatcttctgcccaccacacaggctgttatccgccttgtcaaagaagcgtgggatatcagttacactgttcccggcatgaataaatggctgcaccataatggatttagttataaaaaaccgaccggcgtgccacacaagttcaacgcggagcagcaacgggcctttatggaaacctacgggaaactcaagcaggaagccggagaccatgagcctatcctgttcattgatggcgtccatcccacgcaagggacgaaactggcttatggctggatgcgaaaagggcagaaaaccgcagtgaaaaccacgggaagccgtacccgtctgaacctgatgggggccctgaatctggccgatattagcaaaacggtagtacgcgagtatgaccgtatcgacagttatcacatcgccgagttcttcattgccatccgtgagacctatccggtcagtcagaaggttcatattatccttgacggagctggttaccaccgaagcaggcaggtgaaagactgggcttatgtgatgaatattgagcttcattacttgccgccatacagcccgaatctgaacccgatagaaaggctgtggaaggtgatgaatgaacaggtcaggaataaccattatttcgccttgacggccttattcaggcaggcaatacatcgtttttttacggaaatattaccggaacttgccgggaacctgtcgtgctgtattaatgacaacttccaggttatgaatcctgcatcttcaagttaa

SEQ ID NO: 9730 - DNA, 1350 bp, Photorhabdus luminescens
atgcttgataaaattgtaattgctaaccgtggtgaaattgccctgcgtatcctacgagcttgtaaagagttggggatcaaaaccgttgcggtacattcctccgcggatcgtgacttaaaacacgtactgctggcagacgaaactatctgtattggcccggcagcttctgcaaaaagctacctgaatatcccggcaattatttctgcggcagaaatcacgggtgctgtggctattcaccctggctacggttttctatctgaaaatgcagattttgctgaacaggttgagcgttctggctttatttttatcggcccaaaagcagaaacgatccgcctgatgggtgataaagtttctgctatcaatgcgatgaaaaaagcaggcgttccttgtgtacctggctctgatggcccattgtctgatgacacggagaaaaacaaagccttcgctaaacgcattggctatcctgtcatcatcaaagcatccggcggcggcggcggtcgcggtatgcgcgtcgtccgcagtgataaagatctggaacaatcaatcaatatgacccgtgcggaagcaaaagctgctttcaataacgatatggtttacatggaaaaattccttgagaatccacgtcatattgagatccaagtattggctgacggccaaggtcaagcaatttatctggctgagcgtgattgctccatgcaacgccgtcaccagaaagttgtcgaagaagcccctgcaccaggaatcacgccagaaatgcgtcgcagtattggtgaacgctgtgctaacgcatgtatcgaaattggctatcgtggtgccggtactttcgaattcctgtatgaaaacggtgaattctatttcattgagatgaatacccgtattcaggttgaacatccagttacggaaatgattaccggtgttgatctgattaaagagcagttgcggattgccgcaggtatgccactttcaattaagcagaaagatgttgttattcgtggtcacgctattgaatgtcgtatcaatgccgaagatccgaacacattcctgccaagcccaggtaaaattacccgcttccactcgccgggtggatttggtgtgcgttgggaatcgcatatttatgctggctacaccgttcccccttactatgattcaatgattggtaagctgattacttacggtgaaaatcgtgacaatgccattgcccgcatgaaaaatgcattggcagaattgatcattgatggcatcaagacaaatatcgagcttcaacaggcgataatgaatgatgaaaactttcagaatggcggtactaatatccactatctggagaaaaaactggggttacaggaaacttaa

SEQ ID NO: 9731 - DNA, 471 bp, Photorhabdus luminescens
atggatattcgtaagataaaaaaactgatcgagctggttgaagaatctggcatttctgaactggaaatttctgaaggggaagagtcagtgcgcatcagccgcgcattagctccccagagttttccggcagctcaacaatatattcccgttcaagcacaacaacctgcgctggctaatgttgttgcgccttctcaagctctaccagaagcgatcagcagcagatcggctgcaatcgacggtcacgttgttcgttccccaatggtaggtaccttctatcgtacacctagcccagatgcgaaaccatttatcgaaatcggccagcgtgtcaatgtgggtgacaccctatgcatcgttgaagcaatgaaaatgatgaatcagatcgaagccgacaaagcaggtgtggttaaaaagattcttgtggaaagcggtcaacccgttgaatttgacgagccattagtcgtcatcgaataa

SEQ ID NO: 9732 - DNA, 453 bp, Photorhabdus luminescens
atggcaggaaagtttcacattttactccttaacggccctaacttgaatatgttaggaacccgggaacctgatatctatggcagcttaacgcttgatgatatcgtcagcaaattgtctgaagaagcccatcaatcaggggttaaattcagccatctgcaatccaacgcagaatttgagctgataaatagaattcattctgcacagggtaatactgattttatcttgattaaccctgctgcattcacgcataccagcgtggcactgcgtgatgcattgctgacagtaaagatcccatttattgagatccacctctccaatgttcacgcgcgcgagccatttcgtcatcactcatacctttcagatcttgctgttggtgtaatctgcggtttaggagtagatggctatagctttgcattacaggcagcggtaaaccgcttgtcaaaattcaactaa

SEQ ID NO: 9733 - DNA, 978 bp, Photorhabdus luminescens
atgaaagccttgttacttaagcaacaacagaatcaattatcaacgtccatagaagaagttgatgcttctcatcttcccgtaggagacgttaccgtcgatattcactggtcaaccctgaactataaagatgcattagccatcacaggtaaagggaaaattgtccgccaattcccaatgataccgggtattgatttctctggtattgtacacagtaccgaagatccccgttttcatatcggtcagcatgtattattaaccggctggggggtaggagaaaatcattggggtggactggcagaacaagccagagtttctggcgaatggttgacacctttacctgccggtttggatagcagacaagcaatgatcattggtactgctggctttaccgcaatgctgtgcgttatcgccctggaacaaggtgatgttaagccagaaagtggtgatgttattgtgacaggtgccagtggtggtgtaggaagtacggcgatagcactactctcacaacttggctattccgttgttgccgttagcggtagacaagaaaatcatgaatatttgttatccctaggggcaaaaaaggttttgccacgccatgaatttagccaaccgcctcgcccattggaaaaacaactttgggccggagccattgacactgtaggcggtaatgtattggcaacaatactggcccaaactcactataacggtactgttgccgcctgtggcctcgccggtaatgcaaatctgccaacaacagtgatgccatttattttacgtaacgtacgtctgcaaggcatagagtccgtcactgttccatcagtcaaacgccccgccgtgtggcaacgcctgcaaaagctattacccgcttctttttatcagcaagcaaccacagagataacgctggaacaaaccgtggaatacgccaataaattgatagctaaccaggttacaggacgtacattggtaagagttcgttaa

SEQ ID NO: 9734 - DNA, 1104 bp, Photorhabdus luminescens
gtggttggtagagtagacgggtttcgttccgtccccagcttgcaggattatcctttcgctatgtttaaaaaatttcgtggcatgttttccaacgacttgtctattgacttgggtaccgccaatacccttatttacgtcaaaggtcagggtattgtattgaatgaaccttctgtcgtcgcaatccgtcaggatcgtgcaggttcatcgaaaagtgttgctgccgttgggcaagaagcaaagcaaatgctgggtcgaacaccgggtaatattgctgcaattcgtccgatgaaagatggggtgattgccgatttttatgttacagagaagatgctgcaacactttattaagcaagttcatagcaacagtttcatgcgtccaagcccgcgagttttggtttgtgtaccggttggtgcaacgcaagttgagcgtcgggcaatccgtgaatctgcactcagtgctggcgctcgtgaagtgtttttgattgaagaacctatggctgcggcgattggtgctggcttacctgtttctgaagccacgggctcaatggttgtggatattggtggtggcactacggaagtggcggttatctctttgaacggggttgtttattcatcttctgtacgtatcggtggtgatcgctttgatgaggctattatcaattacgttcgtcgtaattatggttcactgattggtgaagcaacggctgagcgtattaagcacacgatcggttctgcttatcctggtgatgagatgctggagattgaagttcgtggtcgtaacttggctgaaggtgtgccacgtggctttacgcttaactccaatgaaattcttgaagctctgcaagagcctttaacgggtattgtcagtgctgtcatggtcgctcttgagcagtgtccaccagaattggcttccgatatttcagaacgaggtatgatcttaaccggaggtggtgcattattgcgcaatcttgaccgtttactgatagaggaaactggtattccggtcattgttgcggaagatccattgacgtgtgttgctcgtggtggcgggaaagcacttgaaatgatcgacatgcatggcggtgaactcttcagcgaggagtga

SEQ ID NO: 9735 - DNA, 1035 bp, Photorhabdus luminescens
atgaagccaatttttagcagagggccttccctgcaattacgacttttctttgctgttattgttgccattgctttggttgtggcagacagccgccttgatgctctcagtaaagtccgtaattatatggatacggtagtcagtccattttattttctcgccaatggcccgcgtcaagtgcttgatggtgtgtcagaaacccttgcttcccgtgaacaacttcgattggaaaatcgtgctttacgccaagaattattgatgaaaaatagcgatatgctgttgttaggccaacttaagcaagaaaattcccgcttgcgtgagctattgggatcacctttacgtcaggatgaacacatgatggtgacgcaggtgatctccggtagggctaatccttatagtgatcaggtcgtcatcgataagggatcaagagaaggtgtttatgaagggcaacctgttatcagtgataaaggcattgttggtcaggttgttgctgtcagtcagtttactagccgggtattactgatttgtgatacgactcatgctttaccaatccaggtcttacgtaatgatatcagggctattattgctggtgcaggttgtactgatgatttgcagtttgagttattaccaagcaacacagatattcgggttggggatgtgttggtgacttctgggttaggggggcgtttcccggaaggttatccggttgctgtggtttcgtcagttaaagtcgataatcaacgggcttatactgtgattcatgctcggccaacggcagaattacagcgtttgcgttatttgttgttgttgtggggggcggataataatccatctgaaccattgccgccatcagaggtttatcgtgtagccaacgaacgtttaatgcaaatgatgcctcaggtattgccacatgcaaatgaaatggggccaccagcaccatcgtctgtttctgatgaagcaaccaagacaacagaaagagtaaaagatgctgaatcgacaataacgtcggctaaatttataaattcgggaaatcgttaa

SEQ ID NO: 9736 - DNA, 489 bp, Photorhabdus luminescens
atgaatcaataccggagtcatgggcgttggatcatttggttatctttcttgattgcaatggtgctgcaaattatgccgtggccggagcaaatttatatgtatcggccaacttggtcggcactattgttgatttattgggtgatggcgttaccgcatagagtcagtgttggtaccggttttatattggggatcatcgtagatttgattcagggagcgacactgggtgttaacgctttggcttacagccttgtgagttatttggtgtcatttaagtttcaattatttcgcaatatggcactttggcagcaggctttggttgtcgttgctttatcggtactgatggatttcagcgttttttgggcagaatttttgttatcaaatgttgcttttcatccagaagtgttctggaacagtttggtcaatggtattctttggccgtggttgttcctgttaatgcgaaaaatccgtcgtcagtttaatgtacattag

SEQ ID NO: 9737 - DNA, 588 bp, Photorhabdus luminescens
atgaaaaccctttatctggcttccggctcaccaaggcggcgtgagctggttgaattattggactttaaatttgaaattctttctcctcaggtaaaggagcaacggcaagagggtgaaactccgcgtcagtatgtcagccgattagcaaaagataaatctctagcgggagtggctattgcaccggaggattttctggtgttgggagcggatactgttgttgtattgaatggtaaggttctagaaaaaccacgtagcgagcaacatgccgttgcaatgctcagtgcactttccggtcagagtcatcaggtgattacagctattgctatatcagatagtcagcgtactttaagtgatatagttattacagatgtaacctttcgccaattatccacacaggaaattttggattatgtagcaaccggtgagccgatggacaaagcgggggcttatggtattcagggaaaagcgggttgctttgttaaaacgctgaatggtagttatcactcagttgttggtttgccattggtggaaacacacgaattaatcacaaagttttttgcgttagttgatgggaaggggaactcatga

SEQ ID NO: 9738 - DNA, 1470 bp, Photorhabdus luminescens
atgacagcagagttattagtcaatatcacaccatccgaaacgcgcgttgcctacattgatggtgggattttgcaagaaatccatatagaaagggaagccaaaaggggaattgtcggcaatatttataaaggtcgtgtaagtcgggtattaccaggaatgcaggctgcttttgttgatattgggctggaaaaagccgcctttcttcatgcctcagatattgtgcctcatacggaatgtattgccggtgaggagcaaaagaactttcatgttaaagatattgctgagttggttcgccagggacaagatttaatggttcaagtagtgaaagatccccttggcaccaaaggtgctcggctaacgactgatattaccttaccttcccgctatcttgtatttatgcccggcgcatctcatgtcggggtttcacaacgtattgaaagtgaagaagagcgtaatcgcctgaaaaatattgttgctgactattgtgatgaacatggtggtttcattattcggacggctgccgagggcgttggcgacgaagaattagctcaggatgcggctttcttgaaacgattgtggagtaaggtgatggagcgtaaaaagcgcaatgtcactaaaaataaactttatggcgaattggctttggctcatcgtattttgcgtgatttcgctggagcagcccttgatcgtattcgtgtggattctcgtttgacctttactcagttacaggaatttattcgcgaatatattcctaaaatgacagccagattggaactttataacggtaatcagcctattttcgatctgtttgatgtagaaaatgaaattcagcgagcactcgatcgcaaagttgaattaaaatcaggtggttatttgattattgaccaaactgaagcgatgaccacaattgatattaatactggtgcatttgtcggccatcgcaatttggaagaaactatttttaataccaatattgaagcgacgcaagctattgccagacaattaaggctgcgtaatctagggggtattattattatcgattttatcgatatgaatagcgaggaacaccgccgacgggtattggcttctcttgagcaggtgctgagtaaagatcgtgttaaaaccacgattaatggtttttcacaactcggactggtggaaatgactcgtaagcggactcgtgaaagtatcgagcatatactttgcggcgattgccctacttgtaaaggaaggggaaccgtgaaatctgttgaaactgtctgttatgagattatgcgtgaaatcgtgcgtgtgcaccgggccgttgacgcagatcgtttccttatttatgcctcacccgcagtgtccgaagcgctgaaaggggaggaatctcatgcactggcggaagtggagatttttgtcggtaagcaggtaaaagttcagacagaacagctctacagtcaggaacaatttgacgtagttatgatgtaa

SEQ ID NO: 9739 - DNA, 3795 bp, Photorhabdus luminescens
gtgaggcgactgccgggagtattattagcgacagccgcaatagtcattatcattgtggctttgcttgttagtggattacgttttatcctgccacatattaatgattaccgcccacaattattcgctaaaattgagtcaattattggtgtacctattgatgctggatatattgcgggagaatgggaatctttcgggcctgtttttgaattacgtgatatcagtgtaaaaaccgcaaatgcagatgtgaaagccaaaaagatcacggttgcattggatatctggttatctttactaagaatgcgttggaatttccgcgatcttactttttatcagttacaagtagattactatcaaccgctgtttaatgatcaaaacggtaatatgttttcccaatcggatctattttctgatctgtttctggagcagtttgatcattttaatctgcaagatagccgttttactttccttactccttctggtgaacgggctgatcttctattaccacaattaacctggctgaataaagataatcgtcaccgagctcaagggaaaattagcctctcttcgatcaataatcagcatggggatatacaagttaaatttgatttgcatgacactaatggcgtattggataacggtactatttatttacaggcagataatgttgatgttcatccgtggttaagccattggttgcaggataatactgggctgaaggatgctgagtttagtttgtctagttggattatgctgaaagatggtcggattgatggtggtcaactgcaactccgtcagggaaaagctaattggaaagttgctaacaaatcccacaacctttctgtcagtgatctggtgttacggatgcgtcgccaagatggtggttggttgtttgatgcacctgaattggcaaatttaatcactgatggtcagcaatggccgtcaggaaaagtatctgtgctctatttgccggaagccaagagagttgatggtcatgatcattggcgtgtccgggcaaaaaacattcaacttgaacggctaagtagcattttaccgactttttcttttttgacccctgatattgtgaaggattggcagcatcgtcagccacaaggattggtaaagtatcttgccctcgatattacacctaaaatggcagatgattcccgaatcagtatgcaatggcagaatgtcagttggcagcgttggcaggaattgccttctattgataatttttctggtgcttttaatggcagcttgcggcaaggcaaactgagttttacattgaagaatagtgtcgttgattatcgagatatgtttctggcaccgtttgagatatcccaaagtcatggcgaaatactctggcggcaaggtaggcgaggtttacaactttggagtcaaggattggatttgcaggcgaaatcattgtgggtcaatggtgattttcgttatcaacagcctaaagaacagcctccggcgctaagtattctggcgggagtacgggtttatgacgcaggtgatgcctggagatattttccagaacctttgatggggacaccactgactgactatctaacagcttcaattattaaagggcagatagaaaacgcgacttttgtttttcaaggcaatccaaaagatttcccatttgcaaagaataatggccagtttcaagtttttgctccattgcgtcatgcgacttttcagtaccaaccaaactggccggcactgctggatttcaatattgatcttaatttccagaataacggtctatggatgtttgctccgcaaacggcacttggtgaagtgaaagcgagtaatctttcagcagtaattcctaattatcgtagcaagaaattattaatcgacgctgatcttttgggagatggcaaagatattcatgaatattttacccgtagcccgttagcaaattctgttggtgaaacgctggatatattgcaggttggtggtcagattgcgggtaatttgcatttggatattccactcaatggtggcaatgtggatgcccgtggcgaggtgactttaaaaaataatcacttgttgattaagcctctagatagcgaaatgaaaaatgtgagtggccggtttcgctttgataatggtaatttacaaagcggaaaattatcggcccaatggcttgggcagcctgttacagttgatttttctactaaaagtttacccaaaaactaccgagtcgatgttggtctgaatgcgcgttgggctgtggcaaaattatctaaattttcaccagcgattgctaaagcgttttctggctctgttgattgggaagggaaggtcggtgtcagtttgccgtttcagggcaagcctcaatatgatatgaaaatcgacgttgatttatcacaagtggatagttatttatctgtcctgaaagcggatgaaccgcgtgctcttcatattctggctgatggtgatatggagcagttgcaagtaaaaggcactttggataaacagtatgcatttaatactcaatggcgtctggcagggaaaagcactcaactgtcacgtggaattttacaaggcagcgataaaattcctgaattgcctgaaaaatccctattggaattgaatcttccggcagttgagggggaagagtggttagggttgattgcgcctctgacttctggttcttcattggcaggtatgtcaatgttgccacagcatctgcatatatcacttccatcattggatgcggggggacaacgttggaatcagttatcgttggatgtggaaaaacagctttggggaacgcagatcacggctaatagtcgggaaatcaacggtaaacttaatatccgtaatagtggctcttggcaaatgaatttgagccatctgtactatagtcctctgcaacatagctctcagcaagctgaatcggatttacctaagcaatctcagacaggcacaactctgcgttattcgttgaaccaatggccttcattagacatcatctgttctgaatgttggattatgggattgaaacttgggaaggtgtctggctccctgattccagaaggtaattcgctggtattaagagatggaatagtagaaaacagtgtcagtaaattaactttggcaggtcgttggcaagaaggggctgtagggaataatactcgtattatggggcaattttctggtgaaaagtttgatgagatggcatcttaccttggtatagttgtaccgattgttaattcaccgtttaccttcggttttgattttaattggtgggatacaccgtggaaacccaattttcagacgctgaatggcaatcttaagagtgacttaggcaaaggtgctattgaaaaattgggtgggggaagtgctagccaattactaaaattagtcagttttgatgctttgttacgtaaattacagctcgatttcagcgatacctttagccaggattttgaatttgattcaattcgtggtgatgtttcagtaaaaaatgggatactcaagactgaaaatttacgagtcgatgggttgattgcggatgtaataacgaaaggtgagatcgatcttgttcgccaacagatcaatatagaagccatcgtcacgccggagatttctgctactgtgggagtagcgacggcttttgtcatcaatccgatggcaggtgctgcattattcgcagcgaccaaggttttggggccgttatggaataagatatccgttattcgttaccggattactggtaatcttgaacaaccgaaaattgatgaagttctgcgtcagcttaaggagaatagaggaacatga

SEQ ID NO: 9740 - DNA, 858 bp, Photorhabdus luminescens
atgagaaacgttaatgttgcactcttgcagttatgtagcggtgagaatatcaaacataatttggcgcaaattgaacaacaaattaagcagttgccggatactatcaagtttgtcatgaccccggaaaatgcattgttgtttgctaatgctgatagctatcgtaggcatgcagaacagcaggggcatgggcctttgcagcaagctgtcagtgagattgctcgccgttatggtgtttggttattaatcggttctatgccgcttatcagtcgtgaaaatcctgaacgacttaccagtagtagtctgttgtttgatgatcagggtaagatttgcgcccgttacgacaaaatccatatgtttgatgtcaatattaatgatgaacatggatcatataatgaatcatctgttttccagcgtggggaacatattaccgttgtagatacacctgttggtcgtctcggaatgaccatatgttatgatctgcgcttcccagggttatttcaggcgctacgtgagcaaggcgctgagttgatatctgttcctgcggcatttacccgcttaacaggaaaagcacactgggagccactgttacgagctcgcgctattgagaaccagtgtattctgttagcgccggctcaggttggtgtacatggaacccgtcagacgtggggtcactcaatggcagtggatggctgggggaaagtgattaagaaaaatcccgatgcagtcagtgcactacaactgaatgtcagggcagatagcttgaagattatgcgtgagcagatgaaagtggtgaaacataaccgcttccggccgcagttgacttccttgattgaaaaaataccgcaaattaaagagtag

SEQ ID NO: 9741 - DNA, 1446 bp, Photorhabdus luminescens
atgagtttaacttctgtcagtgaacacttactggctgcaaataaattaagccatcaagatctgttttcagtactcggtcaactggctgaacgtcgactggattatgccgatctctattttcagtccagttaccatgaatcttgggtgttggaagatcggattattaaggatggttcctataatattgatcagggggttggcgttagggcaatcagtggtgaaaaaacgggttttgcttatgcagaccagatcacgttgaatgcgctgcaacaaagtgcacaggctgcccgtagcatcgtccatgaaaatgggaatggtaaagttcatacctttggcgaagtgacctattctcagctttatgcagcaattgatccgctgcaaagtttttcccgtgaagaaaagatcgcattattgcagcgtgtggatcaggtggctcgtgctgaagatccgagagtacaggaagtcaatgctagcctgacagggatctatgaacgggtgttggttgcggcaaccgatgggaccttggctgctgatattcgtcctctcgttcgcttatctgtcacggtactggtggaagataacggcaaacgtgaacacggcaccagcggtggtggtggccgttacggttatgaatattttctggaagtggctagtggtcagatccgtgcagaacaatttgcccgtgaagctgttcgtatggcactggtgaatctttccgctgttgctgcacctgctggtactatgccggttgttctaggggctggttggccgggagtattgctgcatgaagctgttggtcatgggctggaaggtgattttaaccgccgtggtacttcggtgttttctggtcagattggtgagaaggtcgcgtcagaactctgtactgtggttgatgatgccacgataaaaggtcgccgtgggtcattggcaattgatgatgaaggcgttcctggacaatacaatgtattgattgaaaatggcattctgaaaggttacatgcaggacaaaatgaatgcacgtctgatgggggtcgcgccgactggcaatggtcgccgtgaatcttatgcccatttgccaatgcctcgtatgactaatacctatttgctggcgggtcattccacgccagaagagatcataagtagtgtagaaaatggtttatatgcgccaaattttggtggtggtcaagtggatatcacttccggtaaattcgtgttctcgacatcggaggcttatctgattgagaacggtaaaattaccaaaccagtgaaaggtgcaactcttatcggttccggtattgaggcgatgcagcagatctctatggtaggaaacgatcttgatctagataaaggtgtcggggtttgtggcaaagagggccagagcgtacctgttggtgttggtcagcctactttgaaactggacaacttgaccgttggaggaacagcctga

SEQ ID NO: 9742 - DNA, 465 bp, Photorhabdus luminescens
atgaagaagacttggctagcaggtgtgttactgactgttttggctgtgacttgtggtacttttgctaaaggtgttgataagacactgttgcaggagccagaaacaggtaggagtacctcagcaatacaacggattgaagggctaactgaacagaataatgtggtggcttacttacgacagaataataaattgcccgatatttatattactaagaagcaggcccgcgatcttggctggaatgcaaaacagggaaatttatgtcaagttctgccgggtagagcaattggtggtgacaaatttactaatcgtgaaaaaaagctaccaatgaaaccgaaacgtcagtggtttgaagcagatgttaactaccgttgtgggcaccgagggagtgacagattgctttattcatctgatggtctgatttatctgacgttggatcattacagaagttttaccttaatggagtaa

SEQ ID NO: 9743 - DNA, 270 bp, Photorhabdus luminescens
atgcataaagtggagtttgattttgaccgtatccctgatctgaaaatgttctatcagcagttttctgaacaatttgagttaggagacgagtttggtagtaatttggatgctctgtgggatgttgtgacaggcggaattgagttacctgtagaggtcaatttcatccattttacgcagcagaaagaacgtgatttctcctcgttagtgcttttgtttgaagaagcagaagaagaactggaaggggaacttagttttaatattttcccctaa

SEQ ID NO: 9744 - DNA, 540 bp, Photorhabdus luminescens
atggcgaagcagcctgaagattggctcaatgattatcctgctgaagaggaagaagaagagataatctgggtcagtaaaagcgaaattaaacgtgatgccgaagcattgaaaaagctgggtacagaattggttgagctcagcaaaagtgcgcttgaacgcgttccgttagatgaagatctgctggccgccattgaacttgcacagaagataaaaagagaggggcgccgtcgccaattacaatttattggcaaactgctgcgtacccgggatgtcgagccaattaccattgcgcttgataaactgaaaaatcgccataatcagcaaatcactctgctccataaactggaagaattacgtgataaattgattgatggcaatgacgatgttattgatgaggttgtggcgttattcccacaaaccgatcgccagcaattgcgtactttgatccgcaacgccaaaaaagaaaaggcggcaaataagccacctaaatcttatcgtcagattttccagtatcttaaagatatggctgaatccgcttaa

SEQ ID NO: 9745 - DNA, 1341 bp, Photorhabdus luminescens
atgaaaatcacggatcaaattgcggaacaacgcaaacaactggaaaatgcagtttcacaggcactagagctggcaaaagcgggttgtgatgctgcggaggttgcggttaataaaacaacgggtattagtgtcagcacccgctttggtgaaatagaaaatgtagaattcaacagtgatggtgcgttggggattaccgtataccatcagcaacgtaaaggtagtgcatcatcaacagatttaagcccggatgctattgctcgcactgttcaggctgcggttgatatcgctcgttatacctctcaggacccatgtgctggcccggcagataaagcgctactggcatttgaagcgccagatcttaatttgttccatccaacagagttggatgctgataaagcaattgaactggctgctcgtgcggaacaaactgcattacaggccgataagcgtattaccaatactgaaggtggtagttttaacagccattatggtatcagagtgtttggtaacagccatggtatgttgcaaagttattgctccagccgtcattcaatgtcgagttgtgtgattgctgaacttgatggcgatatggagcgtgactatgcgtataccattaatcgccgttttgaagatttaaaatcgccagaatgggttgggcaggagtgtgctcgtcgtgcattatctcgtttgtcgccacgtaaattaccgactatgaaagcaccggtgttgtttgctgcggaggttgcaacgggcctttttggtcatttggttggtgctatcagtggtagcagtatttaccggaaatcctctttcctgcttgatcatttgggcaaacaaatcctgccatcatggctgacaattgaagagcggccacacttgctggcggggctggcatcttccccatttgatagtgaaggtgtttctacctgcaaccgggatattatcaaggatggtatattacagacttggcttctgacgagttattctgcccgtaagctaggaatggcaagcaccggccatgcaggagggattcataactggtgcattgcagggcaaggtcaagattttgcaggtttactgcgtcagatgggaactgggttagtagtcactgaactgatggggcagggagtcagtgcagtaaccggcgactattcccgtggtgccgctggtttttgggtagaaaatggtgagattcagtatcctgtcagcgagattactattgcaggcaatctaaaggatatgtgggccaatatggtcactattgggaatgatattgaaacgcggagtaatatccagtgtggttcagtcttactgccggaaatgagtatcgctggtcaataa

SEQ ID NO: 9746 - DNA, 351 bp, Photorhabdus luminescens
ctgtatttagatgaattctattacggttggcatcaaatgagtgagaaggaaaaaatacagcgagttcatgaatcggcaaaattacagagtttggcgatgagtgatgtgctggcacgttcgttactggagggggggagtatgaccatagatggacagcgttattgtttatctatgttcggtcatctacataaagttaaaaaaacgcatactgaaacaacaaaaatgataatgagtaggttaagtgaaaaattgggtatcaagattgatactaatgaaattattcgtgacccaaaaggccattatctgaacatgttgaagaaaatggaatcagaaatgatagaagtcacataa

SEQ ID NO: 9747 - DNA, 417 bp, Photorhabdus luminescens
ttgttgctggattctggggttatcagccagccctttattgaggcggtgaacgattacatcacccatcaggggcatcatgggcatggggatgatatgcagtgtctgccgatgcccgaaacgcaccatgaattattggtcacgctgtttgtggcaaatttggcgaactacagccaggaacaggtaacaacattaaaaacggatgttgaaaacctgatccgctgcgcctttcgggaaaatagggaatatcacgtgaaaaaaacctggccgtatgcccgattttccttttccaacctggggcgagaaatacaccgtgaatttgccgagattgaatcactgactttttcattgggtgacattttgagtgatttaagtgtgcccaggctgcaatcactgataattgaggtgaagcatgtctga

SEQ ID NO: 9748 - DNA, 555 bp, Photorhabdus luminescens
atgatttaccgctggctgacatggccgttagcccaattggacgcggaaacttgttcggcggaattactgccgatgttggcctatcagcgggatatccagcgctttaacggtgaaccgctgacattatttcgtaaacgggtgaaatacgcgtttattaatgccagagaggcgggcagtgtcgcgggatttatcgctatctttgaacgtttaggtgtcggccatgttgaagtattggaacgacaaccggcgatagattgggatgtgattattttgcgcgtcagtgacggacaagtcgctgaaaaccctgatttgctgatgagcatcattcgtcagtatggccgcacttgccgccgctaccgttttgaagtgatggcgaataataaactgtttatgcgtgtgggcagtttgggcgcggaatattgctgttattacgcggccatgtcctcgccgcctttgctattaaaagtgggttacatgtcgggtgagtccgtttttgatagcgccagtttaaaggcgattaccgtacctaatatgacctacggtgcatcattataa

SEQ ID NO: 9749 - DNA, 1809 bp, Photorhabdus luminescens
atggcgtcagtgattacagtagactttgaaaaatggaaagcacagcaggccgcggcgggaaagcccgtggtgttggatgagtttgtttttgcttatgtgccggatttagatcccactcttgccatcaatcgcgatgagacattacccgcagaaagtcatattgtgcatcgtcaggctgtgaacaaaacagggttagcgagtgaaaacgcggtagcctacagtgtcacattgggaacggaagtcggtcattttgattttaactggattggcctgataaataaggcttctggcattattggcatgattacccatgccccagctcagaaaaaaattaagaccgcgaacggattacagggaaatgtgctgacgcgctcttttttactggagtttgaaggggcagccaaagaggccgctattatgaccacggcggaaacctggcagattgattttaccgcccgtttatctggcatcgatgaaatgcagcgtctgatgaataccgacagttacggtgaggcggcttttttcggtgatgggttttccgtggttcgtcgtgatgaccggtacacgatcaaaaaggggctggcttatatcggcgggttgcggggtgagctggcgtttgaccaaacacttaaccgcctgcgcgatacccgcgtttatgcggattttagctatcaaggcaatttggtgaatcagtggaaaaccgtcgttcatatcgtcgccgtcaatgatcttaaaaactacatcgatgcggcagggtatccgcattatgtctttgcggttgcgggggttgatggtcacggtgatgtgatggatttgcgtattaaagggtcattgaatgaccgtaatatttccgctattcatcaagagattgatagcgtgaaacgggaatatgtgactcagcaggcattggaaagcggcctgcatgggaaacagccgaaaggggattatgctgttaatgcggcattaaccgttgtcagggaaaacgccgatagtcgcctggctaaaaaccagaacggcgcagatattcccaataaaaatgaatttgtcaaaaacatcggcttagtggaaaccgtcgaacaggcaatgaatgctgtaccgaatgacaggagaattaacgggaaatcgctatcgtctgatatcagtttgatggcgagtgatgttggtgcctatcaccagactacctatatgactgagctacccggcagacattattctgggccattttcttgtggtcgggaaaatggatgggccaaaggggtgagtatcggtgtagggggtgacacggggcaaatttggattgatgccgatgcacagttgcacaccagatttctcaatgctaacggtgccgtagagcaaaagattacggttggtgtcccgattggcgccactatcgaatggcattcgactgcgccgatacccgccggatatgaacccaatgagggacgcgcattccgtgcggcagattaccctgaactcgccaaaatttttcccgatctgaaattacccgatgacagggggctgtttaagcgtggtttagatagagggcgggggctggactcgggtcgttcgctagggagtgttcagggggacgcgatcagaaatatcacgggatcattaggtaagcccactattgagagcgggagcaacgcgtctggtgcattcagctaccagtataaggcaggcggtcgggcagccggtgccggtggtggggtgattgcatggacatttgacgcatccagagtggtgccgaccgcaaatgaaaaccggcctgttaacaaatcagtgatttatattacgagggtaaaataa

SEQ ID NO: 9750 - DNA, 273 bp, Photorhabdus luminescens
atgtctaaatatagtgcaaatattcaaatggcccggtttgatgaggatgggttagctattgttagcggatgggttgcggtttatcgttgtcatcctgaaacacgggaatatattggggccgatatggatagcgtgccccgcggtttttctgttgcggctaatgcgtatctggatgcgcctgaattacctgacacgcatgatgttgcgatttgtcgtagcataaaaaatcctggcgacatgtgcctgactatcggggtaaaacggcgtatgtaa

SEQ ID NO: 9751 - DNA, 303 bp, Photorhabdus luminescens
ttgccagataatcttaccctgcaatcaccccaaaccccctttgataagtgggagagtaagcaatgggtcacagataaatcagccctaaaatctcatcaaactgaacaggctgaacagcaaaatatcgcgcgacagcagcaggcagatgcagcaattaaacccttacaggatgccattgatctggatatcgccacggatgccgaaaaatcagcactcgtggaatggaaaaaatatcgtgtgcgggtgaacagagtggacctttctactgcccccgatatcaactggcctgagcaacccgcgtga

SEQ ID NO: 9752 - DNA, 153 bp, Photorhabdus luminescens
ttggcaacggaaattgatgcgcatctccccgaatatgacggggatgcattgctcgatgctacccgtccatccgttcgtatacggtatcggtcagaaagcagacagcggtcactacctgagtccggcaaacgccatcaattatctggcaaataa

SEQ ID NO: 9753 - DNA, 609 bp, Photorhabdus luminescens
ctgagtccggcaaacgccatcaattatctggcaaataaaatccggggaacgggaaacatgagcgccgtggtactcatgatctgcgcgaagacgcataatgaatttatccagcatttaaccccattttcggcggtgttgccgttgtcggtattttctcaggtcactcgtatggcaaagacagcggaacgtctggcgatcaccaaaatgcaattgcctgggaaaccggacagcggtttgcctccatttcaaccgttttcaacatcaaccagccgcatggccgtgaatgcgcgattgattgcacaggctgaaacacaggttagcgccggcagcagcattgcgggattgaaatcacaattaacaaacttcacgacggtaagacagaacgccttacaacaagtgactgccgctctgaatggcgtcaggaacaaatcggcctgtgtctgggcattctcagggaaagggaatggcgcattactggccgaaaaactgcgtcaggatatccctgaacaggacgccgtttacacgctggcgacattatttgccggggacgatattcgcgcattagaaaggatgctacacaatgagccaaattatcacactggcccttga

SEQ ID NO: 9754 - DNA, 519 bp, Photorhabdus luminescens
ctggcccttgatggcgaggccatcccattaaaaagtctgaccgtaaccccatcggtggtatttcaggacacagaccaaagcggccagtcatccagtaccgccgtagcggagcaaggtattaagcccaaggagttacgtgttacggggatcattccgtttactgagcaaaaaacgctgtcacgcctgtttgcactggcggaggccaaagataagggaagtctgaaacgttatcgtgtcgctaacctgaccgcaggtgctatcaactttcgcatcgggacattcacccataccattgatgccagtaagatcgacggtaaacaggcatggcaggtcacatttactttacgtgaacatttatctgttgctgagaaacgtgatgcccgtgctgccgataatattcaggccagaaagcaaacaggtcagggggccgccgccgcaaaagaagcgccggaaaaattaagctggtttgaaagcaaagtattgaaaccgattaatgacacaataggaccggctaaataa

SEQ ID NO: 9755 - DNA, 1650 bp, Photorhabdus luminescens
atgacaccgattaaccggctctatctttccggtgatgaaattcacctggttgacgccaatattatgctggagctggcatcctgtggtcgtggctttatcacggcggagacgacaacggactacaccggaaaactggtgcggctggacgtgggttacacggatttggtattacgctggtttacgggttatgtggcacgctcacagccagcccaaaacggttatcagcgtctttttgtgcgtgaactggttggtgtgtttgaccgattatggtcgtgttcatttcagcatccaacactgagccagattgcggactggttgcaggagcacagcggactgaccttcatattgccggatgccccttatacggagacacccatcccgcattttactcatcatgggaccggctatcagttgctggctaatcttgggcaggttttttcgattgaggattatctctggcatcagttgccggagggttcggtttatgtgggcagcggggcgcattcgatgtttgcggggaaaccggtagagatccccaatgcatttagccagtgccagtccgcaggcaatgcgatgaccattcccatgatcccatcgttgcgtccaggtgtagtgatcaatcagtaccggctgaacaaggtcaatctgaacaatgaaaacatggtcattacatgggaagccgtcaacaaactgaccggtcagtcgcagaccaaaacgccaatgcagcgtcagattgatgccgcctaccccgaattatcggcagggctgcatttacccaaatttgcccgcattgaggcacaccctgaaaatacggtcagcggcgatatctccgactcattccggccacgctatgcggttgatgtgcaattattggctgatgatggtcaggatgccgcggttcctgtttatcatgctgtcccgctgcctttgccgatggcgggcagtgaatccggtatgtttcaatatccgccagtcggaacggtggttgaaatcgcctttgaggcaggcagaccggataagccctttatccggcagacattaagccagggcaataccttgcccgatatcaagccaggcgaacaattgcagcaacagcgggcggaagtttctcagagggtaactcaggaaggaaactggattcgtcagactgaccagaccattaatgaatcgtctatgcaccgtgaagtcagggcagacacggaaacacgtaacgtagtcgcacgggaaaccacgatacaggccacggataaaaccacggttttgggcacgtctacgctattggcgggcgctgtccggcaaattgcagacggtgactatagtatggcgacctcatcaaatttcgttgccagcgtagggaaagaggccagtatcgaaatcggacaaaagctgatagagaagatgggtctgcttaagcagagtatcgccggtgccaggcaagaaatcatcgcgcccgtggtttgggtgggcagccagcaaatcaatgtcatgaccttgatgttagagacgttggatgtggttaaagcactggcggaacagactgccgcccatacgcaccacaacacaggtgcaccggagaacgccagcgcgataaggaacacgggctataaatcggatgggctgaaacagaagtattcgcctgtgattgggtga

SEQ ID NO: 9756 - DNA, 126 bp, Photorhabdus luminescens
ctgattgctcaggaaattggtgtcacccctgctgaaatatggcccagtcggtacttcgacgaaaataagcagcctatcaaacgaaccgtccgaaatgatttaccaaacaattctgatatcacataa

SEQ ID NO: 9757 - DNA, 129 bp, Photorhabdus luminescens
atgaaaaaagactggcataccgccgatattatcgctgcgatacgtaagaagaataaaacgctggcatcattatccagagagcacggtttaagctcttcaacattagcaaatgctttaacgcgcccctag

SEQ ID NO: 9758 - DNA, 150 bp, Photorhabdus luminescens
ttgtctcgctgcgcttatgacgaaataaatgaacttatggcgaaaacggcactacaccgcacccgcctgcatgctttggatcaaaaaattttttcagttttaaaatcctacaaggcaagctgccaaaccgtgccagcaccggagaagtga

SEQ ID NO: 9759 - DNA, 411 bp, Photorhabdus luminescens
atgactaaaccagcaattatcatcaacgaattagacgcagaacgtttagattccctgttggaacagccagcgtttgcagatactagtatcgctgacgctttgaatgaggagctggatcgtgcagagattgtaccgccagcagaaattccatcagatgttgtgacgatgaacagccgggttcgttttattgatctgacaagcaatgaagaacgggtacgtactttagtttatccagcgtcactgcaagacagttcagatcagctttctgttatggctcctttaggcgctgcattattgggccttcgtatcggtgacgaaatcagttgggaattaccaaacggcgaagaaacccgcgtcaaagtattagaattactttaccaaccagaagctgccggtgaatatcacagataa

SEQ ID NO: 9760 - DNA, 273 bp, Photorhabdus luminescens
atgactgtcaagcagagacttgaaatcaaaaatcggctgggaatgcacgcccggccagcaatgaagctgtatgatctagtacagctctttgaatctcatgtcattttacgcaatgatagccatgttgaagccgaggccagcagcgtaattgctatgctaatgctggattcagaaaaaggcagctatattgaagttgaagccagtggcccagatgaagagcaagctctcgcagctattattgatctatttaattcgggatttgacgaagaataa

SEQ ID NO: 9761 - DNA, 852 bp, Photorhabdus luminescens
atggtgctgatgatagtcagtggccgttccggttcaggtaaatccgttgccttacgcgcactggaagatatgggtttttattgtgtagacaacttgccggtagtattactaccggaattagcaaatacgctagctgaccgcgatatttctgctgcggttagtattgatgtaagaaacatgccggaatcacctgaagttttcgaagaagctctgactaaactaccagcgagtttctcaccgcaattattattcctcgatgctgaacgtaatacattgatccgccgttatagcgacactcgccgtctgcatccgctatcaagcaaaaatctttctctggaaagcgcgattgatcaagaaagtgatctgctggaaccccttcgttcaagagctgacctgattatcgacacttccgaaatgtcagtccatgaattggctgagatgctaagaacgcgtctgctcggcaaacgggaacgtgagttgacaatggtctttgagtctttcggcttcaagcatggcattccaattgatgccgactatgtttttgacgtacgtttcctgccaaacccacactgggaccccaaattacggccaatgaccggtcttgatcgtcctgtagccgctttcctcgaccgtcatacggaagtgcataacttcatctatcaaacccgcagttatcttgaactctggctacccatgcttgaaaccaataaccgcagctatctgaccgttgctattggctgtaccggcggtaaacaccgttctgtttatgtggcagaacagttggccgattattttcgttccagaggaaaaaacgtacagtcgcgccaccgtactctcgaaaagcgaaaataa

SEQ ID NO: 9762 - DNA, 468 bp, Photorhabdus luminescens
atgaataatcaagcagatttactactaagttcggtgctttccctcgcatgtacgcgcaataatgtacattgttcgagcaaaaaacgggctttagagattatcagtgagctagcatctcagcagcttaagttaccagaaaatgtcgtattcgaagcaatattgacccgagaaaaagtaggtactactggaattggcagtggtattgccatcccccacggtaagttagatgaagaaagctcagatcaagcggttggcgttttcctaaatctggaacaacctattgctttcgatgccattgataatcaaccagtcgatttgctgtttgctttactggttccaaacgatcaatgccaaacacacctacacacattgtcattgattgccaaacgtcttgcagataaaaatctctgccgtcgtttaagatcggcacaaagtgatgaagaactatacacaattatcactgaataa

SEQ ID NO: 9763 - DNA, 288 bp, Photorhabdus luminescens
atgcaactcaaaataaccggccacaatattgaaattactgatgcattacgcgacattatcactgcaaaatgcagcaaactggatcaatatttcgacaggatcaacctgactcaggtaatcctccgagtggaaaaggtacaacaaatcgccgaagctactgtacacattaacggaggtgagttgcacgcatcatcagaacatgaagatatgtatgcagcaattgatggactggtcgataaactggcgcgtcaattaaccaagcataaagacaaactgaaacatcattaa

SEQ ID NO: 9764 - DNA, 1443 bp, Photorhabdus luminescens
atgaagcaaagtttgcaactcaggcttagtcagcaactggctatgacaccacagctccaacaagctattcgtttgttgcaactttctacgcttgaactccaacaggaaatacaacaagcgttagaaatgaatcctttgcttgaacaggatgaagaacatcaggaaattggcaatcaggaacttcccgataacgaaacggaagctatggatacgcttgatgccttgcaacaaaaggatatgccagatgagttacccctggatgtcagttgggatgaaatttacaccgctggcacaccttccgggacacgcaatgactataacgacgacggcgaactgccactttaccaaggtgaaaccgttcaaaccctgcaagactatttgatgtggcaggcaaagttgacccctttcacggaaatagatgcggcgattgcgacatcaatcattgatgccgtagatgacactggctatctcactgtaccactagaagatatccttgccagcctcggcgacaaccaactcactctggcagaagtggaaactgtgctcaagcagatacagcatttcgatcctatcggtgtcgccgctcgtgatctaaaagattgtctactcgtccagctatcaatgtttccgccagaaacaccttacctgaaagaggcaaaactgatcgtttgcaaccatttggagctattaggtcattgggatttccgcaatttaatccgtctgagccacttgacagaagatactctgaaagaggccataagtttaatccagtcacttgcaccaaagcctggcctggcaataaacactggcgaatcagaatatgtcatccccgatgtactggttcgaaaagaaagtgaacactggcaagtagaattgaatacagatagtatcccccgtttacacattaatcagcattatgcagagcttgggcaacatacgcgcaatgaaagtgacagtcagtttatccgcaataacctacaagaggccaagtggcttatcaaaagcctggaaagccgaaatgatactctgctgaaagttgcgcgttgtattgtagaacagcaacaggaattttttgaacatggtgaagaatatatgaaaccgatggtcttggcagacattgctttccaggttgatatgcatgaatccaccatttccagggtgactacccagaaattcctgcacagcccacgtggtatttttgaattgaagtattttttctccagccatgtcaatacagaaagtggaggcgaagcctcttcaactgcaatacgggctttggtgaaaaaactggtagcagcggagaactccgccaaaccattaagtgacagcaaactgacgagcatgctagccgatcaaggcatcatggttgcccgacgaactgtcgcaaaatatcgagagtcgttatccattccgccatcaaaccaacgtaggcgtctggtttga

SEQ ID NO: 9765 - DNA, 726 bp, Photorhabdus luminescens
atggcaatactaaacgcagaaaacctggcaaaagcttacaaaggccgtaaggtcgttgaaaatgtcagcctaaacgtgaactccggcgaaattgtcggcctgcttggtccgaacggtgcagggaaaacgacgactttctatatggtcgtcggtatcgtttcacgggataccgggacaattaccattgataatgaagatattagcctactgccacttcacgaacgggcacgccgtggtattggttatttgcctcaggaagcttctattttccgccggctaagcgtattcgacaacctgatggctgtattggagatccgccaggatctgactcaagaacagcggaaagaacgtgccgaagagctgatggaagagttccatatcagccacctacgtgacaatcttggtcaatcactttccggaggtgaacgtcgccgcgtagagattgccagagcgctggcagctaatccgaaatttattttgctggatgagcctttcgccggcgtagatcctatctcagtcatcgatatcaagaaaatcattcagcatttgagagattatggactaggggtccttatcacagaccacaatgtccgtgaaacattggatgtatgcgaacgtgcttatattgtcagccaagggcatctgattgctcacggcacacctaatgatattcttaataatgaacaggtgaagcgcgtttatttaggcgaaggtttccggctctaa

SEQ ID NO: 9766 - DNA, 534 bp, Photorhabdus luminescens
atgaaaaacagaatccgtaatgcttttattgccagtgctatctttgtagtcagtcttcccgctatggcactgaaagatgacacacagaaacccatttctatcgattctgctaaacaagcccttgacatgacagggaacactgccacatttacagaagatgtgatcgtcaaacagggttctatcgatatccgcgctgacaaagttgttgtgactcgcccagatggcgattctaagaaaatggttattgaagcatttggcaatccggtaaccttctatcaattacaggacaatggcaaaccaatcaagggccgcggtgccaaaatgcgttacgaaatggataaagagctggttacactcactggcaatgcctatttagaacagttagacagcaatataaaaggcgaccgtatcacctatctagtcccaactcagcagatggaagcgtttagtgacaaaggtaaacgagtgaccaccgtcctactaccttctcaattacaagaagaaggcccaggggctaacaacaagagtaaataa

SEQ ID NO: 9767 - DNA, 579 bp, Photorhabdus luminescens
atggatagaatcaaatcctggttggtgataactctggtattaatcatcctggcgttaattggctggaacttgtctgattcagatgagattaaatcatcttctgccacagataacagtcagccaacctatcaaagtcaggaagctataacttttgtttatgaccctacggggaaactgacgtataaactggtcgctgatgacgtccaaaactatgcagagtcaaaacttacttggtttactaaaccggtattaattacttatgactcaaatgccattgctacatggacagttcgtgctaacaaagccaaactaactaatgacaaaatgctctatctttacggagacgtacaggttgacagtctaactaatacgtcacaattacaacgtattactacagagaacgctatcatcaacctgaccactcaggatgtttcatctgacgatcaggtcacactgattggtgtcgggctaaaatccgtcggtatgaaaatgcgtggcaacctgagaaacaaaaccgctgaactgattgaaaaggttaacacctactatgaaatccaacatgaaaaacagaatccgtaa

SEQ ID NO: 9768 - DNA, 564 bp, Photorhabdus luminescens
atgagccaattagtttatttggacacctgttatggtccagttgataaagacgttattgaaaaagcccgtaaaatccgcttgctgatttgcgatgttgacggtgttatgtccgatggccggatctatatgggcaataacggtgaagaattaaaaacatttaatgttcgagatggttacggaattcgctgcttaattacttcaggaatcgaagtcgctattattaccggtcgtaaagcaaaattgctggaagatcgagcaaacaccttaggtattacacatctttaccaaggacaaagtgataaggttttggcgtaccaaaaattgttagatacactgggattaagaccagaacaggttgcttacatcggcgatgatctgattgactggccggtcatggaacaagtggggttatctgtcgctgtggcagatgcacatccattgctcttaccaaaagcgcattatgtcacccaaattgcaggggggcacggcgcggtaagggaactttgtgatttggtgctttttgctcagaataagctggaagaagccaaaggattatcaatatag

SEQ ID NO: 9769 - DNA, 969 bp, Photorhabdus luminescens
atgcctaagattgattttcagcaagcgggtaaaaaagtattacacatagaacgtgatggattaacagaacttgaacaacatataaacggagattttgaccgtacctgtgaactgatgttcaactgcgaaggtaaagtgattgtcatggggatgggcaaatccggccatatcgggtgtaaaattgctgccactttcgccagcaccggtacaccatcctttttcgttcatccgggagaagccagccacggcgacctcggcatgatcacacctaaagacattgttttagccatctcaaattcgggtgaatccagtgaaattttgtcgctgattcccgcattaaaacgccaaaaaatcccgcttatctgcatgactaacaattgcaacagtagtatgggaaaagccgccgatatccatctgtgtatcaaagtcccacaggaggcctgtccgctaggtttggctcctacaaccagtactactgcaacactggttatgggcgatgctttagcggttgcattgctccaggcacgcggctttactgctgaagatttcgcactatcacatccaggcggcactcttgggcgcaaacttctgctactggtgagtgatttgatgagtacaggcgatgatattccaaaggttaatcgtaacgccaccttacgcgaagcgctgctcgaaatcacccggcaaaaactgggtatgaccgtcatttgcgatgaaaataggtatattgatggtatttttactgacggtgacttacggcgagtatttgatatgggcgtcgatttgtacaatgtcaaaatttcagatgttatgacaacgggcggtatccgcatcaaaccgcatgcccttgcagttgatgcattgaacttaatgcagtcacaccatatcacgtccttattagttgcagaggacaataaattgcttggtgtattacatatgcatgacctgctacaagcgggtgtggtgtaa

SEQ ID NO: 9770 - DNA, 975 bp, Photorhabdus luminescens
atgcttctgacctttttacttctaattaccgggttgattttactggtatatggttccgatagactagtatatggcgctgcaatttttgcccgtactctgggactgccgccatttattattggtattaccattgttggcattggaacgtctctacccgaattaatggtttcagttactgcaatgctagatagtcaacctgatatggctgtgggtaatgttattggctccaacattaccaatctgctactaataaccggtgctgctgcatttattcgcccaatggaagtaaaatcagatatcctgcggcaggaactgctgttgatgctactgctcaccgtcttctgtggttatttgatgagtgatcactatctcagccggatggatgggttggtattactcgcttccgccatagtgtatatcttactgatgataaaaatggttgctctaccgcgccgcgccgaagcggatatttatacgcaagaacaggctgccgaattaccggtcgaaggcaataaacacattgccctactttggattctattagggttacttattttacctatggcaactcgtatggttattgataatgcaactgttattgcccgcatttatggcatcagtgaattagttatcgggcttaccgtacttgcggtcggtaccagcttgccagaattagcaacctctattgccgcagcattcaaaggcgaagatgatattgcattcgggaatattataggttcgaatatattcaatatatcaattgttttgggccttcccgcattactctcaccagcagccatttcacctgaatctttccatcgtgacttttgggtaatgatggtagccagcataatatttactgcattttgtctgggtcgtaaacaccgattaaaccgatttaaaggtgtcctgttattaagctgctttatcgcttattttatcgtactgtttatttccaattacagcattgaataa

SEQ ID NO: 9771 - DNA, 804 bp, Photorhabdus luminescens
atgaatcaacagacagcaaatctcatcgaggtccgtggtatgtatttttcccgtggtaaccgtttgatttttgctgatattaatctaattgtgcctagaggaaaagtcacagcaattatggggccttctgggatagggaaaacgacactattacgattaattggcggtcagttacgtcctgaacgaggggagatctggtttgatggcgacaatattcctgctttatcccgttctcacttgtatgctgctcgcaagaagatgagcatgctgtttcaatctggggcattattcactgatctcagtgtgtttgagaacgttgcttttccgctgcgtgagcatacgaatctgcctgaagaaattatacagaccacggtaatgatgaaattagaggccgtagggttacgtggtgctgctaatttgatgccttctgaactttccggtggtatggctaggcgtgcagctttggcacgtgccattgcacttgatcctgaactaattatgtttgatgagccttttgttggtcaggacccgattacgatgggggttttagtgaagttgattgatgagctgaataaggcacttggcgtgacctgtgtggtggtttcccacgatgtaccggaagttctgagcattgcagattacgcttatattatcgctgaacaacaggttattgctgagggtacagctcaacagttgcactctaatcctgataggcgagtacggcaatttttggatggtattgctgacgggccggtacctttccgtttcccggctggggattacaaaactgagttattaggataa

SEQ ID NO: 9772 - DNA, 783 bp, Photorhabdus luminescens
atgttaacacaggcgctggcggcacttggccgacgggccattgaggtgtttgcctcttttggccgtgcaggttttatgcttttccgcgcgataattggcaagccagaacccgccagacaatggccgttactccgacagcagctttacagcgtgggtgttcggtcattattgattattatcgtttcagggctgtttattggcatggtgcttggcctacaggggtatctgatcctgacaacatacagcgcagaagccagtcttggtatgatggtggcgatatctctgttgcgtgaattggggccggtggtcacggcactgttgtttgctggtcgagcaggatcagcgctgaccgcagagatcggcttgatgaaagccacggagcaaatttccagcctggagatgatggcggtagatccattacggcgtgtgatcgcgccccgtttctgggccgggtttatcagtatgccgctattatccttgatttttgtggcggtaggtatttggggcggtgcgatggttggtgttgattggaaggggattgacagtggcttcttctggtcttcaatgcagtctgctatcgagtggcagaaagatttgcttaattgttttattaaaagtgtcgttttcgccattactgtgacctggattgctctattcaatggttatgacgcgatcccgacttcggaagggataagccgagcaacgaccagaacggtggttcatgcgtcgttagcggttttaggtttggattttgtgctgacagcactcatgtttgggaactaa

SEQ ID NO: 9773 - DNA, 507 bp, Photorhabdus luminescens
atgcaaagcaagaaaagtgaaatttgggttggattttttgtcttgattgcactggctgcaatcgtctttttatgcctaaaagtggcagacattaaatcggtaggcaaccagccaacttaccgtttatacgcaacttttgacaatattggtggtctgaaagtgcgttcaccggtaaaaattgggggggtggtgattggccgtgttgcaagtatctctcttgatgaaaaaacttatacgccgcaagtggcactggatattatgaagcaatatgaccgtatccctgataccagttctctttccatccgtacttctggcctattaggtgaacaatatattgccctgaatatcgggtttgaagatcccgatatggacacccgtattctgaaagagggtgaccgcgtacaggataccaaatcagcgatggtacttgaggatctcatcggccagttcttgtataagagtggtgataatgtccaaagtggggcagagcacacgccgacaccctag

SEQ ID NO: 9774 - DNA, 630 bp, Photorhabdus luminescens
atgttgaagagattattaatggtggtgctgctggttattgcgccattagcgagcgcggttgatcaaacaaatccttataagttaatgcaggatgcggcggaaaagacttttactcgtttgaaaaacagccaatcacaaattcgtcaaaatccagattatctgcgtaaagtggtgaaagaggagctactgccttatgtccatatcaaatacgcaggggcattggttctggggaaatactataaagatacgactccagagcagcgcaagatttattttgctgcatttgaatcttatcttgagcaggcatatgggcaggctttggcaatgtatcataatcaaacttaccagattgacccggaaaagccgttaggggacagcaatgttattgctattcgtgtcactattatcgatccgaatggtcgccctcctgtccgtcttgatttccaatggcgcaaaaacagcaaaacgggtcaatggcaggcattcgatatgattgcagagggcgtcagtatgattacgactaaacagagtgaatgggcctctatcttgcgtcagcaaggtattgatggcttaactaagcagcttgaaatcagcgctcgtcagccaatcacattggaagagaaaaaataa

SEQ ID NO: 9775 - DNA, 294 bp, Photorhabdus luminescens
atgggtgagagtctgatctgggaaaaaacagggcaaacattgattctcaagggcactttagatcgtaatagtttgcttcctctctggcagcaaaaagagaaattattggtcgagatcaatgacatcaatgtgtcacaacttgaatatgtggattctaccgggttagctcttttagtccgtttcaaacatcatatgcaaatgagaggggataaattgcgcttttctggcattgatgaacggcttaataccctgattacgctctatgatttgcaagaaattatcattgatagctaa

SEQ ID NO: 9776 - DNA, 255 bp, Photorhabdus luminescens
atggatactaatgagattaaacaagtgctgatggataaattagcactggatgaagtcatcgttaacggagatggcagccatttccaggttattgtggttggtgaaatgtttgccggcatgagccgggtaaaacagcagcaagccgtttatgcgcctttgatggaatacattgctgataatcgtattcatgccttgtcaattaaagcctacacaccggatgattggaaacgggatcgcaagctcaacggtttttaa

SEQ ID NO: 9777 - DNA, 1266 bp, Photorhabdus luminescens
atggataaatttcgtgtgaaagggcctactcgtctgtcgggtgaggttactatttccggggcaaaaaatgctgcactgccaatcctgttcgccgcgttgttggctgaagagcctgttgagttgcaaaatgttccagaattgaaagatattgataccactatcaaattgttgaatcgccttgggactaaagttgaacgtaatggttctgtatttgtagatgcccgcgatgtgaatcaatattgtgcgccttatgagctagtaaaaaccatgcgtgcctctatttgggcgttaggtcctttggtggcgcgttttggtcaggggcaagtttctttaccggggggatgtgcgattggtgcccgcccggttgatctgcatattagtggcttggaacagttaggtgctgaaattgtgctggaagagggctacgttaaggcttccgttaatgggcgtctgaaaggggcttgcattgtgatggataaagtcagcgttggagcgacagtcacgattatgaccgcggcaacgttggcagaagggacaacagttattgagaatgcagcacgtgaacctgaaatcgaagatacggctaattttctcaataccttgggtgcaaaaatcaccggagcgggtacagaccatatcaccattgaaggtgtagaacgtcttggtggtggtgtatatcgtgtactacctgatcggattgaaacggggacatttcttgttgcggcggcgatatccggtggcaaggtagtttgccgtcatgctcagcctaatacgctggatgcggtattagctaaattgcgtgaggcgggtgcggatattgcaattggtaaagattgggtaagccttgatatgcacggtaagcgccctaaagctgtgacattacgtactgctccgcaccccggtttcccgactgatatgcaggcgcagttcagcttgctaaatttggttgcggaaggtgctggtatgatcaccgaaactattttcgaaaaccgtttcatgcatatccccgaattaattcggatgggggcgcatgcggaaattgaaagtaataccgtgctttgtcatggcgttaaaaaattatcttgcgctcaggtcatggcgacggatttacgcgcatcggcaagcttggttctggcgggttgtattgcggaaggcgtgacggttgttgaccgtatttatcatattgaccggggttatgaacatatcgaagataagttgcgcggacttggcgcaaacattgaacgagtgaaatcaacgggaaagtaa

SEQ ID NO: 9778 - DNA, 1560 bp, Photorhabdus luminescens
atgaaaccagaaaatttacgtaccgataacaaacgcccatttaccagtaaagagtatctgaattcactccaggatagccgtgaaatttacatttatggtgagcgagtcaaagatgtcactatacatccagctttccgcaatacagccgcttcaattggtcaattatatgatgctctgcatgcccctgaaacccacaatgcgctctgctggaatacagacactggtaatgaaggttatacgcacaaattcttccgttttgcgaccaatccagatgaactgcgccaacaacgagatgccattgcagaatggtcacgccaaagctacggctggatgggacgcacccccgattataaagcggcattcagttgcgcattgggcgcttaccctgaattctatggtcaattctctaacaatgcccgcgcatggtataaacgcattcaggaatcatgtatgtatttcaatcatgccattgttaacccaccaattgatcgtcacaaaccagcggatgaagtcaaagatgtttttatccaactggaaaaagagactgatgcaggtattatagtcagtggagccaaagtcgtggcaaccaactcagctcttacgcactacaacttcattgttggctctgcgcaagacataggggataaccccgattttaccctaatgtttattgctcctatgaatgccaatggcatgaaattgatatcccgcgcctcttatgaattagccgcaggtaccaccggttcccctttcgattatcctctctccagtaggtttgatgaaaatgacgctattttagtgatggataaggtattaatcccatgggaaaacatactaatttatcgcgatgttggtagctctcgccattgggctgtacaaagtgggtttgcccgtctgttccccatgcaggcttgtgtacgtctagccgttaagctggatttcattacagcactgctgcaaaagagtctcgaatgtaccggagtggtagattttcgtggtgttcaagcagacttgggagaagtagtggcatggcgcaatctattctggtcattgacagatgccatgtgggcagaagccaagccgtgggaaggcaatgcctatctaccggatactcaagcgattcaaacttatctcgttatggcaccgatagcttatacaaaaattaggaatattattgaaagtaatgtcaccagcggcttaatctacctgccatccagtatacgtgacatgaataatccagaaattaataagtatcttgagcaatatgtacgcggttccaacggcatcgactatgtagaacggattaagattttaaaattaatgtgggatgccattggaagtgaattcggtagccgccatcagctatacgaaatcaattatgctggtagtcaagatggagtccgcttgcaatgtctgcgccatgcttatagttctggcaatatgaagaaaatgatggatttggtggaatcctgtctttctgactatgacttgagtggctggacaaaaccatatttacacaataaccaagatattaacttgttagataaattactaaagtaa

SEQ ID NO: 9779 - DNA, 489 bp, Photorhabdus luminescens
gtgaccggggtgagagagtgcagccaacaaagaggcaacttgaaagatgacggatatataagatggtccatatatgaaaagatgggctacgatctaaattatgttgagcaattagtaaaaaaatgtagatttatagacttatatagatacaaccataaatttgaatcagagctggtcaaaaaaattgtcaaaaatgcatcaaataatgtggtcgattttggtgcaggacattctgttattgaggacgatttagattttaaatatattagaaatcaaatgaaagaaaaaggcactactatttttctagataaaagctctcatattggagttaattatctccatccagaagaagtcttcttaaacaattatttcttggcgagtaaatgtaaccaaaaactatccgatatcacgataacggtagataacaaaagtaagttacaaatattggatcaagccttatcggcacttaagtcaatagaggttatatga

SEQ ID NO: 9780 - DNA, 2496 bp, Photorhabdus luminescens
atgaacacctctgcaattaagaacgatttaagaaagcaatatagtacttttatcttatttcctattgaaacagtaattaatttattatcttcttttttttcattttccatattaatttacataataacattgcctttgactaatagtttagaggaaagtagtattggcctgattatcttcttaattgcaatattgagacctgccttaagtgtaattaataacataagcctgttccttattaataaaaaacaggcttatattttatcaacatttaatgattgctttacaagtaaaaaagatgctcagcagaatgagcacgacattgtaaattactcctcgtatgacactagtgttgttttgattatatctaaggtaatttgctttatttatctttccattctcatggttattaatgttgaaggtggtacagttggcttactatcattgtgttctatattgataccattatcattttttctatttaaaaaacgagcccatctttctaagaaactagcaaaaataaggaagctgagatatggatttattggagataactttgaggccctgactgctatattgttaactgggtaccaagggggaaaatttctaagcttgaatagaattattgatactgaagaaaaagtaaaacgcattgattcattatggagagctgtagatattgcatcaaatgcgtttttaaaagttattcctgtcctctttataatcctgattggcaaagaaatagacaatagtgaaaaattactcattcttttatattctctaattctggttggcgaatatcttggtttgattagattactaacaccattttatgatggttatctggccaaattgtcaattattagtagatataagaattaccaatacaaaccagatgaatactataacctagatggcacacaaggttttattgaaaaaaccattctggggaatatatttttatcaaaaaagttaatcaataggagaatattaaacaagctatgttatgaaatttttcaaattaataagtatattaatttaagttcaaacattaatgaattgtcaagaggacaattaaatcttatttttgccgtaaggaatgtatatatggctataattaataattacaaaggccatatttattttgatgtaaataggactggctgggattctaagttattacttgatttagaagatgtcatttacaaattaaaaatagaatatcaaattgatattatactattacatcttcataaaattaaagatatagaattagaaacaaaaaatgaaaccacaaaatctacgttagatagtaaagttagaaaaatgaaagatcacacaaaaattgccagatttttatctatttttagctataactctttaattggaattatattactgcttattgctagcttttcattattcgaattaggaagaattacatacaatgaatatgatagtgaaacctatagaataatatccatatctctattaggtctaatttcatttgtctcaggatcatatttaatagagtttaaaataagaaaaaaagcaagaaaagacatatatagatatattaaaaacaactctagtgaagaaggattcaacttattcaagcatgaatacaatgtaataataaatagatttaccatgtatgccaaagatgttttctggtttggttcgatattttccggaaccctatttttattttttgactctgacaattttataattatacttggagctatgtttatatttcttgctagcatttatttattgtatcctacgtacaaggataatagaaataagcactataaagaactccactctctatcaatttacttttcttatcctaaaaaactacctcgatgtaatttggttaatcgtttctgtcaggatactatcctatccggagtgcatcgtttgtatacaatagcatcacaacgatatataattaactctgtagcttctatattaggttttctaatatccagtttaataattttttactctctatatccaaatttcgaatcagacaacattacggctgctataaacttagacagtagaatagtaattttttattttgcaatattcggatacttatcggagattgtatctatccaaagaataactaaacatgtaaatttttatcataagagaacaaacttatcctctaatttatcaattttagagcaaagattagaaagtgatagagttatacaattagtaggaaataatggaagcggtaaaactttttttcttaagagattatccgaaataaaggggtatatatatatagaccattatttcgatcactacctagcaaacgataaatttttagattacctaaacaaatctaattcagatgtgattatatttgatgagtttgattgtaggaaattaatagataaaattgataaaaataaaaaaataatcatcgtctcacatagggaagtcattggctcgaaattgaacattagcgaggtggtatga

SEQ ID NO: 9781 - DNA, 1443 bp, Photorhabdus luminescens
atgcaattaacatttatcggtcatcaaagttggctaatctctcacaaaaatacaaatattttggttgatcctgtcttaggcccaacaatgggaaactcccgatatataaagttcgaaatataccctccaagagatattgatataagcaatatgccatcaatcgatgccgtatttatatcacatgaacatgttgaccatttcgatatcgatactctatcaatatttccaaagggaacagatatttatatatcactgcttatgccaagctgtataaaaacagctttagaacatctagggcataatgtcatattacattcatttaaaaaagaaataagagtaaaagatatcaaaataaagtcattctctgctccatatgaaacaatattatgggagtcaagggtaactcaatacttagtatcagatattaatgaagaaaaatataacggttttatagcagtggatgcaataatcagcgaggaatacattgaagggattggtgatcaatacccaaatccacagtggatcatagtagcaaataattcacagtgtacaccaaaacaagctcaaggagcatatacaaatttgctaccattagaatcgtcaagacttagtggcaagaattatagaggagtcaaattacttaactctatattaatagactatcttgatggcatccctgaggaaactaagatattgatttgtggcaatgggtttataaatcccagagaaaattatggtccattcctattctcagataataaggtattgtctgaaattgccaaccaattatcaattaaagagaacgtttgtggcccatatccaggtgaagtaatagaagttatagatggaaatctttcaatcagtttatctagctggatagaattaaataaaaacaaacacttagatctaaaaaataagctaattaagtacatggatgaagaatctggagttgagctcagtccatttattcctgtactcggtgaacttagtgaaacagaagaaaaaaatgggttagctacgattgaaaatgaactaactgatatggctcgaactctagctattgatcctttagttggccgattagcaatttcaatgaataactatataaatggtgaattgagtgataaccgaattctaataaagtttaaagataaagattttgggtatgtttattctgtatcatcctgtcaatttaccaaaacttacacacatgagaactatttaagtgaatatccctttggtgttgaaatatatattcaagatttcgttggtctatgtttaggtaaaatacaaatttgggacttagcagggacgagtatacgcagctggtatcttggtggaatatatgagaacatcattgtgtttttctataagtactttggagagcaaagaaggcctgatttagcacttaaagtatacgaagaatatatctcacaaaaataa

SEQ ID NO: 9782 - DNA, 114 bp, Photorhabdus luminescens
atgagtgataaagaaaaagttaaattagtacgtttacttaaacaagtaaaaggaaaaaaaggctccaagagtcagacctcaaaatctgacgcaatcgctgcttaccactattaa

SEQ ID NO: 9783 - DNA, 1059 bp, Photorhabdus luminescens
atgattgccaagttgctgcgctctgcttttttaggattacttatcgctgtaattttactgatgaccattccatcactgcgccctagcgggctgacatcagcaattaccaataacagtaatgacgaagttccattcagctttaataaaggtgtccgtagggcagcacccgccgtagtcaacgtctacagcagcaacatggggagtttttctcaccaaggccgggaaaaccatacccttggttctggcgtcatcatgagtgataaaggctacattcttaccaataaacatgtcattaataatgcaggacaaattattgttgcactgcaagatggtcatttttatgaagccctcgtcataggctctgacagcttaacggatcttgccgtcctgaaaattgatgccgaaaacctacctgtcataacgattaatccaaatagagtggcgcatgtgggagatgtcgttttagccattggtaacccttacaacttggggcaaaccattactcaagggattattagcgctaccggtcgcgttggattaagccctacccgccgtcaaaacttcctccagaccgatgcttccattaatcagggtaactctggcggagctttgattaatacccttggcgagctagtaggtatcaatacattatcattcgataaaagtgaaaatggtgaaaccccagaaggattaggctttgctattccgactgaactcgccaccaagattatgcagaaacttattcgtgacggacgggttatccgaggttttatcggcataacgtcacaagagctgccacatattcgctcttctaacggcagtattaatcagattcaagggttacgagtatttcaggtgactacaaacggaccagcgcaaaaagttggtattaaagtgggtgatatcattaccagtgtcaataacaaacccgctatttccgcggttgaaacaatggatcaagtggctgaaatacgccccggcagcgtggttcctgtcactttattgcgcaatgggaaaatattatcgctacaagtgaccattgaagaatttgaaagttaa

SEQ ID NO: 9784 - DNA, 189 bp, Photorhabdus luminescens
gctgtaagtttacctcgcgacctcgatttcgagggagtgaacgaattggagattattcgtgaaggcgatatcattattctgcgaccgattaaacccagttggaattcctttttacaacaagaaaaaactgactctgactttttaaccgaacgactggatattgtggaagaaggacgcgttaagttatga

SEQ ID NO: 9785 - DNA, 573 bp, Photorhabdus luminescens; identical to SEQ ID NO: 7345

SEQ ID NO: 9786 - DNA, 705 bp, Photorhabdus luminescens; identical to SEQ ID NO: 7346

SEQ ID NO: 9787 - DNA, 1377 bp, Photorhabdus luminescens
atgaaaagaaaacacttattccttagtgcattagcaatcagtatcgggttgtctgcaatttctgtccctacgattagcaatgctgctttacctgctgctatcgccggtcagacattaccaagcctcgcaccgatgcttgaaaaagtcctgccagccgttgtcagcgtgcatgtctctggtacgcaagtacaacaggaacagagtatacctgaagaattcagattcttctttggcccaaatctacccatgggccgtgaaagtacccgcccattccaagggcttggttcaggtgtcatcattgacgctgccaaaggttatatattaaccaacaatcacgttattgagaatgcagataaaatccgtgtgcaattgaatgatggacgtgaatatgaagccaaattattaggccgcgatcctcagacagatattgccttgctgcaactgaaagatgctaagaatttaactgcaattactatggccgattccgataagctccgagttggtgattttgctgttgcggttggtaatccattcggccttggtcaaactgcaacctccggcattatctctgcgttaggacgtagcggtctgaatctggaaggattagaaaattttatccaaacggatgcctctattaaccgtggcaactccggtggtgcactggtcaatttgaatggtgaattaatcggtatcaataccgctattctagccccgggtggtggtaacatcggtatcggctttgctatcccaagtaatatggcaaaaaccctgagcgagcagcttatcgcgcatggtgaagtaaaacgcggtatcctcggtattaaaggtactgaaatgaattccgatatcgctaaggcattcaatattgacgcccaacgcggagcatttgtcagtgaagtcttaccaaaatccgccgcagcgaaagcaggtattaaatccggcgatattcttatttccgttgatggtaagaagattagtagctttgctgaactgaaagccaaaatcggcacaacgataccaggtaaagaaattaaaattggcttattacgcaaaggtaagccaatggaggtttctgttacgctagaaaacagtgaaggtcaaacaaccaaagccggaaatctaacccttgccctgcaaggtgcaaccctaagcaatggtgaagtgaaagggacttacggtgtgaaaatcgatagtgttgctcaaaactcaccggcggcgttatctggcttacagaaaaatgacctgattgttgggatcaataatgaacggatacagaatattaatgaactgcgcaaagttattgattctaaaccgccagttatagcgctgaacattcttcgcggagaagagagtatttatctgttgctaagaaattaa

SEQ ID NO: 9788 - DNA, 405 bp, Photorhabdus luminescens
atgacttgggagtatgcactgattggattggtggttggttttgctatcggagcgctagttatgcgttttggtaacactaagctgcgccagcagaaagccttacaaactgaactggagaataataaatcagaactggaagagtatcgtaaagaattagttggtcattttgcccgtagcgcagaattactcgacaatatggctcgcgattatcgtcagttatatcagcatatggctaaaagctctcatgaactgatgccgaatatgccagcacaagaaaatccatttaattatcgattgactgaatcagaagcggataatgatcaatctccggttaaaatgccaccaagagattattccgatggtgcttccggcctgtttcgtccgatgaatgaaaaaaaccagtaa

SEQ ID NO: 9789 - DNA, 1131 bp, Photorhabdus luminescens
atgccatcattgattaccccttcatcatgttatcaaaaagccctttctgagggcaaataccaaccagatgatgttcagcgtcaagttgtagctcaattggataccattcaccatgctctgattaatgtttctcccggcaatcccgtgaggcgacaaagcttgaaagggcgtctgagtaaactgttaggaaaaacgacgtcaatgagctgtgcacctgttcaagggctttatatgtggggcggcgttggtagagggaaaacttggttaatggatatgttttaccagagtttacccggtgaaagaaaattacgtttgcatttccatcgttttatgctgcgggtacatgaagaattaatggtattacaagggcatgaaaatccgctggatattgtggcggatggttttaaaacggaaacagatgtactttgctttgatgaatttttcgtctccgatattactgatgctatgattcttggtgcattgttggaagcgctgtttgtcagggggattaccttgattgcaacgtcaaatattcctcctgatgaactctatcgtaatggtttacagagagctcgctttttgcctgctattgagcagatcaaaaaatattgtgacgttatgaatgtggattcgggtattgactatcggttgcgcacgttgactcaagctcatctctatttcacaccgctgaatgaagataataaacgagcgatggatcgaatgtttattcttttggccggtaatagcggtgaacaagcttctatattggaaattaaccatcggcggatgccggcaattcgtgacgctgatggtgtattggcaattggatttaacgtcttatgtgaagatgcgcgtagtcagatggattacattgttttatcaaaacgttatcacacggttttgttataccaggttccagcgataatgccgggtaatgaaaatgctgctcgtcgtttcttggcattggttgatgaattttatgaacgccgggtaaaattgataattaatgcggcggtgccgatggagcagatttaccaaggggtgttgttggttttcgaataccagcgttgcttatcccgtttgcaagagatgcaaagtgaagagtatctcaaattacctcatttaccttaa

SEQ ID NO: 9790 - DNA, 429 bp, Photorhabdus luminescens
atgaaaacttttacagctaagccagaaaccgtaaaacgcgactggtatgttgttgacgcagatggcaaaactttaggccgtcttgcaactgaagtggctcgccgtctgcgcggcaagcataaagcggaatacactccgcatgttgataccggtgattacatcatcatcgttaatgcagaaaaagttgcagtcaccggcaacaagcgttctgataaaatctactatcaccacaccggtcatatcggtggtattaagcaagcgacctttgaagagatgattgcccgccgtcctgagcgtgtaattgaaatcgcggttaaaggcatgctgccaaaagggccactgggccgtgcaatgtaccgtaaactgaaagtttatgcaggtagcgagcacaaccatgcggcacagcaaccgcaagttctggacatttaa

SEQ ID NO: 9791 - DNA, 393 bp, Photorhabdus luminescens
atggctgaaaatcaatactacggcactggtcgccgcaaaagctcttccgcacgtgtctttattaagccaggtagcggtaatatcgtcatcaacaaacgcagtcttgaagtttacttcggccgtgaaacagcgcgcatggttgttcgtcagccgctggagttggttgatatgttgggtaaactggatctgtacatcactgttaaaggtggtggtatttctggtcaagcaggtgcaatccgtcacggtatcacccgcgcactgatggcgtatgacgaaactctgcgttctgatcttcgtaaagctggcttcgttacccgcgatgctcgtgaagttgaacgtaagaaagttggtctgcgtaaagcacgtcgtcgtccacagttctccaaacgttaa

SEQ ID NO: 9792 - DNA, 642 bp, Photorhabdus luminescens
atggctgtcgctgccaacaaacgttcggtaatgactctgttttcaggcccggccgacatttttagccatcaagtgcgaattgtattggcggaaaaaggtgtcagtgttgaagttgagcaggttgaggcaggtaacctgccacaggaccttatcgatctgaacccttatcagacagttccgactttggttgatcgtgagctgacgctatatgattcccgcatcattatggaatatctggatgaacgctttcctcatccaccattaatgcctgtgtacccagttgcccgtggttccagccgtttgatgatgcaccgcatcgaaaaagactggtattccctgatgcatactattgagaaaggcaattctcaagaggccaatactgctcgtaaacgattagcagaagagttgctagcagtggcaccaatatttaaagagatgccattctttatgagcgaagaattcagtttggttgattgctatcttgctcctttgctgtggcgtttgccggtgttgggtatagaattaccgagttctggtactaaagatttacaaatttacatgcagcgtgtctttgagcgtgatgcattcttagcttcattaaccgaagctgaacgtgaaatgcgcttgcaatccaggagctga

SEQ ID NO: 9793 - DNA, 516 bp, Photorhabdus luminescens
atggagctgtctcaaatgtctccccgtcgtccttatttgttgcgtgctcactacgagtggttactcgataatgatatgactccacatctggttatagacgtgactttacgtggagttaatgtaccaatggaatatgcccgtgatgggcaaattttgctgaatatagcgccgagagctgttggtaatcttgagttaaccaatgatgaagtacgcttcaatgcccgttttggtggtgttccccgtcgggttaatataccgatggcggcggttatagcgatttatggccgtgaaaatcgggcgggaatgatgtttgagcctgaagcagcttataaagatgaatatctttttaaatccgcttcagatcaggataaggctgatacctctgcatttgcgacagataatctggtattagttacggatacattgcccgatgctgaagataatagtggaacttcacctgatgatgagccaccaaaaccgacgagagggcaccctgctttacgggtagtaaaataa

SEQ ID NO: 9794 - DNA, 519 bp, Photorhabdus luminescens
ctggaaatattaatgaagctaataaaaaccttaattttattatctccaatgctgtttatcagtcatacagcacttgctttatcacagcccttaacatctgaaaatattaataaagaaattatgaatagaggtaccaattctgtagtggcagaattaggtgaaataggagccaaacaagaaatcactcacaacatttctactggtgatagtaaatggataaaactggcttttaaattaacgcaaagcatacacctgggttttgccaaagaagttcgctacgcattatccttagcattaattaataatcctgctgaagtccttgctaacgtagataaagaaaacaatatatcattggctgatatctgcacaaccccaccagaactggggaccagagagaataaaatagaatttgtagataaggttaaaaagagcttaagcgctatcacagatttcaaagctaaaaacagaactggagattgtttttgggaattagaaaaagcctacaatacagaattctaa

SEQ ID NO: 9795 - DNA, 1419 bp, Photorhabdus luminescens
atgagccagaatgtatatcagtttatcgacttacaacgcgtcgatccgcctaaaaagccgctgaaaatccgcaaaatagaatttgtggaaatctatgagccattttcaacaagtcaggcacagacacaggccgatcgctgtctttcttgcggtaacccttattgcgaatggaaatgtcccgttcataactacattcccaattggcttaaactggctaatgaaggacgtattatggaagcggcggatttatcccatcaaacaaacagcctgccggaagtttgtggtcgtgtttgtccacaggatcgcctttgtgaaggcgcttgcactctgaatgatgagttcggtgcagtaactattggtaatattgaacgctacatcaatgataaagcgattgctatgggctggaagcccgatatgtcacacgttcagcccacgggcaaacaggttgcgattattggtgcaggccccgcggggctagcttgtgctgacgtattgacccgtaatggcgtacaagccgttgtttttgatcgtcacccggaaatcggtggattactcacctttggcatacccgcgttcaaactggaaaaagaggtcatgatacgccgccgtgaaattttctctgagatgggaattgaattccggctcaatactgaaataggcaaagatattgccttatctgaactgactgagcagtttgatgcgatatttcttggcgtaggaacctatcagtcaatacgtgggggactggcaaatgaagatgctgatggtgtttatgatgctctaccatttctgactgccaatacccggcatttgatgggttatcccgccctaccatcgcaacctttcatcaatatgcaaggcaagcgggtcgtagtgcttggtggcggtgatactgcaatggattgtgtcagaacggctattcgtcaaaaagcggcttcggttacttgtgcttatcgtcgtgacgaaaccaacatgccaggctcccagcgtgaagtcaaaaattccaaggaagaaggtgtagaatttctgtttaatctgcaaccagtcaggattgaaatcaaccattcaggtcaagtttgtggcataaacatggtacggactcaattaggccaacctgatgagaatggacgccgccaagctgaaattatcgcaggctcggaacacctgcttaaggccgatgcagtgatcatggcattcggctttaaaccacataccatgaactggctaagtgctcatcaagtaaccttggataaacaaggacgcattgtcgcaccagagtactcagacattccctttcaaactagcaatccgcagatatttgctggtggagatgctgttcgtggctcagatctcgttgtaaccgcaattgccgaggggcgcaaagccgcacaaggcattcttgattatctcaacatctag

SEQ ID NO: 9796 - DNA, 4509 bp, Photorhabdus luminescens
atgtctgtgagtttctgtgagagtcggacagaacctcgggaggttcacactatgctatataacaaatctcaagaaaaggataactgtggctttggactgatagcccatattgaaggggagccaagccacaaagtagtacgtaccgctatccatgccctagccagaatgcaacatcgtggggcaatcttggcagatggcaaaaccggtgatggctgtggtttattgttgcaaaaacctgaccgcttttttcggatggttgcacaggagcaagagtggcatttagcccgcaattacgccgtcggtatgctatttctcagccaagatcctcagattgcacaaaactgccgggcaatcatcgaacaagagctacaaaatgaaaccctgtcagtcgttggctggcgtgaagtccccatcaaccgtgatattctgggcgaaatagccctttcaagcctccctcatattgaacagatttttgttaatgctccggctggctggcgtgcacgtgatttagaacgccgcttattcgttgctcgccgccgaatagaaaaacgcatcaacgacagcgacttttatgtttgcagtttgtctaacttggtgactatctataaagggctgtgcatggcggcagatttgccccgtttctatcccgatctggctgatttacgtttagaatcggcaatttgcctatttcatcaacgcttctcaaccaataccgtcccacgctggccattggcacaacctttccgctatcttgcccataacggtgaaataaacaccatcaccggtaaccgccagtgggcacgagcaagagcctataaattcaagacaccgcttattcccgatctgcacacggctgccccttttgtcaatgaaacagggtcagattccagctcgctggataatatgctggaactgtttctcaacggcggaatggatttaatccgtgctatgcgattgctggttcctcccgcatggcaaaacaatcctgatatggatgaagatctgcgggctttttttgatttcaactccatgcacatggaaccgtgggatggccctgcgggtatcgttatgtcagatggacgctacgctgcctgtaatctggatcgtaatggcttgcgcccagcccgctatgttatcaccaaagataagttgatcacctgtgcttccgaagtcggtatctgggattatcaaccggatgaagtggtggaaaaagggcgcgttggtcccggtgaacttatcgtgattgatacccgccaaggccgcatccttcatgcagaagaaacagacaatgacttaaaaagccgccatccctataaagaatggatggataaaaacgtcaagcgtctgaccccattcgaagaattactggaagatcaagctggtcatcgggatctgaacgatcaatccttagcggtctatcacaaacaatttgcctacagcaacgaagagctagatcaaatcatccgagtcttgggagagaatggtcaggaagcgaccgggtcaatgggggatgatacaccgtttgccgtcctttccagccgcccacggattatttatgactatttccgccagcaatttgctcaagtcactaatccgccaatcgatccactacgcgaagcacatgttatgtctctcactacctgcattgggcgggagatgaacgtattttgtgaagcagagggacaggcacaccgattaagttttaaatctcctattctgctctactctgactttcaccaattaatcacacagcaaagtccacactatcgcgcagaacaattagacttaactttcaatccacaagaaaccaatttgcaaaatgccctgtttgcattgtgtgaccaagctgaacaactcgccagagatggcgcggtattgttggtattatctgaccgcaacattacgccgaacaaattacctatacctgcacctatggctattggcgctattcaacaccgtttggtagaaaaaaacctacgctgtgataccaacctgatagtagaaacagcaagtgcccgtgatccacaccatttcactgtactactgggatttggtgcaacagcgatctatccctatctggcttatgaatccctcgccaaaatggtcgataatggcacaattaataaaccttatgctgatgtcatgcttaactaccgcaatggtatcaataaagggttatataaaatcatgtcgaaaatgggcatctcgactatcgcctcctatcgctgctctaaactatttgaagctgtcggcttacattcagaattaactgaattctgcttcaatggcgtcgtcagccgaattggcggtgctaatttcagcgatttcgagcaggatctgcgaaacttatctaaacgtgcctggcttgctcgtcaaccactcgatcagggcggactgctgaaatatgttcataacggcgaatatcacgcttataacccggatgttgtcagcactttacaggctgcggttcatagtggcgaatataacgattacttgaaatattctcgtttggttaatcagcgtccaattaccacaatccgtgatttgctggcgataaaaacagaagctgagcctctacctattgaagaagtggaacctgccgaagagctatttaaacgctttgatactgctgcgatgtcgattggagcattaagcccggaagcacacgaagctctggctgaagccatgaatacgttaggtggtttttccaactccggcgaaggtggagaagatcccgcacgttatggaacaaaaaaggtttcccgtatcaaacaagttgcttccggtcggtttggtgtgacacctgcttatctggtcaacgctgatgtgattcaaattaaagtcgcgcaaggcgctaaacccggagaaggtgggcaattaccgggtgataaagtaacaccgtatattgcaaaactgcgttattccgtacccggcgtaacacttatttctccaccaccacatcacgatatttactctattgaagatttggctcagttgattttcgatctaaaacagatcaaccccaatgcgctgatctcagtaaaactggtttcagaacccggtgttggtactgttgccactggcgttgccaaagcttatgccgatttaattactatcgcaggttatgatggcggtaccggtgccagtccattgtcatcggtgaaatatgccggatgcccatgggaattggggctggtggaaacccaacaagcgctagttgctaacggattacgtcataagatccgcttacaagttgatggcgggttgaaaacaggcgtagatattattaaagcggccattcttggcgctgaaagtttcggtttcggtactggaccaatggttgcccttggatgcaaatatctgcgtatttgccatctcaataattgtgcaactggggttgccactcaggatgagaaattacgtcgcgaccactaccacggattacctgaacgggtcatgaattatttccgctttatcgcccgtgaaaccagagagatcatggctacattgggtgtcaaaaatctaactgatttaatcggccgaactgacctgttggaagtactggaaggtatttcagcaaaacagagcaaactaaatcttgatccgctcttagcaaccgcagaaccccatcagggcaaaacattatattgcaccgaaaacaatccaccatttgataatggagcactgaataaaaacttactgactcaagccgctagctatattgagaaccaacaaagtaaaactttctattttgatatccgtaatacggatcgttcagtgggcgcttccctttccggttttatcgctgctcgatatggtaatcaggggatcgcagcggcaccaataaaaattcatttcaatggtactgccggtcaaagttttggcgtctggaatgccggcggtctggagctgacactcatcggtgatgccaatgattatgtcggtaagggtatggctggcggtcgcattgtcatacacccgccagtgggttctgccttcaaaagccatcaggcaaccctcattggcaacacatgcctctacggtgcaaccggaggcaaactgtttgctgccgggcgagcaggagaacgcttcgccgttcgtaattcaggggcgattacggttgtagaaggtatcggagataatggctgtgaatatatgacaggaggtattgtctgtattctcggacgcactggcatcaattttggtgcaggaatgaccggcggctttgcttatgtcttggatgaaaatgatgatttccgtaaacgggttaacctagagttggttgaagtactggcagtagatgccttagctatccacgaagagcacttgagagggcttatcaccgagcacgtcctcctgaccggttcccaacgcggtgaagatattcttgctaactggcaacagtggctgagcaagttcgcgcttgtgaagccaaaatccagtgatgtgaaagccctattgggacatcgcagtcgttcttccgcagagttgcgaattcaagcgcaataa

SEQ ID NO: 9797 - DNA, 2346 bp, Photorhabdus luminescens
atgaagctgctcaggggcctggcccaatattatgttgatttaatgatgaaattggggttagtgcgcttctcattactgcttgcatctgcactggtcgttcttgctatgggtgtacagatggtggtcacttttctgcttcagggaggagtgcaaagtattgatttagttcgctcaatcttttttggtttgttgattacaccttgggctgtctattttctttcagttgttgttgaacagcttgaagagtcccgtcagcgattatctaagttagttgaaaagttggaagttatgcgtcagcgtgatcgggaacttaatcagcaattaaaagacaacattattaagcttaatcaggagatctcggaaagagagaaagctgagcaggcgcatctgatattgttggataaactcaaagaagagatgaaacaccgtgagcagacgcagattgaattggaacaacaatctgtattgttgaaatcttttctcgatgcttctcctgatttggtctattaccgtaatgaaaataatgagttttctggttgtaatcgggcgatggaattgctgacgggtaaaagccagaaacaacttgtcgggctgacaccaaacgatgtttatgacaaagaggttgctcgcaaggtaatgaaaaccgatgaaaaagtgttccgtcataatgttgcactcacttatgaacaatggctagtttatcccgatggtcggaaagcctgttttgagcttcggaaagtccctttttatgatcgggtaggaaaaagacatgggcttatgggatttgggcgcgatataacggaacgtaagcgttatcaggacgctttggagaatgcaagtagggataagaccacttttatctcaacgattagccatgagctccgtacgcctttaaatggcattgttggtttgagccgtattctgctcgatactgagttgacgtctgagcaaaataactatctgaaaacgattcatgtcagtgccatcacgcttggtaatattttcaatgacattattgaaatggataaaattgaacggcgtaaagtgcaaattgataatcagccaattgattttactggttttatgtccgatctggaaaacctctctgggctgctggtgcaaccgaaagatattaaatttgtcatgaacccagaactgccactgcctgccagaatcatgacagatggtactcgcttgcgccaaattctatggaacttgattggcaatgcggtgaaatttacgcaaaaaggtgagattactgttcgaatctggtacgaagagggagagcgtttgctgtttgaagtcacagatacggggattggtatcccacatgatgagctggagaagatttttgcgatgtattatcaagtgaaaggcagtcatggtggttgtccagcaacgggaaccggtattggattggcggtatccaaacgtttggctcaaagtatgggaggggatattgtggtggaaagtgaaccgggacaaggttctcggtttacactgtctatcattgcccctgctatggaggagaatcttttatgcaaagaagatacagaagattatccacttccagcattgcatatcttattggtagaagatattgagctgaatgtgattgttgctcgctcggtattggagaagttgggtaacagtgtagaagtcgctatgaacggtaaagatgcgctagaagtgtttaagccaggagagttcgatctggtactgcttgatattcagctacccgatatgaccgggttagatatctcccgggagttaagtcagcgatatgccaaaaaggatctgccccccctgattgcactgacagcaaatgtcttaaaagacaaaaaagagtatttggatgcaggtatgaatggtgtgttgagtaagccgctttctgtgaatgcgttaactgccattattgaacaatattggggggaacagtctgtgcatcatatgcagccggaagaagaggagtcaggattgatgaaaaaagatgaagatttacttgatacagaaatgcttaaccaatacatcgagctcgttgggccccaattgattcgcaatagtctgagtgtgtttgaaaagatgatgccgggttacttatctgttctggactcaaacatgacagcgaaagaccagaaaggcattacggaggaagcgcataagataaaaggtgctgcgggatcggttggattgcgtcatttacagcaactggcccagcagattcaatcacctgatttacctgcatggtgggataatgttcaggaatgggttgatgagttaaagcaagaatggagaaaggatacggaaattttgggggaatggttgacggacgctgaaaaaaaataa

SEQ ID NO: 9798 - DNA, 654 bp, Photorhabdus luminescens
atgaaatcagttgcggttgtcttaagtggatgtggtgtattcgatggtagcgaaattcatgagtcagtattaactctgctttctttagaccgtttaggtgttaaaacgagcttttttgcgcctgacgaaccacaacttcatgttattaatcatattaacggtgaagaaatgggggaagaacgtaacgttctacaggagtctgcccgtatttcaaggggaaaaattaagcctttatcacaagcaaatgccgatgaatttgatgccctgataattcccgggggatttggtgttgcaaagaatttatgtgactttgccgctaagacagttgattgcgaaataaataaggaattgttaagtttggtgagggctatgcataatcaacataaaccaatgggatttatgtgtattgcgcctgttatgttgccaaaattacttaataaaccggtgaaactaacggtcggcaatgatccagaaacggttgctcaagtagaggcaatgggaggcgtccatatcatttgcaaggtaaatgatgttgttgttgatttagaaaacaaaattgtgacgacaccagcctacatgcttgctgaatctatttcccaggcggaagagggaattgataaacttgtcagaaaagtattggaaatgactgagtaa

SEQ ID NO: 9799 - DNA, 726 bp, Photorhabdus luminescens
atgcgaaatccttttcaatttttatggtactggcttaaaaaaatcgcaatctcagttattatcttatggatagtttctgttgttgcattttcatttttgccagtgccgttttccatggttatggttgagcgccagattagtgcttggttatcggttaatttttcttatgtatctcattctgactgggtagggcaaggacaaatatcgccaaatatcgcattggctgttattgctgcggaagatcagaaattcccacaacattggggatttgactttgatgctatcgaaagtgtacttgagcgtaatcaaaatcattcaggcagacttagaggggcttcaacgatttctcagcaaacggccaaaaatttatttttgtgggacggacgtagttggttaagaaaagggttggaagccgggatgacctttgctattgaactgggatggtcaaaaagtagaattctgactgtttaccttaacatagcagaatttggtgatggcatttttggtgttgaagaggcatctaaacactattttcataaatcagccagtaaattgacggcatcagaagcggctttacttgctgctgtattgcctaatccacaccgctataaagttaactcaccttcggcttatgtcttacagcgtcagcaatggattttgcggcaaatgcggttgttgggcggggggagttatcttgagaaaaatgggttaatgaaagatgattga

SEQ ID NO: 9800 - DNA, 576 bp, Photorhabdus luminescens
atgcgatttttctccctattagccacgatttgtgctgctgtaatgttgcaaggatgtattggtgcggtcgtggtcagttctactgccgtagcgacaaaaaccgcaaccgatccccgcactattggtcagcaggttgacgatagtactctcgaagcccgtgtcagtaatgcgcttaacaaagataagcagctcaaagagcaaacccgtattattaccactgcctatcaaggaaaagttttactgacaggccaaagcccagactcaagccttccagagcgtgctaaacagatagcatcacgtgttgatggagcacacaccgtttacaatgaaattcgtcaggggaaacctgttgaattaggtactgcttctaaggatacctgggttacaactaaagtacgctcaaaaatcctggctagtgactcggttaagtcttctaacataaaagtcgttacggaaaacggcgaagtctttctactgggcattctgaccaaacaagagggtaatgccgccgcgaaaattgccagcgaaactaacggtgttaagcgagtaacaaccgcatttacttatttgaattaa

SEQ ID NO: 9801 - DNA, 591 bp, Photorhabdus luminescens
gtgctggatagaattaaagtctgttttacagaaagtattcaaactcagattgcagccgcagaagcattacctgatgctatctcgcgagcggcaataatgatggttcagtcattactgaatggtaacaaaatcctttgctgtggtaatggaggctcagcagcgactgcccaacggtttgctgccaatatgattaaccggtttgaaactgagcgcccaagcctgcccgcattgtcacttaacgcagacaatgtggtcatcactgcgatttcaagcaataaacagcatgatgaaatttatgctaaacaggtacgggcattaggtcagccaggcgatgtgttattagcgatttccacacatggtaatagccgtgatattgtcaaagccgttgaagccgccgtaacccgcgatatgacaattgtcgcccttactggctatgatggtggtgagcttgccggcttactcgggccacaagacgtagagattcgtattccatctcatcgcagtaccagaattcaagaagttcatatgctaacagttaactgcttatgtgacttaatcgataatacactttttccccatcaggatgactaa

SEQ ID NO: 9802 - DNA, 381 bp, Photorhabdus luminescens
atgaaaataaaaaagctgacaagttatttgctggggcgcaactatgaagcgcaggcaaagttgtttttacaaaaacaaggattatcttttatcgccgcaaatgtgaaagttcacggtggtgaaattgacctgattatgaaagacaagcaaacttgggtctttattgaagtccgttttcgcaaatcaggacaatatggagatgcattggcgacaatcactcgtagcaagcgtaaaaaattattacacgctgccgcagtttggctgtttcaacgaggtgaatgttttgaaacctcttcttgtcgctttgatatttgtgctattactggtcaacaatttgaatggttgcaaaatgccttcaatcaaaatgagttcactcgttaa

SEQ ID NO: 9803 - DNA, 1794 bp, Photorhabdus luminescens
atggccgatttaaaattgagcatctttgaaaaaaacatcgctggatacagtatgctttcctcaatttttgtgcgtatcaaaactggtttagtctgttcagctatgctggcagtcatgatcatcgcaggatgtaccgtacctgaccaacagggacaacaaccttcgcaaactcaggacaaaatcagtacagaaatcgcccgttatcaatctatcattgatgccgctcatggcgaaccttctcttgatgtcatccgtgcttatatcgctcaggaaccactcgtgaaagagagtgcggttcgtcaaaaaaatatcgatgatacctggcaaatgctgacccgtctttcaccacaagagcgccgtgggttggtcatcaacgctgatgaaaatgttctgcaaggctggctggacttactcagtgcctatcaggataacaaacaggactccgacaaactacaggcagctatccgtgactggaaaattcgctatccacaaaaccctgctgtacagtcactcccaactcagttacagccagcagccatccaacagcaagatacgaatatccgtattgctctgttcctgccattaagcggccaagcaaaagtattcggtgaagccattcgccaaggttttcttgatgctcaggccggtttaccaagtccatcattgccaacagaaaacccggaaaatttatctataacagacagtgatagtgcgtcagatagcgtggcttctaccaatatgtcccctagtgaaggggcgatcataaactcagcaataccagccactcaaacaacacctgtcatagccaatgcgccgattaacacacaacaggtcaaaatctatgacacaacaagccagccattggaaaacttatttattcaggctaagcaggatggtgtgaatttaattgtcgggccgttacttaagccagatgtggttaaactcgttcagataaatgcggcattaaacatgctagtacttaacgagttagacaatgctcaaccacactctaatatctgctatttttctttgtcaccagaagatgaagcgaaaaatgctgcggaacatatttggcagcaacaaaaacagaatcctctgattttggtccccagagggacttttggtgatcgcattgccaacgcctttgcacaggaatggcaaaaacaagggggacatactgttctgcaacaaacttttggctcttctgccgaactgaaacaattaattaatagaggtaccggtattcgcttgaccggaacagccgtcaatgtcaccagcaatcaacctacatcaatcgctattggtgatctggaaatcccccagataaacaccgatgtcgttcctacttctactggcggctcagtggatgcagtttatattgtttctaccctggatgaactgacgctaattaagacaatgattgatatggcaatcagttcccgcgataagcccgccctttacgcaagttcccgcagtaatcaggcgggcgtcggtcccgatttccgcctggagatggaaggaatgcaattcagtgacattcccttaatcgccggtgctaacttgccactgatgcagcaagcagtcagtaaatttgcgaatgattactctttgatgcgcctttacgctatgggtattgacgcctggtcattagcaaatcaattcagtcaagttcagcttcaaagtgatttccatctcaatggtgcttctggagtgctgtccgttcaggaaaactgcaccattttccgacaactctcatggatgcaatatcatcaaggccaaatcactgcgatttaa

SEQ ID NO: 9804 - DNA, 867 bp, Photorhabdus luminescens
atgaatcaacctaatcgagcagtggttacgacatccacgctatatgttgtgccaacccccattggaaacttgggtgatatcactcagcgtgcgcttgaagttcttgagcatgtcgatctgattgcagccgaagatacgcgacatactggcttgttgcttcaacattttgccattaatgcacgcatgttcgcacttcatgatcataatgaacagcagaaagcagatcaattaattacaaaactccaacaagggcaaagtattgcattagtctctgatgcaggaacgccgctgattaatgatcctggttaccatgtggttcgccgttgccgtgaagccggtattcatgttgtcccacttccaggaccttgtgcggcgataaccgccttgtctgctgctggtctgccatcagatcgtttctgttacgaaggatttctgcccgcaaagcgtaaaagtcggacagatactttacgggctttgcaacaggagccacgcacattaattttttatgaatccacccatcgtctgatcgaaagtttagaagatatggttgaggtgttgggagctgaacgttacgtcgttttggcgcgggaattgacaaagacttgggaatccattcaggggatgccagtaggtgaacttttggcgtgggtgaaggaagatgaaacccgtcgccgtggtgaaatggtattgatcgttgaaggctataaaaaactggatgacgatgttttgcctccagaggcattaagaacgctggcgcttcttcaacaagaactgcccttgaaaaaagcggctgcactggcagcagagattcatggtgtgaagaaaaatgcactttatcgtcatggattgggacagaatgaagaatga

SEQ ID NO: 9805 - DNA, 144 bp, Photorhabdus luminescens
ctggctcaagcagcctacccgggttcgatacgggccgtacctaatgaacccctatttggccttgctccgagtggagtttaccgtgccacgaactgttaccagccgtgcggtgcgctcttaccgcaccctttcacccttacctga

SEQ ID NO: 9806 - DNA, 702 bp, Photorhabdus luminescens
atgattataaatagaacagcaaaacaatgtgggaaagctgactatggttggctacaagctcgttatacattttcatttggtcactattttgacccaaagtttttaggttatggcgcgctacgtgtactcaatcaagaagtcattgcccccaaagccgctttccaacctaaatcctatccacatgtggatatattgaatattattctacaaggtgaagcagaataccgtgacagcgaaggcaactatatcagagcccgtaaaggagaatgtttactattttctacccgtcaaggcatcagctacagtgaacataatgccagtattaataagccactaacgcgcttgcagctttggctgaatgcctttcctcagcaggaaagcttaccattgcaacgaatggaattaccagaacaaccactggctatgctagcttctccaaccgcagaagatggcagtatgcaattacgtcaacaagtgtgggtaaatcatatttcccttaataaaaatcaatctcatcatctgcaattgaaaggaaaaaatgcctatctgcaatctctaaacggaaatataaaaataagaggcaattctaaggataacaatttaattaaatgcggagatggcgcttttattcatgaagaaagtcgtctggttttaaaagcagatacggaattccaaggactgttaattgatctggctgcttaa

SEQ ID NO: 9807 - DNA, 897 bp, Photorhabdus luminescens
atgagcaaagaacgagcgcttacactggaatctctccgggtcatggatgcgattgaccggcggggaagttttgctgcggccgctgatgagcttggtcgtgttccttctgcacttagctatacgatgcaaaaattagaagaggagctggatgtagtgctgtttgaccgttcgggtcacagaactaaattcaccaatgttggtcgtatgctgcttgagcgtggacgtcaattgcttgaagctgctgataaattaacggctgatgcagaagcattagcgcgaggttgggaaactcacctgacaattgtttgtgaggcgttggttcctgcttcttcattatttccattagtgggaaagcttgctcaaaaatcgaatactcagctctctttattgacagaagttttggcgggggcatgggagaggctggaaacgggtcgggcggatattgttattgcaccagatatgcattttcgcgcatcggcagaaattaattcacgtcagctttacagcattaccaatgtctatgttgctagccctgatcatcctatacatcaagagccggagcctttatctgatgtcacgagagtgaagtatcgtggtattgctgtggcagatacagcgagggaacgtccggtattaacggttcagttgttagataagcaacagcgtttaacagtaagttctctggaagataaacgccgtgctctcttggctgggttgggcgttgctaccatgccttatcctatggtggaacaagatattactgaggggcgtttgcgggtgattagctctgaatatagccatgagacaaatgtcattatggcatggcggcgagacagtatgggggaagctaaatcttggtgtttgcgggaaatccctaaattgtttgttagtcggtaa

SEQ ID NO: 9808 - DNA, 396 bp, Photorhabdus luminescens
atgaaaaaatttgaagatagtgccctgttactggctcgcattttgatgccgattctatttatcgttgcaggctatggaaaattaggtgattcctacgcgggtacccagcaatatatgaatgctatgggcgtccctagttttctattaccactgacgatcttacttgaattaggtggtggtctggcagttctgtttggtttgttaacccgtaccaccgcgttatttacctttggcttctgtgtcctgactgccatcctcttccacagcaattttgctgaaggcatgaaccaaactatgtttctcaagaacctgactattggtggcggttatctgttactggctatcatcggcccaggtaaattcagtatcgaccacctgataaaaagaaactggtaa

SEQ ID NO: 9809 - DNA, 261 bp, Photorhabdus luminescens
atgagtaaacaacgccagaaaaaaaagctgaaagaacagcagctaatgagaaatatccaactacaacgcctcgaactcaccaacaatacacagctctggaagaacctcactgaaccttatgacaaaagctggcaaaagcttttgtcattaaaaccctatctgggacctgcaatccatgctatctctttgtatggccttcgccatcctgtgaaattttatcatttgtctcgtcatatcattcgactattgaaatggaaatag

SEQ ID NO: 9810 - DNA, 402 bp, Photorhabdus luminescens
atgatcaactcatccaaatctcaaggccccggtaaaggggtccttgacattctccaacgtattgcctctgttgttatcgagataatagaaactcgtttacaactcatcgttgtagagttggaaaaagaaaaagccactttgatacagctggtagtcatagccagcctgacattactgctcaccgctttcggcctcatgtgtttacttgttatgattttttgggctatcgatcccagctggcgttttaccgtattagcaagtactactggcacactactcgttctggcgcttattggccttatatggaccatcaggaaagcgcgaaattcaacattacttagtgcaactcgcgagcaattaaagatagacagagaaatgttggaggatcatagtaatgagtaa

SEQ ID NO: 9811 - DNA, 306 bp, Photorhabdus luminescens
atgtcaaagatcaaaactaatgaagatctacacgttgaactaaaatcactcgcagatacactggaagaagtgatcaaaagctctggtgataaatccaaagtcgagctggaagaacttcgcggcaaagtagaggaagtcatcaaagatactcgttctaaactcagcaatgccagtgatatggttgttaagaaaacaaaagatatggcgggccgtgctgatgtctacgttcacgataaaccttgggtaagcatcggtattggtactgttgtcggtgccgtattaggtgtagtgttagctaaacgctaa

SEQ ID NO: 9812 - DNA, 672 bp, Photorhabdus luminescens
atggaaatagtaaaagaacttatatatgcactttggtaccaggattatgaaactctggccaacccatccctattatgggccatttacatcatgctattcttgattctcttccttgaaaatggcctccttcctgctgcatttttaccaggagacagcctgcttatactagttggcgtattgattgccaaaggtgcaatgagtttccctctaacgattgtagtattaactgccggagcaagcttaggttgttggattggttatcttcaaggaaaatggttaggaaataccaagacagtacaaggctggctctctcaccttccagcttattatcaccaaagagcttacaatctttttcaccgccacggcctatcagctttacttcttggccgcttcctcgcatttgtcagaaccctcttaccaacacttgcaggactgacaggtctacaaaacagtcgtttccagttttttaactggctcagtggcttcctgtgggtcattatccttacctctttgggttatgcatttggtaagacccccattttccgtcaatatgaagacttggtaatgaatttcctgatattactgccacttgctttacttattattggttttagcggcagtttgctcgttgtatggcgtaaaaaaacttgccaatcccctcaaaaaaagtaa

SEQ ID NO: 9813 - DNA, 963 bp, Photorhabdus luminescens
atgaactctgtgggtagtcctctcttatggggaagttttgctgttttaattacgattatgttgctgctggatctatccttacaggggcgtaagaaagagcaagcaatgtcatttcgtcaagctgctgtctggagtgtaatttgggtaagtttgtcgctcttatttgcattaggattatggtggtattgcagagaaactgtaggggtagcggttgctaatagtcaggtaatggcttttcttaccgggtatttacttgagaaagcgcttgctgttgataatgtgtttgtatggctgatgttattcagctattttgccattccggcaaatttacaacgtcgggtgcttatttacggtgtcttaggcgcaattgtgctgcgtaccgtgatgatctttgcagggagctggctggtttctcaatttagttggatactttatctgtttggcctctttttgctggttaccggcgttaagatggcgttggttaaagaggatgattctccgataggcgataaaccttttgttcgttggctaaaagcgcatattcgcatcactgataatcttcacggagaacgtttctttgtgaaagaaaagggtttgttatatgcgacgccactcatcttggtcctgattctggttgaaattagtgacgttatttttgcggtagacagtattcctgctatttttgcagtcactacagatccttttattgttttgacttctaatcttttcgctatcttaggattacgtgcgatgtattttctgctggctggggtggcagagaaatttacaatgcttaaatatggtttatcagtcattctggcatttatcggtattaaaatgctgataatagatttttatcatattcctatagggggttctctgggagctgtagccagtattttggcagtaacaatgattattaatgtttgggtaaataaatacaaagcgacagagaaccagtaa

SEQ ID NO: 9814 - DNA, 1248 bp, Photorhabdus luminescens
atggaaaaacaaaaacgtggcttcgtgcattacattgtacaaggaagcctggttaaacaaattttggtaggtttaattgcagggatactgttagcgtggttggcaccttcggttgccaaatcagtcagtttacttgggacgttgttcgttggcgccctgaaagcagtagccccggtattggtatggattttggtcatgtcttctattgctaaccataaaaaaggccaaaaaaccaatattcgtccaatccttatcctctatatcttgggtactttttttgctgcgttggttgctgtggccggtagctttatattcccattaccgctggtgctagctgtcaatgatgctcagatgtcgcctcctgaaaatattatagaggtgattaaagggttactggttaatgttgtcgctaatccagtgaatgcattactgaacggtaactatatcggtatccttgcctgggctattggtttgggtatcgccctgcgtcatgcggcggattcaactaagtctctaattcatgacatgtctgaagcggttactcaggttgttcgggtggtcattcgttttgcaccggttggtattttcggtctggtgtctgcaacaattgcagaaacggggtttaatgccttactgggatatgtccaactgctggttgtattactgagttgtatgttggttatggcacttgttgtaaatccgttgattgtttactggaaaattcgtcgtaatccttatccactggtatttgcttgcctgcgtgaaagtggcgtaacggcatttttcacccgcagttcggctgcaaatattccagtgaatatggcgatgtgccgtcgtatgaatctgcatgaagatacttattcagtttctattccattaggcgcaacgatcaatatggaaggcgctgcggtgactatcccggtgttgactctggctgcggtcaatacgcttgggatacctgttgatgtgcctacagcattattgttaagcgtggtttctgccatttgtgcctgtggtgcttctggtgtggctgggggatcgctattgttgatccctctggcctgtagcatgtttgggatttccaatgagattgcgatgcaagttgtagcagtcggtttgattattggtgtattacaggattctgcggaaacgagtctgaactcttctaccgatgtattgtttactgctgctgtttgtcaggctgaggatgaccgtctgtcatcggatcagttaactcaacgtaattaa

SEQ ID NO: 9815 - DNA, 2022 bp, Photorhabdus luminescens
atgagccattatcctcacctgttcgcccctctagacctggggttcaccacactaaaaaaccgcattttgatgggatcaatgcacactggactagaggaacatcccgatcgcgcccagaggcttgcccgcttttatgctgaacgggcagccggaggcgtggcattgattgtcacaggcggcatttcgccaaataaacaaggtgttatagggaaaggcactgcattcctagtagatgaaaaagatcttattcaccataaagttattacagacgcagttcatcaggctggtggaaaaattgcaatgcaaatcctacataccggccgttatagctatcaaccacaccttgtcgcccctaccgctattcaggcaccaattaatccattcatgcctcgtgaaatgacagaagaagatattcagcaaaccattgctgatttcgctcattgtgctcaactggcacaactagcaggttatgatggcgtagaaatcatgggttctgagggttatctgattaaccagtttctgactacccgtaccaatcaccgccaagataaatggggtggaagtttcgaaaatcgaatgcgttttgctgtggaagttgttaaagcagtccatcaagcaacagggcgagaatttattctaatctaccggctttcgatgctggatttagtcgaagagggttctaattggcaggaaatcgagcaactcgcagttgctattgagcaagcgggggcatctatcatcaataccggtatcggctggcatgaagctcgaatcccaacgattgctactatggttccccgcgccggattcagttgggtaacgcaaaagctgatggggaaagtttctattccattgatcacaacaaacagaattaatgaccccaacattgcagaacaagtgctggctcaaggttgtgccgatatggtttctatggcacgaccttttctggctgatgctgaattcgttatgaaagcccagcaaggacgggccgatgagattaacacttgtattggctgtaatcaggcatgtttggatcagatttttgtcggtgaaatagcctcctgtttagttaatccccgcgcctgccacgaaacagagatgactgccgagccaaccaccacaccgaaaaaactggcggttgtcggtgccgggcctgccggattgtcatttgcagtgaccgccgccagtcgtggtcatcatgtcactctgtttgaacgtgacggacagattggcggacaatttaatattgccaaacagatcccaggtaaagaagaattccatgaaacactgcgttattttcagcgccagttaacaatccatcatgttgatgtacggttgaaccaaaccgcaacaccagaagcactttctgattttgatgaggtgattatcgccagcggcattgtgcctcgccaactcaccattgatggtattcatcatgaaaaggtactgagctacttagatgtattaagagataagaaaaatgtcggtcaacgtgtcgctatcattggcgcaggtggtatcggtttcgataccgcagaatatctgagtcaaccaggaaaaagtactagccttgatagcaccactttcagcgaaaaatggggcattgaccataatctgacacatcgtggtggtttatctcctgaaggccctaaaccaaaaccttctccccgaaaaatttatctattacaacgtaaaccgacaaaagttggtgaaggattaggtaaaacaacaggttgggtacaccgaaccaatctacacctgcgtggtgtgaaaatgctcaacaatatgcaatatttgaaaatagatgatcagggattacatattagcagcaatggggaacaacgctgtcttgccgtagataatattgttatttgtgccggacaagagccactgagagaactatatcaaccgctacagcaagcgggaaaaaccgtgcatcttattggtggagcagatgttgcaacggaattggatgcccgacgggctatcgatcaaggtactcggttaggtcttaaaatttga

SEQ ID NO: 9816 - DNA, 600 bp, Photorhabdus luminescens
atgaaaaaacagatgactgaatgggtaactttggcaggaaaaggggtgactttagaacctctgacacaccaacggcatgatgagtttttacaggcaattgaagaaagtgagctgcataaattgtggtacaccagtgtcccttcgccggctgagctaggtaacgagattgaacgccgtttattgctacatgaaaaaggtactatgctgccttttgctattgttgatcatcgaacaagtaaagcggttggcatgaccacgtatatgaatattgattctgatgtccgccggttggaaatcggttatacctggtatgctcgttctgttcagcggacacatattaatacggaagtaaaatatctcttattgaaatacgcttttgaagaattaggatgcatcgcagtggagtttcgcactcatttttttaatcatcagagccggaaagcgatagagcgactgggtgcaaaacttgatggaattctgcgtagtcatggtgtatctaaagatggcagtatcagggatacttgtgtttacagcattatcagtggtgaatggccggcggttaaaatacatcttgaatggcagatggttaaaccgagataa

SEQ ID NO: 9817 - DNA, 936 bp, Photorhabdus luminescens
atgaaatatatgtatcaacctgccagttcaggaattcggctgttcacagatttagtcggaaaaaaaattagccctagccctcattggtattctgcccagaatcgcactaaatttgccttacgtagcgctctgatgccaatatcgacactaaaactattaaaccagatagttaatacgccgttctatttggatattttgaagaaacagccttgtttaccttctaaattacatcgcccttatctaagtattaacttcaatagagggcagacgttacgtgcaataaatgaacattaccagctattatttactgggttaaatcagtctattgttaataaaatatttcgctccaatgcatatccattagcggttatcaatggtaagagtggaacttacactatttttctagattctatggattgttttaataaagaaggtgagctcactctatttattacaacaggagatagtaaaactttggcaagatgcgctttcacactactcactattgccggtaaaaaaacactgttcatcggtggactacaaggttccaaaggcgatgcaacccttgaaattatccgcgatgcaacgaaagattgttatggattatttccaaaacgcttactgattgaatccatttgccgtctcgctgcccactttgaatgccagcaaattctggcagccagcaatgatactcacatctataagagtctacgctattggcataaaaagaaagacaaattagtcgctgattacgactctttctgggaatcattaggtggagcaaagggcaaaaataaggatttccatctccccttatccattgaaagaaaaccgcttgaagatatagccagtaagaagcgggcagaatatcgccgccgctatcaattactagatgaactggataatggaatgcagcattctctgccttcaaattaa

SEQ ID NO: 9818 - DNA, 534 bp, Photorhabdus luminescens
atggatgagatacttgttcttgttgataaacatgataatcccattggttcagcgggaaaagctgatattcatcagaaaggtatgttacatcgggccttttctatctttgtttttgataataaaggaaatttactcttacagaagcgagcggcaaccaaatatcattcagccgggctttggaccaatagctgttgtggtcaccctagggttggtgaagctctggaggccgctgcacatcggcgtcttggcgaagagatgggttttgactgtccattgaaaaaggtttcgtcatttatttatcacgcgatacttcctaataatttgattgaatacgagtatgatcatgtttttattggacgctttgataaagaaccgataattaaccttgacgaagtatccgattataaatgggttaatcttctgaaattgagggcgctaattaataatgctcctgatgtgtatacggtttggttcaaaaaaatcattaatggtctttcgtatcaagatattgaggagtggcaaaggctgatttga

SEQ ID NO: 9819 - DNA, 945 bp, Photorhabdus luminescens
atgagtagctttgataatgtgttttgcactgatgttgagtctgtctcgccctatcacatcattcagggggaaaccaccaacgattacgaaagtaaagtggtacaaacttattgcggagatccagaatgctggcgtaaggtgattggcgatacactgttattccagtttggtgtttacgatgatcctgcttcaaagctaccaatttcattggatgactcaggtattcgttattttgatcgtcagctgctattggctggtttggaaacaaagatcgaaaggccaccaattcagcgtattttggatatcggttgtggttggggttatatcctgaaatatctggctgagcgttttcctgaatgtaagcgtttggatggagtaaatatcagcgagcagcagttgcggtattgtgctgaatttcacgcacaatatggactttctgagcgtatcaatctgtatctgtgcaatgcacaggatattgatcgcttacctgatccgcaggaaccttatgatctggtgattatccgtggtgtcatttcacattttccggactcgttgtatgaaaaggctatgagtgcattgttcaaacgggtgagcgctggtggtcaggtgattatttctgaaaatctctataatatggagttggataattataaatcggatattcctgacaccgttgatcgtctcgcttgtgctaaccgcaaaacacccagctatttcagacaagtgttggagaaaagtggcttcgttattaaggatatgagggtattgccgtctaatattgatgtggtgcattggttgttggatgttaaggccaacatcgaacgaaactttcctgaaggtgttagtggtcctttggaagaattgcgtgtactggctgaaaacttttcggttgctcaggtgaaaaactatgtgtcgacttatagtgttattgcacagagactttag

SEQ ID NO: 9820 - DNA, 930 bp, Photorhabdus luminescens
atgcagcgtcagattgatgccgcctaccccgaattatcggcagggctgcatttacccaaatttgcccgcattgaggcacaccctgaaaatacggtcagcggcgatatctccgacccattccggccacgctatgcggttgatgtgcaattattggctgatgatggtcaggataccgctgttcctgtttatcacgcggttccgctgcttttgccgatggcgggcagtgaatcgggtatgttccaatatccgccagtcggaacggtggttgaaatcgcttttgaggcaggcaggctggacaagccctttatccggcagacattaagccagggtaataccttgcccgatatcaagccaggcgaacaattgcagcagcagcgggcggaagtctcgcagagagtgactcaggaagggcattggattcgtcagactgaccaaactattgatgaatcgtccatgcaccgtgaagtcagggcagacacggaaacacgtaacgtagttgcccgggaaaccacgatacaggccacggataaaaccacggtcttgggcacgtctacgctactggcgggcgctgtccggcaaattgcagacggtgactatagtatggtgacctcatcaaatttcgttgtcagtgtggggaaagaggccaatgttgaagttgggcaaaagctgatagagaaaattggcctgcttaagcagagcatcgccggcgccaggcaagaaatcgtcgcgctcgtggtttgggtgggcagccagcaaatcaatgtcatgaccttgatgttagagacgttggatgtggttaaggcactggcggaacagattgccgcccatacgcaccacaacacaggtatgctggagaatgccagcgcgataaggaacacggcctataaatccgatggattgaaacagaagtattcccctgtgattgggtga

SEQ ID NO: 9821 - DNA, 177 bp, Photorhabdus luminescens
ctgcctgtccagctgacttccatcaagtcagttaaggaatatcgcgctctgaccgaggcactgaagcagcaccacctgttcttcagccaggacttacgaaaacttgcgtcagagatacacaggccagaacgctaccccaaactaacagccgttgattataggtttattttcagatga

SEQ ID NO: 9822 - DNA, 90 bp, Photorhabdus luminescens
ttgaacaccggttcaagtccagtcgggattaccaaatttaagccgttagatcaatatattgggccacttaaacaagaatggcttgcttga

SEQ ID NO: 9823 - DNA, 102 bp, Photorhabdus luminescens
atggcgaaaacggcactacaccgcacccgcctgcacgctttggatcagaaaattttttcaggaaatttcagtttttggatcaaaagaggatcacgaagataa

SEQ ID NO: 9824 - DNA, 297 bp, Photorhabdus luminescens
atggacaaaagactttttaacgatttggttgaaagcatgaatcagatggtagcaattgaaaaaggcgaactttctgtttttgatgaaaatatccattaccatcgcctgcctgatgtaaaaaacttacgtgaaacctttggcttaaaacaaagtgaatttgccgaagctgttggcgtttctacatctctaattcaaagctgggaacagcaccgccgcattccttctggttcatcactgaaactacttaagatgcttgaacgtaatcctgcgcttattaatgaattaagcacactttaa

SEQ ID NO: 9825 - DNA, 324 bp, Photorhabdus luminescens
atggaatatctggtttttattgaaactcccgtatttagtagagaacgagcagaactgttaaccgatgatgaatttaggctattacaggagcacttactaaagaatcacgagcagggtagtaccatcagcgctactggaggatgtaaaaagattcgttggcagcgagaaaggataggaaaacgtggcggagtaagaattatctactatgccataaccaaaactgggaggctctatctccttttgatttaccctaaaaataaaaaagatgacttaactccaaaagaaaaagaggtacttaaagccatcagtaacaaattacagtaa

SEQ ID NO: 9826 - DNA, 573 bp, Photorhabdus luminescens
atggctagcctatccgtaactccattcatttttgaaaatcagcaagtacgtacattgattaaaaatggcaatttttggtttgtggcacaagatgtatgtgatgctttgaaaatcacaaacagccgcgaagctatcgcaaaacttggtgatgatgaaaaggatgtagctttaagtgacactcttggtggagagcaaaaagtaaacattatcaatgaatcaggaatgtattttctgacaatccgatgtcgtgatgccgtaaagaaaggaactttaccccaccgttttcgtaaatgggttactagtgaagttttacctttgattagaaagaccggtagctatataggcagggagaagagtatttcactaagtcagctcattatttgcccttattgtcagaaaccagccaatgttttaagtacagaaaaattgcatagacacagaattgaagtcttggcaatttgtgattctatttggtgttcagaacaagcttttaaatttgatctatgtttctcacattatcttcaagaagaagcagggataagggtagaaaaagtgatgatgttaagaggttga

SEQ ID NO: 9827 - DNA, 1845 bp, Photorhabdus luminescens
atggagcaaaacccgcagtcacagctaaagctacttgtcacccgtggtaaggagcaaggctatctgacctatgctgaggtcaatgaccatctgccggaagatatcgtcgattccgatcagatcgaagatatcatccagatgatcaatgacatgggcattcaggtaatggaagaagcacctgatgccgatgatctgatgctagcagaaaccgctaacgacacagatgaagacgctgtggaagctgctgcgcaagtactgtctagtgttgaatctgaaatcggtcgcaccaccgacccggtacgtatgtacatgcgtgaaatgggtaccgttgagttattgacccgggaaggtgaaattgacattgctaaacgcattgaagatggcatcaatcaggtacagtgttccgttgctgaataccctgaagcaatcacctacttactggaacaatatgaccgagtggaagcgggtgaggctcgcctgtcagatctcatcactggtttcgttgacccgaacgcagaagaagaacttgcacctactgccacccacgttggttctgaacttccacaggaagagctcgatgatgatgaagacgacgatgatgaagacagcgatgacgatagtgatgatgacaacagcatcgatccagaattagctcgccagaaattccaagaactgcgacaacagtatgacatcacccgtcaggaaattaaggaaaacggtcgcaatcatccaaatactgcggccgaaatcttaaaactttcagaagttttcaaacagttccgtctggtgccaaagcagtttgactatctggtcaacaacatgcgttctatgatggatcgcgttcgccttcaagaacgccaaatcatgaaaatgtgtgttgagcagtgcaaaatgccgaagaagaacttcatcactttgttctccggtaatgaaaccagtgacatttggtttactgctgcaaaagcaatgaacaaaccgtggtctgaaaaactccttgaagtggaagacgaagtacagcgtagcctgcaaaaacttcgtcaaattgaggaagaaaccggtttaaccattgaacaggtgaaagatatcaaccgtcgtatgtccatcggtgaagcaaaagcccgccgagcaaaaaaagagatggttgaagccaacttacgtttggttatttcaattgccaaaaaatataccaaccgtggcctgcaattcttggatctgatccaagaaggcaacattggcctgatgaaagcggttgataaatttgaatatcgtcgtggttacaaattctcaacttacgccacatggtggatccgtcaggcaattacacgctcaattgccgaccaagctcgtaccattcgtatacccgttcatatgattgagacaatcaacaaactcaatcgtatttcccgccaaatgttgcaggaaatggggcgtgaaccaacgccggaagagctggcagaacgtatgttgatgccggaagacaagatccgtaaggtactgaaaattgccaaagaacctatctcaatggaaacgccaattggtgatgatgaagattcacatttaggtgatttcattgaagatacaacgctggaactgccgctggattctgcaacctcagaaagcctgcgctcagcaacccacgatgtcttggctggtctgaccgctcgtgaagcaaaagtactgcgtatgcgtttcggtattgatatgaatactgaccatacattggaagaagtcggtaaacagtttgacgttacccgtgaacgtatccgccagatcgaggcgaaagcactacgtaaactacgtcatccaagccgttctgaggttctgcgtagcttccttgatgaataa

SEQ ID NO: 9828 - DNA, 1746 bp, Photorhabdus luminescens
atggctggacgaattccgcgcgcatttatcaatgatttattagctcgtaccgatatcatcgatctgatcgatgttcgtgtgccacttaaaaaacagggtaaaaatcaccacgcgtgctgtccatttcataacgaaaaaacaccttcgtttactgttaatggcgataaacagttttatcattgctttggttgcggagctcacggcaacgctatcgattttctgatgaattacgatagacttgagtttgtcgaatccatcgaagaattagcggctatgcatggtctggaagtcccttatgaagcaggttccagtcacagtcagatagaacgtcaccaaagacaaaacctttaccaactgatggataagcttaacagcttctatcaaaatgtattaaacactcctgctgcacaacaagcccggcaatatctggctcagcgggggcttagtgaagaaattatccaccgtttctcgattggtttcgcacctgctggttgggacaacaccttgaaacggtttgctcataatgaggaagatcgtcgacagttaaacgacgccggaatgttggtcgcaaatgataatggccgtacctatgaccgcttccgcgaacgaataatgtttccaatccgtgaccgtagagggcgcgtaattgcatttggtggacgtgttctgggagatgcactcccaaaatatctcaattcaccagagactgaaattttccataaaggccgccagctatatggcctctatgaagcacaacaaaatcacagtgacctttcacgattattagtagttgaaggttatatggatgtggtagcactggcgcagtttggtatcgattatgcagttgcctcactaggtacttcgactacatcggaacatattcaattacttttccgcgctactgataacgtcatctgttgttacgatggtgacagagccgggcgtgatgcagcatggcgggcattggaaacagcgctcccttatctgaatgatggtaggcagttacgttttatgtttttgcctgatggcgaagatcctgattcactagtccgtaaggaaggtcggaaagcatttgaacaaagaatggaacaatctcatacattatccgaatttctgttcgaatcattgctaccacaagttgatttgagtaatcctgaagggaaaacaaaactcagttcactttccgtaccattgattaaccagattccaggggaagttctgcgtctctatatgagacaagaacttggcaatatgatgggcatccctgatgcagtgcagttggaacgtctattgccgcagcatctggaaagtgggaataattatcagatgccgcagctaaaaccgacaactatgcgtatacttataggactgttggtacaaaacccacacttagccgctttagttccccccctacagggaattatgcaggccaaaattgcaggcttaccattatttatggagcttgtggaggtttgtcttactcagccagggctgacaactggacaactgctagagcaatatcgtgataataaatttagtaaacaacttgaaaaattagctacatggaacgatatacaagtagaagaaatagcagaaaatacatttcgtgacgcgttggatcatcttgttgattcagcgttagaagaacgtttagacattcttatcgccagagcaagaactgaaggtctgacaccggaagagcgcgaagaagttcgcttaattaatgaatcccgtgccagaaagtaa

SEQ ID NO: 9829 - DNA, 216 bp, Photorhabdus luminescens
atgccggtaattaaagtacgtgaaaacgagccattcgacgtagcattgcgtcgctttaagcgttcctgcgaaaaagcaggtgtattagcagaagttcgccgtcgtgaattctatgaaaaaccaacgactgaacgtaaacgcgctaaagcttctgctgtaaaacgtcacgctaagaagctggctcgtgaaaacgcacgccgcactcgtctgtactaa

SEQ ID NO: 9830 - DNA, 165 bp, Photorhabdus luminescens
ctgtgtggttatcatcaatattacggaactgatttgcagatcaccgtcgtagtgttgttgtttcaatttgctgcggcgctttacaaagccgtgttcattgaagtaaaattccgcaccattttaagatggctggcatcccacgccagcaagaccgatttctattga

SEQ ID NO: 9831 - DNA, 1014 bp, Photorhabdus luminescens
atgcgagttttaggtatagaaacgtcctgcgatgaaaccggaatcgcaatttatgacgacgaagccggtttattggcaaatcaattatacagtcagattaaactgcatgctgattacggtggtgtcgtgcctgaattggcttcacgtgaccatatccgcaaaacagtgcccttaattcaagctgctttgaaagaagcaggattaacctgtaaagatattgatgcggtggcttatacagcaggtcctggtctggttggtgcattgttggtgggggcgacgattggccgttctctggcgtttgcttgggatgttcctgcgattcctgttcatcatatggaagggcatttactcgctccaatgctggaagataacagtcctgagttcccgtttgtagctttgctggtgtctggtggtcatacacagcttattagtgtgacgggtatcggtaaatatgagctacttggtgaatcaatagatgatgccgctggtgaagcgtttgataaaacagctaagttactgggattggattatccaggagggccggtactctccagaatggctcagaaaggagaagttgggcgttttgtatttcctcgcccgatgacagatcgtcctgggttggatttcagtttttcaggattgaaaacttttgcgtctaatactattcataacaacagcgatgatgagcagaccagagcggatattgcccgcgcttttgaagacgcagtggttgatacattagcgattaaatgtaagagagcgcttgagcagaccgggttcaagcgactagtgatggctggtggtgtcagcgccaaccgggcattgcggattaaaatggaagaggtcatggcaaaattgggtggcgaagtattttatgcgcgccctgaattctgtacagataacggtgccatgattgcgcttgccggcatgatccgcctaaaaggagaggtgaatgactcacttggcgtgatagtcaaagcccgctggccattgtcggaattacctccattataa

SEQ ID NO: 9832 - DNA, 657 bp, Photorhabdus luminescens
atgagtgctatcgcgcttggcatgatcatcttcgcgtatctttgcggttcaatttccagcgcaatacttatttgtcgcctggctgggctacctgatcctcgtcaacatggctcaggcaacccaggcgcgacaaatgtattgcgaattggtggccgcagtactgcggcaatagtactaatttgtgatgttctaaaagggatgatccccgtctggttggcttatcaactctatgttccccctttctatttaggaattacagcaatcgctgcttgtctcggccatatttacccgatctttttccaatttaaaggcggtaagggtgtcgcaactgcttttggtgctattgcggcaattggttgggatctgacaggtttgatgatgggtacttggctgctgaccatattattgagcggctattcttctttaggggccattgtcagtgccttgatagcaccattctatgtctggtggtttaaacccgaatttactttccccgtagccatgctctgctgtctggtgttactacgtcaccatgataatatccagcgtctgtggcgcggccaagaaaatcgtctctggaacaagctaaaaaagaaaaaagagatgaccgaaaaagaaaaaaaacgaacagaaaaagagcaaagaaaagaagattaa

SEQ ID NO: 9833 - DNA, 354 bp, Photorhabdus luminescens
gtgatggatatcgtatttattgaggagttagtcgttgttaccacaattggtgtttacgactgggaacagaccattaaacagaagttagtgttcgatatcgaaatgggatgggataataaacgtgcatcatccagtgatgatgtcgaatattgtctggattatgccaaagttagcgaagcgatcatcaatcatgtagaaaatcagaattttgctctggttgaaagagtggctgaagaggtagcggatctgctgttaaaacgttttaattcgccgtgggtacggataaaagtgagtaaaccgggtgctgtcgcgcaggctcgtcaagttggtgttattattgaaagaaaaaaataa

SEQ ID NO: 9834 - DNA, 819 bp, Photorhabdus luminescens
atgactgacctttctaccttgtttcatgcagctatccttggtgttgttgaagggctaactgaatttcttcctgtttcctctaccggccatatgatcattgttggccatatgttgggatttactggcgataaagctgaaacatttgaagttattatccagcttggatctatccttgctgtggtagtcgtgttttggcgtcgcttatttgggctcattggtatccactttggtgaagttcctcatgaaggtaaaaccaatggcaaactgaaactgagtcatattattttagcaatgctacctgcggtgacacttgggttgatgttccacgatgtcatcaaatcactgtttaacccacaaagcgtgatgtacgccttggttattggtggtgtgttgctgattactgcagaaatcttgaaacctaaaacaccaaaagcagaggggctggatgatattacttatcgtcaggcttttatgattggctgttttcagtgtctggctttatggccgggattttcccgttcaggtgcgacaatttctggtggaatgctgatgggggttaatcgttatactgcatcagaattctcgtttattttggctgtaccgatgatgatgggagcaagtggattagatttatataagagcctgcactttttgagcgcttctgatatcccaatgtttgctgttggttttgttactgcatttgttgtcgcgttagtcgccattaaaacttttctggcattgattaagcgtatatcttttatcccatttgctatctaccgctttattgtggcagccgctgtttactgggtatttatgtag

SEQ ID NO: 9835 - DNA, 1251 bp, Photorhabdus luminescens
gtgagagtctatctggttggcggcgcagtacgtgaccgactgctaaattttcctgtaaaagagcgggattgggtcgttgtgggtggaacatcagaagcgctgttatccttgggatatcagcaagttggcaaagattttccggtgttcctgcatcctcaaacccatgaagagtatgccttagcacgcactgagagaaaatccggcctgggatatacgggtttcacttgttatgcagcgccagatgtcacactggaagacgatttgcagcgtcgtgatctgacagttaatgcgatcgctcaaacacccactggtgaactggtcgatccttatcatggtgttgatgatttgaacaatcgtattctacgccatgtttctgatgctttttctgaagatccgctaagggtattacgagtcgctcgttttgctgctcgtttcgcccatttagggtttaccatcgcgtccgaaacacaagcattaatgtcaaatatggcaatcaatggcgagttatcagtactcacaccagaacgtgtctggaaagagaccgagaaagcccttgctagcccttcccctcaggtcttttttcaggttttacgtgattgtggtgcattggcagtgttgtttcctgaaattgataatttgtttggtgttcccgcaccagagaagtggcatcctgagattgacaccggtattcatacgttaatggtgctgaaagtagcgactgaattaacagatgaagtcgatagtcgttttgctgctctatgccatgatcttggcaaagggttgacaccaccagaacagtggcctcaccattatggacatgggccagcgggcgttaagttagttgaccaattatgtcaacgtctgcgtgttcctaattctgctcgtgatttagcaaaactggctgctcaatatcatgatttagtgcataccgtcactcaattgcggccgaaaacattacttaagttgtttgatgctgttgatgcatggcgtaagcctcagcgaatagagcaattaattatcatcagtgaagccgatgcgcggggtcgtaccggttttgaaaatacaccctatccacaaggtgattgtctgcgacaggcattcaaagttgccagccaggttcaggtgaaaaatattgtagacagtggattacgtggtgctgacattggtcatgagttacgacgtcaacgtcagcatgcattggcgcaatggaaacaacaagacgatacagctcaagacaatactgttacctga

SEQ ID NO: 9836 - DNA, 621 bp, Photorhabdus luminescens
atgcgaaaactacatttacttctcacggcgttaatgagcctcagcttttcgctcactacctacgcggaaggaaaacgctatgtatctgatgagttatctacctacacacacgccgggccgggtaaccagtatcgtattgccggtacactgaatgccggtgatgaagtcacattgataagcatcaatcgggatagtaattacgctcaagttaaagatgataaaggccgccttgtctggctacccgttaaccaactcagtaataaaccaagcctacgcacccgcctccctgagttggaacaggaagtgaaaacattgacagagaagttagccaatatagacaataactggaatcagcgcactgccgacatgcaactgaaggctgccaatagtagtagcattgttgcagaactgaaaaaagagaatgagaggttaaaaaacaaactgacggtagcagaaaaaaagcttgatgctgcaaatctgcaacttgatgacaaacaacgtaatatcattctgcaatggtttatgtatggcggtggtgttgcaggcgctggtttaatctttgggctattactgccacatatgatccctcgccgtaagcgtaatgaccgttggatgagttaa

SEQ ID NO: 9837 - DNA, 939 bp, Photorhabdus luminescens
atgagtgtagaaattgaattaaaacttattgccaaaccacaagttattcctaccattcgccagcaattattgttacttccgcatgactatttttctccccaaaagttgaccaatatctattttgaaacgtcggataatcaactgcgtggtcttgatatggggttgaggatccgtggttttgatgatcaatatgagatgacggttaaaacagcaggtaaggtggttggcgggttgcatcagcgaccggaatataatgtgccattggcaaagccggaattggcattgactctgtttccaccgcacatctggcctgacaactgtgatgtggaagcattgcaatcccgtttgaatgcattattcagtactgactttatgcgtgagaagtgggtagtaacttatggacaaagtgagattgaagtggtgctcgatcagggagaaattattgcagccaatcgtaaggagccaatctgtgagtttgaactggagttaaagcgaggaatcatagccgatgtattagcattggcggttgaattggcaaaatcaaatggcttgcggcaaggaaatagaagcaaagcggcccgtggttatcaattagctcagggaaaaccaaaagcagtttggccttcaactcaagtggaaattgatatgcggcagtcattgccttcggtacttacgtcaatattagcccattggcaggagcaagaggaatgttggctggccggtttatcagacggtcgagatggcttaaagcaagtactgactttgattcagcagacgatcgaatattctagtgagtcggaacagttggataaccaattagttgctatcaaccagaaattattggatatggaaacagaagctgaaacgctatgttatagctcgctctatttgcaatgtaagttggcactgactatgtggttaataaatctatgtggttaa

SEQ ID NO: 9838 - DNA, 2871 bp, Photorhabdus luminescens
atgttgccactttcaactccgcttctggcccagttacagcgtgtgactgaacattttcatcaactgactttgaacgttgagcctgttgctgctcatgagcaggccatattatccctgagcgattttgttgttgaaaacctgcaagctcatcctgaatggttagttgagatccgccaacatccacctgaagcgcaggagtggcatcaatatactgaatggctgcaacagttactcgcatcagtagaggatgaaaataccctcatgcgggttttacgccagttccgtaacaagattctggtcagaatagcctggtcgcaggcgctacatagcattacgactcaggagactctgcaacagcttagtatgttggctgaaacgttgattattgctgcccgtgattggttgtatcagcgttgttgtcaggattggggaacgccttgtaatgagcggggcgaaccacaaccgctgttgattatcggtatgggaaaactgggcggtggtgagttgaacttctcttctgatattgatctgatttttgtctatcctgaaaacggcattacccaaggtggccggcgtgaaatggataacacccagttttttacccgcctggggcagcatcttatcaaagtgctcgatcagcaaactgtggatggttttgtgtatcgggtagatatgcgcttgcgcccgtttggtgatagtggcccattggtgtttagttttgttgcactggaagattactatcaagagcaagggcgtgattgggaacgttatgcgatggtgaaagcacggattatgggttcggacaaccaagcgtatggtgaagagctacgtcgaatgttgagaccatttatctttcgccgttacattgatttcagtgtgattcaatccctgagaaatatgaaaggcatgattgaacgggaagtgcggcaccgtggcttgaaagacaatattaaactgggcgctggtggtattcgtgaaattgaatttatcgcccaggtgttccaactgattcgtggtggacgtgaactgtgtttgcaatctcaggcgttgttaccaactctgcaaataatagcgaagttgacgcttttgcaatcattgcaggtgaaacaacttgctgacggttacctttttttgcggcggttagaaaatcttttacagtcaattaatgatcaacaaactcagactttgccagaagatgagctgaatcgttcacgactgacgtggggtatgggatttgaaagttgggacgccctaataattgaattgaacaacaagatgagtgctgttcgggctatttttacgcaattaattggtgatgacagtgataatagtgatgaggaacctagccatgtaccatttaaaagtctgtggctggaagatctcgaaaaagaagagttaatcatactcgctccacatttggatgaagagattgcacagcagatattgcatattatttctgtgttccgccatgatgtgggtaaaagaaccattggcccgcgtgggcgcgatgtgctcgaccatctgatgccacgtttgttggcaaaagtttgtttgcgacaagatgccaataatcaagatgttaataatcgaaatgttaatatagtgctagagcgggttatccctctgttgttaagtattgtcagccgtacaacttacctggaactgatacttgaatcggaagctgtactggcacatgttatccggctgtgtgctgcttcaccgatgattgcgactcagcttgcctgtcatccattgttgctggatgagctgcttgatccacaatttctgtatgaacctttgccgctgaatgcctataaagatgagttgcggcaatatttgttgcggataccagaagatgatgaagagcagcaattagaggcgctccgccagtttaagcaggcgcaattactgcggattgcggcggaggatatcactggcgtgttgccggtgatgaaagtcagtgatcatctcacttacttagcagaagcgattattgaagcggtggttttacaggcgtgggggcaaatggcaaaacgttatggtgttccatcacatctgagtcagcggcaaggattgggatttgctgtgattggttatggtaaattgggcggttgggagttgggttatggttctgatcttgatttggttttcttgcttgactgcccgatggatgtgatgactgatggcgatcgatcgattgatgcccggcaattttatttgcgtcttgcccaacgaattatgcacttgttcagtgctcgaacctcctctggtgtgttgtatgacgtggatgtccgcctgcgtccttcaggcgaatcaggcatgttagtcagtaccatcggtgcgtttgctgattatcagcggaatcaagcgtggacttgggaacatcaggcgttggtacgtgctcgtatggtatttggtgatgaaaacttgcatcgggattttgagcggatacgccatcagacgttatgtacgcgacgagaacccgcgttgttacgtcagcaggtaagggaaatgcgggaaaagatgcataaacatttaggcagtcaccattcagatcaatttgatattaaagctgatccggggggtatcaccgatatcgaatttatcgctcaatatttggtgcttcgttatgcggctgaaaatgagcgtttggtgcgttggtcggataatgtgcgaatttttcaattaatggcggcttatgaaattatggatgaagatgaggcagccggattaacgcaggcttacgtttctatgcgtgatgaactacatcatctgacgttacagacgcattccagtcgagtatcaatccactgtttcagtgagcagcaggaacgggtacgtcgtagttggcaacagtggttgggtgaataa

SEQ ID NO: 9839 - DNA, 1425 bp, Photorhabdus luminescens
atgaaaatgacactcccggattttcactgtgcagaggttttagtcgtcggtgatgttatgttagatcgctactggtatgggccgaccagccggatttcgccggaagcgccggtgcctgtagtaaaagtcaataccattgaagagcgtccgggaggcgctgccaacgttgctatgaatattgctgctcttggggcaaattcacatttaatcggtttgactgggattgatgacgcagcacatgcgctgagtgagaaactgcgcagcgtcaaggtgcgctgtgactttgtttctgtcccaacccatccgacagtgactaaactgagggtactttcccgtaatcagcagttaattcgcttagattttgaagagggtttcgataacgtcgatgcacagccaatgtttgagcgcattgaacaggcgttaccccatattggagcattggttctatctgactacgccaaaggtgcactgagtcaggttcaggaaatgatcaaactggcaaatgcggccaaagtcccggtattaatcgatccgaaaggtaatgattttgagcgttatcgaggtgcaactttgctaacgccaaatctgtctgaatttgaagcggtcgtgggccactgcaaagatgacaatgagttggttgagaagggaactcggctagttaagggtttggatcttcaggcattactgatcacccgttctgaacagggaatgagtttgctgagtgttgatcagccaccactgcatttgcctacgcaggcgcaagaagtgtttgatgttacgggtgctggcgatacagttattggtgtgttagcaacggcgattgcggctggaaagccactgaatgaagcttgtttcctggcgaatgctgctgcgggggttgttgttggcaaactgggaacgtcgaccgtttcgccgattgaactggagaatgctatccgtggccgcgctgaaacaggtttcggtgtgatgaccgaatttcagcttaaacaggctgttgttgatgctcgtcaacgtggtgaaagggttgtgatgactaatggctgctttgatattctgcatgcaggtcatgtctcttatctggagaatgcccgtagactgggtgatcggttaattgttgctgttaacagtgatgcatcaactaaacggctgaaaggtgagagtcgtccagttaatccactagaacaacgaatgattgtgttatctgctctgggcgcggtggattgggttgttccatttgaagaggatacaccacagcgattgattgcggatgttttgccggatgtattggtaaaagggggagattataaaccggaagaaattgctggtagtgaagaagtttgggctgcgggcggagacgtcaaagtgttgaactttgaagatggtatttcgacaaccaatatcatcaaggcgattaaaaatcagtaa

SEQ ID NO: 9840 - DNA, 672 bp, Photorhabdus luminescens
atgcaaggtaagttgattttatcttcaatttgtttggcttcggcaatattagcagggtgtacaactgaatcttctaataccgtccaggtacaaaaagttaattcttataatacagtatatcaaggtgttcgtagtccaattgcgattggtaagtttgaaaaccgttccagttatcaaaatggcattttctctgatggcgttgatcgcctcggtaatcaatctaaaacgattttaatctcgcatttacaacagaccgggcgctttacggtgctggaacgcaccaatatggcggaactgaaagcagaagcgggtttacaaggtaaatcgcagaagttgaaaggtgctgcttacgttattactggtgatgtgactgaatttggccgtaaagaagtgggtgatcatcagttatggggcttgttagggcgtggtaaatcacaggtggcttattctaaagtcatgctaaatgtggtgaatgtagaaacttccgaagtggttttctctgtggctggtgcaggagaatataaattatccaaccgtgaaattatcggctttggtggtaccgccagctatgattccacactgaatggtaaagtattggatctggctattcgtgaagcagtaaaccgtctggttgaaagtgttgaaaccggtgcatggaaaccatctaattaa

SEQ ID NO: 9841 - DNA, 360 bp, Photorhabdus luminescens
atgatattaatgaaaaaagcgggcttattgctggcagctatgaccttagcgggttgtgtcactcagccaaaaacaatttatgagtgggataaataccaacctacaatttatcagtattatcagcaggataagatggggtttgaagaacagttacaggctttgcagcaggtgattgaaagagcgaaagccaaagataagtctgtaccgcctgggctgcatgctcagattggcttgctttatagcaaaacaggtcgtgtttcagaagcatttcatcaatttgaaatagagaaaaaattgttccctgagtcagcgccatttatggattttctattaagtaaaaataaaggaactatgcaatga

SEQ ID NO: 9842 - DNA, 663 bp, Photorhabdus luminescens
atgaaccgtattctcgtcgcattaagtctattggcggcatttgtgctgacaggatgtagtaaatctgtcccttatgattacactgcatttaaagaaagcaaacctaaatctattctggttctgccggcggtaaacaaatctctggaagttaaagcagggcacagcctgatttctcatgtgacatatccattggcagaatctggctattacgtttttccggttgctgttgtggaagagacatttcagcaaaatggtgtgacagcggcacaggatgttcaggatatcagttacaaaaaattgcatgatatttttggtgcagattcagcgctctatttggatattgaagaatatggtacgcaatatcagattatcaacagtgatacgcgtgtaacggcttccgcgaagctggtggatttgcgtagtggtaaacaactgtggcatggtcgagcaatggtttcatcaactgaaaatcaaagcaattcgaataatcttgttggcatgttggtatccgccgtagtttcacagatagctaataccattatggataaaggtcatgaaatcgctggcattacaagtaaccgcttactgacagccggtggtagtcgtagtttgctgtatggtccacgttctgagcattacggtaaagaaaaccagaagcattaa

SEQ ID NO: 9843 - DNA, 291 bp, Photorhabdus luminescens
atgctcgatcccaaaaaaattgaacaaattgcccgccagatccaagattctttaccaaaaggggttaaagagtttggtggtgatgtagaaaaaaaattacggatgattttgcaatcccaacttggcaagcttgatttagtgaatcgtgaagaatttgatatccaaactcaggttctgttatgtactcgtgaaaaattgaccgcgatggaacagcgtttaagtgaactagaagcgaagtttgagaataagaatgttccatctgctgataacacgacaaaaaaagaagagtaa

SEQ ID NO: 9844 - DNA, 654 bp, Photorhabdus luminescens
atgaatcagacgctactttctgaatatggcacatcatcagaacgtgttgaacacgccattaacgctttgcgtgatggaaagggggtgatggtgctggataatgaagatcgtgaaaatgaaggtgatattatctttgcggccgaaacaatgactgtagagcaaatggcactgactatccgttatggcagtggtattgtctgcttatgtctgacagaagagcgccgtcagcaattacaattgcccatgatggtagaaaataactctagcccgttccagactgcattcaccgtaaccattgaggccgctcaaggagtgacgacgggggtttctgcggctgaccgcatcacgaccattcgtgcagcaattgctgataatgccaaaccaagtgatttgaaccgtccgggacatgtttttccactgcgcgctcaacctggtggcgtgttggttcgtcaagggcatactgaggcagcaattgatttagtcagtttagccggatttaaaccggcaggtgtattgtgcgaattaaccaatgatgacggttcaatggcgcgtactcttgaagtagtgcaatttgcgaagctacataatatgccggtagtcactattgaagatctggtgatttatcgccaggcaatagaacagaaagcaagctga

SEQ ID NO: 9845 - DNA, 786 bp, Photorhabdus luminescens
atgaatatttccagaatgccggcactgtttattggtcatggcagtccaatgaatgtactggaagaaaatcgctataccaatgtgtggcgtgaacttggtgaaagactgcctgtacccagagtgattctggcgatttctgctcattggtataccaatggcacactggtaacagccatgacacagccgaagactattcatgattttcgtggttttccacaggaattgtatgaaactcaatatccggctaagggctcgcctgaactggccgctttagtgcaagagatgctggaacctgtggaagtttatgccgatcatcatcagtgggggttggatcacggaacttggggaattctggttaaaatgtatccacgggccaatattcctgtgattcaactgagtatagatgatgccaagccagcgacgtaccactatgaattagggaaaaagctggctgctttacgggatgaaggtgttttaatcttggggagtggtaatgtagtacacaatcttcgagccatgaagcggcaagatcctaatgctgaaccttacccgtgggcggaatcatttaaccattatgtgcgtgataaccttaccagttatgagcaaccttatcctttgattcatgcactggacagagaagatggtctattatcgaacccatctcctgaacactttttaccgttgctgtatatcatgggaacgtgggatagaaaagaagcggtttccattcctgtcgatggtattgagtctggttcgctgagtatgttgtctgtgcaggttggttga

SEQ ID NO: 9846 - DNA, 159 bp, Photorhabdus luminescens
ttgagtgatgctcagggggtaattgcccatgaattggggctttcaagttgggttaagctgaaagcccatgtcgacgtactggaacaggtcagaatggctagtcaaattcagaatttagcaccagatcatgaacttgttatactgaatatccttttgtga

SEQ ID NO: 9847 - DNA, 276 bp, Photorhabdus luminescens
atggaggtttattggacacttaaagctcaaaatgatttggagcgcatctatcattttgcctgtcaatacagtaaatcacatgctaataatgtgttagaccatctaattatcagcactacagatctggcactgcaacctaagatagggattcctcagcctagatataagccccgcgaggtacgtaaggtactttttagtgattacgaagtccattacgagatatccaacgatacaatttacattgtagacctttggcatacccgcgaaaaccgttag

SEQ ID NO: 9848 - DNA, 261 bp, Photorhabdus luminescens
ttggaagctcttatgtccatatcagcaaaacagacaattaccgcacagataccgatcaaactagctacagccataaacgatttagccaaagagttagaccgctcaaaatcgtggatcattaaagaggctcttacctcaatgattgaggaacgtgaacatcgccaccaaatgattttggctggcctcgcggatgtcgatacaggccgtattgtgaatcattcagatgttattaattttgcatccaagctgaaaaaatcataa

SEQ ID NO: 9849 - DNA, 1026 bp, Photorhabdus luminescens; identical to SEQ ID NO: 5914

SEQ ID NO: 9850 - DNA, 1161 bp, Photorhabdus luminescens
atgaaacgtattgctattactgaacgtccggattggcatgaaaaagcgatagaatatggctttaattttcacaccatgtatgacaaaccttactggtgtgaagaagcttattaccaattttctcttgcccaaattgaagaaatcgaagctaccaccgctgaactacatcaaatgtgtttgcaggtagtcgagaaagttgtcgatagtgaagaattgctgactaaatttcagatcccaaaacattgttgggattttgtccgtagttcctggattaccagccagccgtcactctattcccgtttggatttggtttacgacggtaaaagcccggcaaaattgttggaaaataatgctgatacgccaacctcgctgtatgaatccgcttttttccaatggatctggttagaagatcagatgaatgccgggttactgccagcacatgccgatcaattcaacagcatgcaagagcaattgattgaacgctttgctcaattgcgtgatgaacatggctttggcttactgcacatggcttgctgtcaagatacggaagaagatcgtggtaccgttcaatacttgcaagattgtgcgctggaagccggtgttccaaccgagttcttatttattgaagatatcggtctgggagaaaaagggcagtttactgatctaaaagaccaggtgatcagcaatctattcaaactctacccttgggaattgatgttccgtgagattttcgctaccaaattggaagatgctggcgttcgttggttagagcccgcgtggaaaagtattatctccaacaaagcattgctacccatgttgtggaagatgtttccaaatcatccaaacctgctacctgcttattttgccgatgataattatccggcaatggatagctatgttattaaacctctgttctcacgggaaggggctaatatccgtattattgaaaaaggcaaggaaattgccagtgttgatggcccttacggtaaagaaggtatgatcgttcagcaatttcatacactgccaaaattcggtgacaattatacgcttattggtagctggctggtaaatgatcagccttgcggtattggtttgcgggaagacagtgaactaataacccaagatttatctcgcttctacccacatattattttggattaa

SEQ ID NO: 9851 - DNA, 705 bp, Photorhabdus luminescens
atgacaataaagcggaccaaagatattaatcacgacacattccgtaaggcttggcgtaactatcgccttgcacctgtggcaatagctgtcagtgcggttttcatgttatctgcctgtgaaaagagtgatgaaactgtctctctttacatgaatgcagatgaatgttctcaagccaatccatcacaaagtgagcaatgtactactgcttacaacaatgcgttgaaagaagcggaaaaaacagcgcctaaatatgccaccaaagaagactgtattgccgaatttggtgaagcacaatgtactcaaaccccggcgcaagctggccttggcaccactacttctagtacctccaccaatggtgaagcacaggcacagcagcagcaaagcggcagcttctggatgccgctgatggcaggttacatgatggggcgtctaatgggcggtggctcagcaccatcacaacctctgtttagctccaaatccgctaccagcccggcaaacggtcaattcgttgattcgacaggtaaaagctatggccctgcaaccgcaggtggccgttccatgacagtacctaaaacggctatggcaccaaaaccagcaacaaccacaaccattacccgtggcggcttcggtgactctgtcgccaaacagtcaaccatgcaacgcagcgcctcttcgggctccacatcccgttcagtgggaggctaa

SEQ ID NO: 9852 - DNA, 414 bp, Photorhabdus luminescens
atggataaaaatcaatattcggaaaaatggcagatgcgctttgcattctttgaacagaatggtgctcctaaaacgcctgagcacaaagctgccatgaaagtagaaccctatatgcgccgtatattgttgaacatgaattttattgccttcttttttggttttatttacttttttgttttaggtttatggcgaaagaacctgactttatttggtgttggtgttggtgttggtgttgtagtgataattatattggagattatggaaagtgtcttgagtatttatattcctcctgctgtcgacatggggattaaatttgcgttttcagcaatatggggaaccactgctaactatgcctattatctgaaagaaaaagtgaatagccagagctggaatccatttgaaggattattttaa

SEQ ID NO: 9853 - DNA, 1374 bp, Photorhabdus luminescens
atgaagaaactgctctccatttttatcgctatgagcctgacgggattgagttcgatgagtcaagctgaagatcttttgcaagtttataagcaagcaaaagagggtaaccctgaactacgtaaatcaatggctgaacgtaataaagcttttgaaaaaattaatgaatcccgtagcccattattacctcagttggaattaaataccggatacgcctataacagtggttaccgcgatcaacgtgacacagaaagcaatacattgaatgcaaagcttggtttgactcaaaccatttttgatatgtctaaatggcgcctattgaacttagaagaaaaaacggcaggtattgctgatgttacctaccaaagcagtgaacaaaaactgatcttggatagtgcaacagcttatttcaaagtactgcgcaccattgatacactctcctacattgaagctcagaaagcggccatttaccgccagttggatcaaacgactcaacgttttaatgtcggtctggttgcaattactgatgtccagaacgcccgagctaattacgatgatgtactcgctcaggaagttgccagccgtaatgagctggacaatgcattggaagccctgcgtcaggtcacgggtatttattaccctcggttagcctcactaaatattgatcatttcaaaacacagaagccagaagcggtagatattctgctaaaagaggcagagaaacgtaatttaagtttactatctgctcgtttaggtcaggatctggctcgtgaacaaatcaaagcagcccaaaccggccatatgccaactattgatttaggcgcttctaccaatgtttcaaatagccagaatcatgcaccaggcagatcaaacaactatagcggtgaaaacagcgttggcctgacacttcgtctgccaatttatagcggcggtgccaccagttcccgcgttgaacaagcacaatatggttttgtcagcgccagcgaacaattagagagcacttaccgcaatgtggtacagactgtccgttcttcctttaacaacatatctgcttccatcagcagtatcgacgcctacaaacagcttgttgtttcggcgcaaagctcgctcgacgcaatggaagcgggttatcaagttggcacacgtaccattgttgatgtactgaatgccacgaccaagttgtacgatgccaaacagaagctatccaatgctcgctatgattatctgattaatcaactgaatattcagcatgcactgggtacgttaaatgagaaggatttagttgctctgaataattcgctaggtaaacagctctcaacttccgctaacagcattgttcagggaacaggaaccccagtaacttctgctcgtaactga

SEQ ID NO: 9854 - DNA, 642 bp, Photorhabdus luminescens
atgcataagaagccgttaacgccagtcatgttggataagcaggatatagaaattatcgcgaaaaaaagtttgtacaatggattctttaaactgacaaattaccgtttccgtcatcgtctgtttgccggtggttggagtgaagaggttagccgtgaagtttttgagcggggccatgccggtgcattgttaccttatgatccacgtcgtgatgaggttgtattgatagagcagatacgtattccggcaatagagacgaaagcgacgccatggttactggaaattgttgccggtatgattgaagagggcgaagatgtcgaacaggtggtgcgccgcgaaacaatggaagaggccggaatcgaagttaaacgttgcagacccgtgttgagttatctctccagtcccggaggaacaacggaacgtatctctgtgatggtgggggaagtggatgccacgacagcgaccggtattcatggattatctggtgaacatgaagatattcgggtgcatgtggtaagtcgtgaacaagcttatcattggatggaagagggaattattgataatgctgcttcagttattgcgatacaatggctggcattacaccatgaaaagttaaaaaaagaatggaattcagataattcctaa

SEQ ID NO: 9855 - DNA, 840 bp, Photorhabdus luminescens
ttggaaagccagtttgaactgcctgtggtagagggaaccacagccaaaatattgcaaataacagatacgcatctttttgccagcaaagaagatactttattgggtatcaatacttatcgcagttaccaagcggtgctggatgccatcctcaaacaaaatgctgatattgatttaatcgtagcgacaggtgatttggtgcaggatcagtcgttggaagcttatcgacattttgctgatggtattgcccgtttaccggcaccttgtgtctggttacccggtaatcatgattatcagcctgcgatggtggatgccttggcggcggctggcgtttctccgtcgaaacagattttagtcggtaagcactggcaacttttgatgcttgatagtcaggtgcagggcgttccccacggggagttgtcggaatatcagcttgaatggatgaaaaattgcctggataggcaccctgaacgttacgcggtgatcctgcttcatcatcatccattaccatcaggttgtacctggctggatcagcatagtttgcgcaattcacatattctggcccagtatctgcaaagttattcacgagttaaggcgatgctttgtgggcatatacatcaagagatggatctggattggaatggcatccgtatgatggcgacaccatcaacatgtttgcaattcaaaccacattgtaccaattttatgcttgatactgttgctccgggatggcgttatctcgaattgtctgttgccgataatggcgaatttggtttgacaactcaggtctatagactggcaagtaatgagttctgccctgatttagattcggatggatattag

SEQ ID NO: 9856 - DNA, 609 bp, Photorhabdus luminescens
atgtcaaccttactctatttgcacggttttaatagttccccgcagtctgcaaaagccaatgccttaaaagcgtggctgtatcagcatcatcctgacattgacatgctggtgcctcagttacccccttatcctgaagaagcggctgagctgctcgaaaatctggtgatggagcatgccggggatgatttgggtatcgttggctcttctctcggtggttatttagcgatatggctttcacaatgtttcagcttgcccgctgtggtcgttaatccagccgtgcgtccgtttgaattactgcgggattatcttggggaaaatattaacccttatacaaaccaacgatatacgttggaatcgcgccatattcatgatctcaaaagcatgtggattgaaccattggagtcaccggatcttatctggttattgcaacaaaccggagatgaggtgctggattaccgccaggcggttgcttatctggtattatgtaagcaaactattgaatctggtggtaatcatgcctttatcggatttgaacactatttcccacaaatcatcaactttcttgggctttctagtgatggcgagaaaaaacttgccaaaaatgtttga

SEQ ID NO: 9857 - DNA, 1896 bp, Photorhabdus luminescens
atgactcaatctagttacaacgcagatgccattgaagttctcagtggtctggaaccggttcgccgtcgtccgggaatgtacactgatacaacgcgtccgaaccatttggcacaggaagtgatcgataacagcgtggatgaagctttggcaggtcacgctaaacatattgaagtgatccttcatagcgatcagtcactggaggtcattgatgatggccgcggcatgccggttgatattcatccagaagaaggcgtttcagcggttgagttgatcctgagccgcttacatgccggtggtaaattttcgaataaaaactatcagttttctggtggtctccacggtgtggggatctcggtggttaacgctttgtccaagcggattgaggtcaccgttcgccgtgacagtcagatttatcagattgcttttgagaatggcgataaagtgcaggagctgacagtaataggaagttgtggtaaacgcaacactggtaccggtgttcacttctggcctgacgaaagtttctttgatagccctcgtttctctgtttcccgcttgacccatttgctgaaagcgaaagccgttttatgtccgggagtggaaattgtttttaaagacaagatcaacggtactgaacagaaatggtgttatgccgatggtctgaccgactatttgatggctgcggttaatggcctgacaacattgccggctgcgccttttgtcggtactttcagtggtgcaaccgaagcggttgactgggcgttactctggttgccggaagggggagagctactggctgaaagttatgtcaacctcatcccaacgatgcaggggggaacacatgtaaacgggttgcgtcaggggttactggatgcgatgcgtgaattttgcgaatttcgcaatatcttgccacgtggtgtgaagcttgctgccgatgatatctgggatcgctgtacttatgttctgtcggtaaaaatgcaggatccgcaatttgctggtcagacgaaagaacgcctctcttcgcgccaatctgctgcttttgtttctggtgttgtcaaagatgctttcagcttatggttaaaccagaatgttcaggaagcagagcagttggctgaactggcgatcgctagcgcacaacgtagaatgcgtgcagcgaaaaaggttgtgcgtaaaaaactgaccagtggcccagcattaccgggaaaactggctgactgtacatcacaggatctcaattttaccgaactgtttctggtagaaggagattctgcggggggatcggcaaaacaggcgcgtgaccgtgaatatcaagccattatgccgctgaaagggaagattctgaatacctgggaagtttcttcagatgaagtgttggcatcacaggaagtccatgatatctctgtcgcgattggtatcgacccggatagccacgatctcagtcagttgcgttatggcaaaatctgtattctggcggatgcagactcagatggtttgcatattgcgacgctattgtgtgccctgtttgtccgccatttcccaacattggttaagaacggccatgtttatatggcaatgccgcctctatatcgtattgatctaggtaaagaagtgtattacgcattggatgaagaggaaaaaagtgcggtgttggatcgtctaagccgcaaacggggtaagcctaacgtacagcgctttaaaggattgggtgagatgaatcccatgcaactgcgtgaaacaacgttagacccgaatacccgtcgtctggtgcagttgactatcgatgatgaaaactaccaggaaaccttctctatgatggatatgcttctagcgaagaagcgttcagaagatcgccgtaactggctgcaagagaagggcgatacggtagacattgaagtgtaa

SEQ ID NO: 9858 - DNA, 2268 bp, Photorhabdus luminescens
atgagtgagataactcacgatggagtggagcgtttgccgctccactcatttactgaaaccgcctacctgaactactccatgtacgtcatcatggatagggcgttgccttttatcggtgacggtttgaaaccggttcagcgccgtattgtttatgccatgtcagaactgggattgaacaataccgccaaatttaagaaatccgcccgtaccgtgggtgatgtactgggtaaataccatccgcatggtgatggtgcttgttatgaagctatggtgttaatggcgcagccattttcttaccgctatcctttagtggatgggcaaggaaactggggagcgccggatgatcccaaatctttcgccgcgatgcgttataccgagtctcgcctgtccaaatatgccgagttgctgttggctgagttaggccacggtaccgttgattgggtgccaaactttgacggcacattgcaggaaccgaaaatgctgccggcgcgtttgccaaatattttgctgaatggcaccaccggtattgcggtggggatggcgacagatattccgccccataatgcgcgtgaagtggtgaatgcactggttatgctgctggataagccacagagttcccttgatgatctgatggaacacgttaaaggtcctgattatccgactgaagcggagatcatcacttctcacgaagatatccgtaagatttataaaaatggccgtggttcggtacggatgcgagctgtttggtcaaaagaagatggcaatgttgtgatcactgcgctgccgcatcaggtttctggtgccaaagtgttggaacagatcgctaaccaaatgcgggctaaaaagctgcctatggttgatgacttacgagatgaatctgatcatgaaaatccaactcgtctggttattgtccctcgcacaaaccgggttgatttggagcaggtgatgaatcatctgtttgccactaccgatttggaaaagagttatcgcgttaacctgaacatgatcgggttggataaccgtccgaccgtgaaagggctggttgagatcctctccgaatggttggtattccgccgggaaaccgttcgtaaacgtctgaaccatcgtctggaaaaagttcttaagcgcctgcatgtgctggaaggcttactgatcgcatttctcaatattgatgaagtcattcacattatccgtagtgaagatgagccaaaaccagtattaatgtcacgttttggtttaagtgagacgcaaacggaagccattcttgagctgaaattacgccacttagctaaactggaagaggtaaaaatccgtggcgaacagagcgaactggcaaaagagcgtgataagttacaggcgattctgagttctgagcgcaaactgaataccctgttgaagaaagagatcatggctgatgcggccacttatggtgatgagcgtcgttctccaatgagagaacgtgatgaagccaaagcgatgagtgagcatgacatcacgccttctgagccggtgacaatcgtattgtccgagatgggttgggttcgtagtgcgaaaggtcacgatattgatccggccggtctgaattacaaagcaggtgatagcttccgtggtgcggctcgtggtaagagcaatcagccggttgtgtttattgatacaacaggtcgcagttactcgcttgatccgcgggatttaccttctgccagagggcagggggaaccactaacgggtaaattgactgtacccgcaggggcaacggtagaacatgtactgatggcaccggatgaacagcagtttctgatggtctctgatgctggttatggttttatctgtacttttagtgatttggttgctaaaaaccgagcaggtaaggcactgattacattgccggaaaatgctcgcgtcatgacgccgctggaaataaataatccgcaggatgatatgttgttggcaattacccgcgcaggccggatgttaatgttcccggttgcagatttgccgcaactttctaaagggaaagggaataagataatttctgttcagtcagccgcagaaaatgacctgttgagttggttattgatactaccgccacaatcgtctattacactttactttggaaagcgtaaattgacgctgcgtcctgaagatcttcagaaattccgaggagaacgtggtcgtaagggaacgtctctacctcgtgggttgcagcgtattgaacgggtacaggttgagactccaccttctgctactaatactaacgtaactaaatag

SEQ ID NO: 9859 - DNA, 729 bp, Photorhabdus luminescens
atgttagcaattattcgcggcattattgttattctgttttcgattgtagtgtgtgtctctggtgctatttactgcttattcaggccacgtcatcctgaccatgttatggtgtttgggaatatgtttggtcggttgtcgaaaatatttggcgtcaaaattattgagcgtattcctgctgaagctaagcattatggtccgagtatctacattggcaaccaccaaaacaactatgacatgataactatgtccaatgcggttcagccgggcacagtgacagtaggtaaaaaaacgttggtgctgatcccattttttggtcagctttattggttggcaggtaatatcctgattgatcgtgctaaccgtgctaaagcacatggcacgattgctcaggttgtggagcagattaaaaatcgtcatctttctgtttggatgtttccggaagggacacgtagtcgtggtcgtggtttgttgccatttaaaactggcgctttccatgctgcgatctctgcgggagtgccgattgtcccggtctgcgtttcttctatcactaatggacgtattaagctgaatcgctggaataatggtcccgtcattgttgaaatgttgcctcccattgatacttctggctataccaaagagcaggtgcgtgagctggcagaatattgtcataaagtgatgaaagctaaaatagatgcattggatgaagagttggctgcaatggagaaatag

SEQ ID NO: 9860 - DNA, 1422 bp, Photorhabdus luminescens
atgtcatttagtcggcgccagtttattcaggtatcaggcttggcgatgtgtatcggagccgctcctttattggttcgggccagcaaaaatcagcagactgctttgccggttccccctttattggaatcccgtggtgggcagccgttatttctgactttacaaaaagcgcattggacttttgatggacaatataaaaccagtgtatgggggattaatggtcaataccttggtccgactatacgggttcataaaaacgatgatgtcaaactgatatacagcaatcggctagcagagccggtttcaatgaccgtcagcggattacaattaccgggtacattgaccggtggagttgcccgtcagatttctccggggtctgactggtcgccagtgttgcctattcgtcagcaggcggcaacttgctggtatcatgccaatacacctaatcggatggcaccacatgtttataaaggtttggctggtatgtggttggtagaagatgaaaccagccgtcatttgccgttgccgaaacactatggtgttaatgatttcccggttattcttcaagataaacggttggataactttggggttcctgagtatcagccggcctctgatagtggatttatcggtaatactctgttagttaatggcgtacagaatccttttattgaggtatctcgtggctggatccgtttacgtttactcaatgcatctaatgcccgccgatatcagttacagattggtgatggccgtcctttctatatgataggcactgatttggggctgttacctgcgccgatagccgttcagcaactctcccttgcgccaggagaacggcgtgaggtattaattgatatgtccaaagaggatgaagttgttgttaccgcaggtgaatcagctggggtacttgataagttgcgtgggttgtttgaaccctctacggtgttgatttccagcaccgttttgaccattaaagcaaccggtttattatctctggtgacagataatctcccatctcgtttgattgatgatgttacgccagtttccagtgtaatccgtaaccgggaaatttatcttgatgataatacgccgggaataaacggtgcgttatgggatatgaatcgggtggatattactagccagcaaggaacgtgggagcgttggatcgtaaatgcttctgccccacaaccattccatattgaaggtgtgcagtttaagctgattaaccacaacggtgaggcccctcaaccgcaagattatggttggaaggatacggtttgggttgatgggcgggtggaattgctggtttatatgaaccagccctcttatgagcacttcccattcctctattacagccagattctggaaatggccgatcgcggctctgttgggcagttagtgactataccggtcaatcaataa

SEQ ID NO: 9861 - DNA, 879 bp, Photorhabdus luminescens
atggataatcaacctattatcagacttgctgatgggaatcacatgccacaactggggcttggatcatgggcctcagatgaccagcagatagcagaaacaatccatgctgcactggatatcggttatcgggcaattgataccgccgctatctacaacaatgagaaaggcgtaggcaacgcgttacaagaaacagatatcccccgtgaagatatctttgttacaactaaattgtggaatgacagacaccttgatgcccgtgctgccttgacagaaagtctggaaaagttgcaactggattatgttgacctttacctcattcactggcctgcaccaccgcaagatcaatatgtcggtgcctggcaacaattgattgaattacagaaagaggggcttattcgcagtattggtgtttctaacttccaacctgaacacatccagcgactgatcaatgaaaccggtgttcatcccgtcattaatcagattgagttgcacccgctgttacaacaacgtcagctccatgcctggaatgccacacataatatcgttaccgaatcctggagcccactggcacaaggtggtgaaaatgtatttgataatcaactggttcaacatctgacacaaaagtatggcaaaacacccgcgcaggttgttattcgctggcacattgataacggcatgattgtgatcccaaaatcaaccacgttatcgagaattaaagagaactttgatgtgttcgatttcaaactagaaaaagaagatttgaccgcgatgactacgctagatatcggtaaacgtctgggaccaacccctgaaatattcgttgatttcagtgaattcattcagcttcttgagcaaaatagcgctaataatcagtgctga

SEQ ID NO: 9862 - DNA, 672 bp, Photorhabdus luminescens
atggaagtactaaacgggatcatgcaggcattatggcagcatgacttttctaaacttgccaaccccgatgttctctggattatctatggcattctattcgtgacactggttctggaaaatggcttattacccgccgcttttctgcccggtgatactctgttaatccttgccggtgcattagttgccaagggagtcatgagttttatcccaaccgtttttatattaacagcggcggcaagtatcggttgctggtttggctatcttcaagggctatggcttggcgataccaaacgagttaagaattggttggcacaacttcctattcagtatcgccaacgagctaacgagctgtttttcaaacatggtttggccgcgttactgattggccgttttttggcttttgtccgcactctgttaccaacattggcgggtatatccggccttaacagtaaacgctttcaagtttttaactggttgagtggcctgctatgggttgtcatcgtggtcggttttggttatctccttaatcagatcccgtttattaaaaatcaccaagatttggtgatgaacattttgataattttacccatagtgctattgctaagtggtttaagcgcctctttgttgatgtactggcgccacaagaaaatctcggcgacaaaacgtaaataa

SEQ ID NO: 9863 - DNA, 489 bp, Photorhabdus luminescens
atgtatgatcgagtatgtgtaataaacggatgggctctttttgctcatccgtgctttgtagaacaattaaaacaatcaatagataaggtagaacaacttcaacaaaaatatccaaatgactacttgaaaaaaaatgatacaaaacgcttggctgcaatcataaaactcgttactgaaattattcccaatgacccaactaatatagcctttcgtttaggtgacacattaggtggcaaaagaaaacactggttcagagcaaaatttttccaacaatatcgcctttttttccgttttcacgctgaaagtaaaattattatctttggctgggtaaatgatgagagaacaaaaagggcatatggtgataagcacgatgcttacaaagtatttggtgaaatgcttaatgcaggacacccaccagacgactggaactctcttttaaaagaatccattgattcaccacacttaactaaacttattaatgaacattag

SEQ ID NO: 9864 - DNA, 351 bp, Photorhabdus luminescens
atgcacgcattaccaaatgttgagttcgaggttggtgcagaatccaagcttaccagtcgcagccagacaaccatcccaacatctgtccgtaaagcgcttaagttaaaaccaggtcatgacagtatcgcatataagattttatcttctggtgatgtacttatcagccgtaaaaatagtgaagaagaaaaagatcttgtcatggaatcatttctggactttctggcaaaagacattcggagacatccgggacaagtacaacaattagatgaacaactcattaaccaggcgaagtcacttatcgctggaatagacatagatctgagcaacccattatctgctgacgatgagtaa

SEQ ID NO: 9865 - DNA, 1191 bp, Photorhabdus luminescens
atggcagaaaaaaaactggaaactttactggtcaatgcaggtagaagccaaaaatttactcaaggcgcagtcaatcccatcattcagcgaacttcatcggtgatcttcgattctgtcgccgacaaaagacgtgctacgcaaaaccggggcaagagcgagctgttttatggccgccgtggtacacagactcatttttcttttcaagcagcaatggctgaactggaaagtggcgcaggctgtatgctttacccttctggtgctgccgcgattagtcatgccattctcgcttttgccgccgcaggcgatcatattctattaaccggttcagcttatgacccgacgcaaagtttctgtgacaaaatattgtcacggatgaatattaccaccgattatttcgatcccatgattggcgaagagattgctgatctgattaagcccaataccaaagtggtgtttcttgaatcccccggctccatcacaatggaagtacaagatatccccgctattgtccgcgcagtgcgccaagtcaatccagatattgtcatcatgctcgataatacttgggcggcaggtgtgctgtttaaagcgctagaattcggcgtcgatatttcgattcaatcaggcaccaaatatattattggtcactcagacgcaatgttagggattgctgtggctaatgaacgttgttgggcgcaactgcgagaaaactcctatttgatggggcagatagccgatgccgatacggtctatatggccagtcgcggattgcgtactttagccattcgcttgaaacaacatgaaaaaagcagtattgaagtcgcacactggctgcaacaacgaaccgaagttgccgctgtctatcaccccgctctgccttcctgccccggtcacaataattttatccgtgatttcagtggcagtagcggcctgttctcttttcaattgaaaaagaagttaactccccaacaatttacggattatctggataattttcaccattttaaaatggcattctcatggggcggttttgaatctctgatcctaggctatcaaccagaagagataaaaatgatgcgtcaatacgatatttcacaaaggacaggcactctgttccgcctgcatgtcgggctggaaaatgttcaagatttgattgatgacctcgcagagggatttggtcgaatttcgacttga

SEQ ID NO: 9866 - DNA, 1035 bp, Photorhabdus luminescens
atgacgaaaagtaattcactgctaaataacaaggtttatagcaaagggagtaaaggccaactgatgcgaaatttgactgcttcaataatattagcgttcgggctgacaggttcagcattggctgatacagcaccagcatctgcaacagataacaataccacgtcaaaaaccgtacaaattgcagggtctactcccgcgactactcaggcaacgacggacacaactgcaccatctgcaaatcagattgcaccgcaagcggtacctacgacagaatccactcaagttacgccggttgcaacggatgaggttgcacctaaaattcctgctgatgaagccaatctttccagtggctttgcgactgatctgtccatttggggcatgtatcagaacgccgatattgtggttaagaccgttatgattggtctggtgattgcttctgttattacttgggctctgttcttctcaaaaggcactgaactgttggcatctggtcgtcgtttgcgtaaagagcgattagctttaacggacgttaagagccttgatcaggctgcggaaattgccgaaggtttcaacaaacacagtatcagccgcttattgctgagtgaagtacaggcagaacgtcagttatcttctgagagcactgacctgaatagcacgaaagaacgtgccgctttccgcctggaacgttccgttgcggctatcagccgtcatatggggcgtggcaatggctatctggcaaccattggggcgatttctcctttcgttggtctgtttggtacggtgtggggcatcatgaatagctttatcggtattgctcactcacagacaactaaccttgcggttgtggcaccgggtattgcggaggccctgttagcgacagcactgggtctggtcgcagcgatccctgccgttgtgatatataacatcttcgcccgtatgatcgttgcttaccgtggtcaggttggtgacatggcggcacagtcaatattactgcttggccgtgatctggatttagcaaatagcaagacaaggtga

SEQ ID NO: 9867 - DNA, 426 bp, Photorhabdus luminescens
atggcaatacgtcttaatgaagatctggatgatagtggcgaattgcatgaaattaacgtcacaccatttattgacgtgatgttggtgctgttgattatcttcatggtagcagcaccactggcaaccgttgatattaaagtggatttacctgcttcgtcggcaaaaccacagccgcgtccagaaaaaccggtattcttgacggttaaagctgatcgccagctttatgtcggagatcaaccggtcgattatgatactttggcggcggtattggatcagaccacccaatctaataaagagacaaccatcttctttcaagcggataaaactgtggattatgaaacactgatgagtgtgatggattctttgcgtaaatcgggctatctgaaagtgggcttggtagggatggaagcggtttcatcaggttaa

SEQ ID NO: 9868 - DNA, 1116 bp, Photorhabdus luminescens
gtgttcaatggttctaatttgcgattagctcgtctgtatcacgagctatctcttgagcaagtggctgagcgggttaataaaacccgccaatatattcagcggctggaatccggctttgctgtgccaactaatgaactttctaatgaattagcgactgtattgcaggttactcctgcgttctttgaaacccaaatacaatctcctgtgaacgaagaaattgttcatttccgtaaacgcagcgcaattagagtagcaacaaaattagcagcacttgcaaaggctgagttatacagacgattaatcgtcgtttttgaggaaaatctaaatttaccgtcagtgttatttcctgaattaaaagcaaactccccggaagaagttgaacgagcagcagaaaaatgtcggattgattggggattagggtttgggccaattgaaaatgtaactcgcctggctgaaaagctaggtgcatttgttacctcgtttgactcagtatctgatgatgttgacgcgttatccgttccattagatcgacctttcattgtcagaaatacagccaagaagtcaccatgccgacaacggtttgatattgcacatgaaattggacatattgtgttacacggcggaatatctactggtgacagaataaccgaatctcaagccaaccaatttgcctctgccctacttttaccacgaagtgcgatggctaaatatttccctgccccgataagcggaagaatcaactggcgaggtctaagtgagttcaagttaacttggaaagtaagtaaagcagcaattatttatcgggcacatcagctttcccttttaaccgatacgcaatacaaaacggcttttttggggcttaaacgtaagggagaagctattgaggaaaaagaggattatcttattccccatgaaaaacctgaattatttcatcgggcaataaaagtgcttattaatgatgtttgtattgatattgaaacattagctgagcgtctgaaaattacagtgccaatgctgcttgaactcgctaacgatagttcactttatgagcttaatgatcaggcaaattctgtaaatgtcatttcgatgttttcatatcgatccagaatagcgtga

SEQ ID NO: 9869 - DNA, 600 bp, Photorhabdus luminescens
atgccaaacatccgctacccttgggaattccatccacagttaagtgaagaacgtttaagtatcattgcaaaagaactactcaatgtgcttgatcatacctatgagcagctttcgacaccattagatgataattacacccgaggaacctgtacatttggccgccaaaggcaatgtcttattcagctctgtatgaaaggtacttatgattggctaaaactcactaatcctaatatggatacgaccatcgaaatagaaacaatcccacttcgtttttttactgatgacccagaaaaccccaaaaaatcaggcttctttcgccgtaacagtgtagaccaactctgggcaccagaaatcacgataccaacaatatggcgctttattgtagaaaaaccccagtttgaaggcgaaggtgcgcaagttcattttgctggttacaacgagcatgaagaaatgttgtctcaatggacttacgataacagcaaaatatctactctgcattctacagataacacaccgccatctgcggtaacaatcgaattggatcctatcagtgctgcgatgcctgataaatccagagaaaacaagcgcaacaacaagtag

SEQ ID NO: 9870 - DNA, 1239 bp, Photorhabdus luminescens
gtgccagaattatttcatcataattccggccaaatgctgagcattcccatgtcaaatacagcaattaaaccaaatcctatttcttctatttctctcattttgttatctactgcttgtggttttgctgtagcgaatatttattataaccaaccattattgccaacaattgggacaagttttaacgttaatggttcaatatccggctggatcgcgacactaactcagattggctatgcggcggggcttctcttttttgggccgcttggagatacgataagccgtcgcaaactgattttctgcctgttaatcggcaatataatcagccttattttatgtgccacagcaccaaattttacatgtcttctgacaagtagcctgattgtggggataacttctatttcagcacaaatcattattcctgccgtatctggttgggtaataccagaaaagcgtggccaagcggtaggcagtctgatgagtggccttttcgccggagcactacttgccagggcattaagtggtgcagtcggagagtatttcggctggcgtgaaatgtttatattggccgctttaatcgatatctgcctattttttctgatctggtttgtgttgccagaaatagaaacaccacacacgatgacttacggccaacttcttatttcactcggtaaattggtaaagcaacaaccccttttgcgtgaagctgcattatccggttttttactgttcgccgcttttaatacgctgtgggggtcgctggccttattactttcccaaccaccttacggatgggggagtgatatcgcaggtctttttggtttgatgggtattgtgggaatgctagcttcacccataataggttcgttgacagatcgcttcggcgggagaacgattgttgccacaggcgctttattagtgacactggccttgtgcctaattagcggcacgagccacaatattctatttttattcgcgggtattattctgttagatcttggcagcagagcgggtttagtggcaaatcaaacacggttatatacattattacctgaggctcgcagccgactaaataccgtatttatgacctgttatttcgctggcggcgcaataggttcctctttgggagctgtcgccgcttggcatttttcttggtatggtgtcgctttcagcggcggaggatgcgcattattagccgcgctatgggttctatttaatccaaatagccgcaagcaaatatga

SEQ ID NO: 9871 - DNA, 894 bp, Photorhabdus luminescens
atgaaagatttattacgtaccgatatgctaacaacattcattcatgttgcccgctcacggagtttttctgccgttgctcgtttgcaaggtatggctgcatcctctatcacacgtcagatagacaaccttgaacaggtgttagagacaaaactattctttcgctctacccgcggtttatcgctgacggatgcaggggagattttgtttgcaagggcgcaaggtattatcaatgatcttgtcgatatccaggctgaattagcggcgttgaatggcgagccgcaaggggtattacgtgtagcttgcctgccaacgtttggacgtcaacatattattccgatgctagcagaactattcacgcggtatcctaaaattcggattgaacttgatcaaaccgagcggttgactgatccggtcagggatcgtcttgatgtagttattcgtattggtgaattaaaggacagcacactttattccaaacgtatcgccacacaaacttggattatttgtgccagcccaggctatattcaaaggcatggaacaccgacaacacttactgaactggatgagcactatttgcttgataaacatcatgaccccgcgggtatttgctggtcacgctatcgtagtgttattaatttcagcgataataataggatctttcgtagtgatgactttgaaacattgagaatggccacagtgagtggatttggaatagcgcttctgcctaattgggtggtatccacagatattcgttctgaaaaacttattcctctatttgatgatccagatggacgtaaagaagatatttatttactacgagcacttgctcacccgccagcaaaattaaccgtatttatgtcgttattgcaaaagaggcttgccaagattatttag

SEQ ID NO: 9872 - DNA, 1749 bp, Photorhabdus luminescens
gtgactaaaattttttcattaaataaaaatcatcgagatttatcggcagggcatcactcattgcttaaagaggttaatggcttgaatggtgctcctaaatctttgatgccgggtttccctgatttagatgatcaatttaatcagatggaaattacccatatccggctgcatgatggttttggtattggggatatggataattatttccaagtggatagagtcaatgatcgaaatcaaattattgttaatgtcccagaggaaaataaacctgcggctaaaaaactgcttactgatatttcaaatatcagaagcatttttcccaatgcggctgccgggatgagaaataatgatattagtcttgcattaaaagaggctaattataaaatgactgatgcttatctgcgcgatattatgaataatcaagctgagctaaacccagataatattcagcgaaaaatcatgtttcgtattggacgtactggtgacggtggttatgaaataccagaagattttgatatttatgcaatattagtcagtacgttggtgaatcgctacgctttaaactatgccagaattggtttaccaagaaaaataacctattggcaggtttggaatgaacctgatttaatttttttctggaatagtaatgatcctcaaaaatattatgaattatatgccaaaattgcaagaataattaaagctattgacccggatgctaaagttggtggcgcgggtattgggtttgttgatagagcacaagaagattatcttgatgggtttttacgatattgtagagataataatgtaccattagatttcttttcctggcatgggtacgttgaaactggagacccacaaaacattattgatgtggggaataaagttcaaaaaggtttgcatacttatggttttaccggtacagaaagtttttgtactgaatggaattcttgtcctattgggacaaaaaatacatatacaaaagtgcaaggtattaaaaatgcggcatatattgcttccacttttatttatatgcaatatataaaagttgacagatcttattattatcgaggagatggttcatcttttggtttgtttaacaaccagcccaaccctgaaaatccaagtgttaaaaatttctgtacctattcagctcaatccttttacctgtttgccaaaatgttcgaaacaccttatattttaagtggtaataaggatttttccacaggtttaactgttttggctgccgagaataccgaaggaaataaaataaatattcttgccgcaaattataaagttgataagagccttgccgatggtaatgcggctcctgattatttatatcaacaatactatttggataccagccgaacactgaatcaattaacggatactgggagtaagaataaatggtttggcggtgttgatccgacaaccgttcgcgttgataacgcggtagtacaacatgaaccggttaagccatttccggataataatatgttgagagctaaaaatcgtgattataccgatagcgaccaaggtgttaccgtggtaattaatcatataggttataaaaaatttaaagttaaagcattccgtattcaagaaggtggatcgctggcacaaatgacaccaccggaagtaactgaccagattaatgtgtctatagctaataataaattaacgctagtggataagggagcgaagcctgagacagtagcattatattcgttagagttagaggataattaa

SEQ ID NO: 9873 - DNA, 1755 bp, Photorhabdus luminescens
atgactaaagttttttcatttaataaaaatcatcgggatttatcagcgggacataactcatgtcttaaaacggttaatggtgtcaatggtcttcctaaatctatagcgccaggttttcctgatttagataatgaatttaatcagatgggaattacccatgtccggctgcatgacggctttggtattggggatatagataattacttccaggtggataggaaaaacaatcaaaatcaaatgattgttaatgtgtctgaggaaaataaacccgcggctaaaaagcttgttgctgatattgcaaatgtcagaagtctctttcccaatgcggctctcggaatgagaaatcatgatgtgagtcttgcattaaaagatgccaattatgaaatgacggatgcttatctacgtgatgttctgaataatcaagcagatctgaatccagataatattcagcgacaacttctgtttcgtattgggcgttcacttgatggtggttatgaaatacccgaggattttgatatttatgcaatattagttaaaaccttggtgaatcgttatggtgtaaattatgccagcattgggttgccgagaaaaataagctactgggaaatttggaacgagcctgatttactgtttttctggaatacggatgatccacaaaagtattatcaattatatgaaaaagtagtgagattaattaagacggttgatcctgatgctaaagtgggtggtgcaggtatttcgtttagtaatcatgcaggagggcattatattgatggatttttccgatattgtcgggataatcatgtaccgttagatttcttttcttggcatggatacgttgatactggagacccgcaaaacattattgatatgggtaatacgattcagaaaagtttgcatacttatggctttactaagacagagagtatttgtactgagtggaactctagtccttttgggtcgagaaatacatttaccaaagtgcagagtcctaaaaacgcagcatatatcgcctcctcgttgatttatatgcaatataccaaagttgacctggcccattattatcggggtgatggtttatcttttggtttgtttaatgatcagcctaatcctaaaaacccaagcgttagaaatttctgtacctattcagctcaatcttttggtctttttgctaaaatattaaaaacaccttatatattaagtggtcaaaaagatttttcaaccggcttaacggttttggcggctgaaaataaatcgggtaataaaattaatattcttgcagcaaattataaagtggataagagtttttctgatggtaatgtagcccccgttcctgcggatttatatcgacaatactatttggatactaaccggacattagatcaattaacggatacctgtagtaaaaatagatggtttggtggtgttgatccgacaaccattcaatctaataatgcggtagtgcaaaaagatccggtacaacaactgccactagattctcttttaagacctaaaactcgtgattatactcatagtgaccaaggcgttactgtggtgattgatcatataggttgtaagaaatttaaagttaaagcgtatcgtattcaacaaggcggatcgctggaaaaaataactccaccagaggtgactaaccagattaatgtgtctatagctaataataaattaacgttgatagataaaggcgcgaaaccttcaacggtaacgttgtattcgttagagctaattcatcattaa

SEQ ID NO: 9874 - DNA, 432 bp, Photorhabdus luminescens
atgggaacacgttatgaaaccgacgtggtagcttgggctaatgaacaagcagcgttactacgcagcggtaagctgagtcagatagatatagaaaacattgccgaggagatagaagacgtgggtaaaagtgaaaaacgcgagctagcaagtcggctggccgttctactggctcaccttatgaaatggcaatttcagccaggccgtcgcggctccagttggcaaagaaccatcaaagaacaacgaaaatctctatcgcgacgtactgataagacgccaagccttaagggatgtctggcagataaagagtggttagacgacgcatggtctgatgcagttgcaattgctgctaatgaaaccgggctggatgtttttcctgaatcctgtatctgggatatagagcagattttatcccaaggtttttatccagaataa

SEQ ID NO: 9875 - DNA, 921 bp, Photorhabdus luminescens
atggtcaataaagcaaatttcgcccaacttatagagttagcaatgcaggtaccaggacgttcccatatgcgaccggttattgagaaggaactgttgcattacgatattctttattgccttgatactaatggattacttgatcaactcactttccaaggaggaacctctctgcgcttgtgtcacggagctccacgttttagcgaagatctggacttttccggtggtgttaactttaatcgtaatcaattacaagccatgaaaaaatgtttggaacattacattggcaaacgttacggttttgaagtttcagttaaagaaccagccgatttaagaaacgagcctgaatatgctggccttaatatagataagtggcaggtctcaattgtcaccgcgcctgagcgcaaagatctccccaaacagagaatcaaaattgaaattgccaatatcccttcttattcacaggaaccgaaggcattaatgaccaactacaattttctacctgatggctacgccgatacgctggtattaaccaaatcattggatgaagtcatggcggataaactggtttctctggtcaatacacaacactatgtacggcaccgagatatctgggatttacgctggttaaaacagaaaggagctaccctgcgtatggattgggttaataacaagattatagattatcggattagtggctattcagacaaattagccaatattctgacacgcttgcctgcaattattaaaggtgatgctttccgtaacgaaatgcagcgctttatcccacaggatgtccaggaacgcactctgcacaaagaaaaattctttacatttttaactaccgaaatcgctgatatgctacaacgggtacaaaactcactaaacagttgctcaacatccgagaatgaattcaatatgtag

SEQ ID NO: 9876 - DNA, 570 bp, Photorhabdus luminescens
gtgaacattaaaactacaaatacataccctatggatagatctactgcacttaaacgttttattgactgggacaaaaaagggcgatacgtcttcacccttgccgatctcagaaaaatctttcccgaagatagccccaaaacacgccaagcgggcttaaatcgtctggttaaagaatcgatgctttcacgacctgtacgcggtgtttatctgtttaattttgctcataatcgcgatagttacgctattgaacatattgccaaagctctacgacgtggtgagtacaattacgttagccttgaatcagcattgagtgaatatggcgttatttcacagatcctgatcgataggctcaccgtgatgacaacaggccggaaaggtctttatcacactccactgggtactattgaattcactcataccaaacgccaacaagaagatatcttagcgagtatcacgcaagcaaaccgccctttgagactcgccaaacttgaatgtgcactacgtgatttaaagcgcgttggtcgcaacacccatttagtgaataaacaggagattacacatggtcaataa

SEQ ID NO: 9877 - DNA, 1161 bp, Photorhabdus luminescens
ttgaaagataacgggtatattgctctttcccccttactggcgataatatcaacctatttcagtgccaatgataacgttaaagctagtcacgataatcccattaatccaattaggtattcaatgaattcagctacaaaaggctaccaacctcctttctcaattacagctaaaatgatccaattagttgctgaaatcagtgagaacatcgggcggttaagcacagaacaggaacaaataaaagccctgcgattgaggcgtatcaatcggatacgcacaattcacggttcactggcaattgaaggtaacttacttgatgcaagccaaatcacagccattattgaaggaaagcgagttattgcaccgatcagtgaaatacaagaagcgcgtaacgctatcttggcttatgaaaagcttaaccattggcatttcacatcagagcaaaacttactggaagcccattatgttctgatgaagggattgctagataatgccggcagttatcgacacagcggcgtcggtgtaatggatggagaaaaagtcattcacatggctccacaggcaaaccggattccaaagctgatgggtgacctttttcactggttagactctactgatattcatccgcttattgccagttgcattttccattatgaatttgaatttattcatccatttgccgatggaaacggcagaatgggccggttatggcaaacattaatcttaaaccactggaaccctttatttgaatttattcccgttgaaagcctggtttatgaacatcaagctcattactatcaggcaattaatctcagtagccaacttgttgattgtgcaccgtttattgagtttatgctgcacatgatccgtgatgcaattctgacatccacccatcaggctacccatcaggctacccatcaggctacccatcaggctacccaacaagttaaacaactcattatggtattgaaaggggaaatgaaccgtgggcaactgcaatcagcacttggattaaaagatcgtaattcattccgtctgcgctatttgcaacccgctttggcagaaggattaattgaaatgagccatccagaaaaaccgagcagtccattacagcgctatcgtttgacggaaaaaggggtaaatttaaaaaatcaccacaaatag

SEQ ID NO: 9878 - DNA, 912 bp, Photorhabdus luminescens
atgttgtggttcaaaaatttaatgatttaccgtttaaaccgagaaacttcactttctgcggatgaactggaaaaacaattgagtccgttagcattcaccccatgtggtagtcaagatatggcgaaaacaggttgggtgccaccaatgggttcacacagtgacgccttcacccatgtcgcgaataatcaaattctgatttgcgcccgtaaagaagaaaagatgttaccttcaccggttatcaaacaagcactacaagcaaaaattgaaaaactggaaggagaacagcatcgcaaacttaaaaaaacagagaaagactctctaaaagatgaaatattgcataccctgctaccacgggcatttagccgattcagccaaacttatatttggatcgatatcgccaataatctgatcgttattgatgctgctagtgctaaacgggccgaagataatttagcattattgagaaaaagtctcggttctctacctgtagttcccctgacatttaaaaacccaatagaattaaccctgaccgaatgggtacgttccggtgctctgccaacaggttttgctttaatggatgaagctgaattaaaagctattctggaagaaggtggcgtgatccgttgtaaaaaacaagatttagtttctgatgaaatcgctactcatatagaagctggcaaatgtgtcactaaactggcgcttgattgggaagaacgtattcaatttatgttgtcagatgatggtactttcaagcgcataaaattcagtgatactctgcgtgaacaaaatgatgacattgatcgagaagattttgcccaacggtttgatgctgactttattctaatgaccggtgaattaagtgcgctgattaacagcaccattgaagcactaggtggcgaagcagaaaaataa

SEQ ID NO: 9879 - DNA, 2907 bp, Photorhabdus luminescens
atgaaatggtatgtcaaggaagccctcgcaattaatcaggctataccctacgaggaatcaatcaatatcgaagcgggtttcggacctacagggctgccacacataggaaccctttgtgaaatcctccgagccaatctcatcaaaaccgaattggagaaagcaggtagaacagttaatttttatctcatttcagatgatttggaccctttcagaaaagtgcctttgaatattccaaatgctgaacaattaacgccttatctaggccaaccgataagcaaggtgccagaccctttcggaaatttcacgtcattctctgaaatggcggagtatcaacttatgaagctcgccacagaatacgaaatagagtgtcagctagtcagaaactctttagcctatcaaaatggcgattacaatgacgaaatcaaactattcctacaaaattttttagtgctaaaccaaatatgcaaggaatctaccggatctttaagacaaagaacctacagtatgatcatgcccatttctgaaagaacgggtgccgtacttgaacatattatcgttacagacgtgaaccctgcatcaggcgaaataacctattacatacctggagatgaagtcattaataaacccggttatgaatatggcgtagaaattcgggaattctataaaaatgaaatattggaccaagagcaaactatttcggtactaaacggtaaatctaaacttcagtggaaagccgactggggtatgcgcctccttgccagaaacattcattttgaaatgcatggtgaagatttgctggcttctgccgatgttgctcgccagatcgcgggagcattagaccggccaattccacgtttttacaaatatgggcttttccttgatgattcaggtaaaaaaatatcaaaatcgaaaggaaatagtttctctttagatgatattcgccatctgctcacacgagacgcaattcgcacttacctctcaaaagagccacagagatcgtctaaattttatgtcgcgctggcaccacatctcaatgatcaagttaatatttcgcaaaaagatggaaaaagactatctttttcgaagatagcaagaatattacacgcatcaaaaccagcaagtaaactcgcggctgaaaattttctaaatcgctataaaaaaccgggagaatccatttcagatcaggaattggaaataagttatcattattatatcaggacatgtgaaaatgaaaatcaagggttacaaaacattaaagaagaaaaatatttctcagccattgccaactcaataaattcaggagaaatatccactaaagatcaacttttccaacatataatcactacatatgaagaccatttttcagatgataaatcatcccaaatatggcctctgctctaccgagggttatttggtgataccaaaggcccacgaattaaaacatggttagatttaaattgcatgcagcatattttaacccattttagccatccatataaaaacccacataaaaccccatataaaaacccatcccaaaaaaatgaggaaaatatcgttaacaacgaaattaacaaatctcaaaaagagagattactaaaaaatagcattgaggagaacaaaacatatatgactaagttatacagtaaaattaatttcaccgaaatcaggaaaaaatgtgatgaactttcttccgctttacagaagaatagtgaggcgttagtcgaagcactctctggctatcaatgtaaaaacgtcaccgaagatgaaattctccgttcaatagatgtcttgaataatattgagaacaacagagaatatttcaaaaagaaaatttatggtgtgacatcatttctcccgcttaaccaacccatttacgcttctgtatgttttggttttatcccttcacttatggcagaaaacgtgtgcatacgcccgccgacagcaatgcatacacattacaaaaaatttgaggcggttattaatttatccgaattttctccaacattatctatttcttatgaagataaagagttatttttaagtcaacgcgtaaaaataactgatgcagtaatctttacgggaacgccagagaatgcgctcaaagtacgtaaacatttcagaaaaaataccttatttattcttaatggcgccggtcataatccacttattatctcaaaagatgcagatattaatctggctgttgaaagtgcaaaacgcgttgttctttacaatcaagggcaggattgtgctggtccaaatgccatattagtacacaatgatatatacgatttattcaagcaacgattaatctctgatttgcagaatattgaggatagagttggtccttatagtgactataaaaatatagtcggtcccaatagcgatattgatcacagcataaaaattgcttcattatttaaagtcaatagaccctattgcacctatggaggagaagttaatcccatcaatggcatgataaaaccaacggttttcgagaaagaattatcattaggtggcaattataaagaattttttgcccctgtgttcttcttacaaagatattatcaggatcaagatttaatccattatttttccgatcctttgtattctgctaatgctatgtatatatctttgtttggtaccagtgactatatccatcatcaactcagcgaacgccttcacttacccgatagtattctgagtaatactgatttacatcgggaagaacacggttaccttccctatggtggtcaagggccggcggcttcatgcctttggtacgaaggtaataggattaatggcagtacgttgccacagcgtgatatataccattatttaattgaaccctttgatacccctcccacgccaaagagtgaaaaacgccactgcgttcaagcgggaatttaa

SEQ ID NO: 9880 - DNA, 1956 bp, Photorhabdus luminescens
atggttaacaatgtgttgaaagtctccacattaaccttattggtcgcatgtaatgtccatgctgcaacagttgatttgcgggtaatggaaacatctgatgttcacagtaatctgattgattttgattactttaaagataaacctacagaacaatttggtttggtacgcacagcgagtttagttaaagctgccaaagcagaagcctctaacaccattctggtcgataacggtgatttgattcaaggtagcccactggctgattacgtggccgcaaaaggtcttaaaaaaggggaatctcatccagcacatcagttaatgaatacaatgggttataccgtgggtaactttggtaaccacgagtttaactttggtttggattatctgaaaaaagccattgccggtgcgaagttcccttatatcaatgccaacatcatggatgcgaaaaccggtaagaactatttcaccccctatattattgttgatacgccagtaaaagaccgggagggtaaaaatcataccatcaagattggctatatcggttttgtaccgccacagattgttatctgggataaggtcaatctggatgggaaagttgtcgttaacgatatcactgaaaccgcgaaaaaatttgttcctcaaatgaaaaaagcgggggcagatttgattattgctattcctcattccggtttttccaaggagccttataaggcaatggctgagaactcggtttattacttgagtgaagttaaaggtattgatgcgattatgtttggtcactcacacggtgtgtttccaagcaaagaatttgccgatattaaaggcgttgatgttgccaaaggtacggttaacggtattccggctgttatgcccggccaatggggtgatcatttaggtgttgttgatatggttatcgacaacgagggtggggcctggaaagtgacggaagccaaagcggaagcgcgcccgatttatgacaaagtgaataaaaaggcactggttgagcgtgatagtgaattggcaaaaattattgggcaagctcatcagggaacgcggggttttgtcggtaaattgattggcaaagcgtctgccaatatgtatagctatttggctttgattcaaagtgacccgacagtgcagattgtgaatgatgcacaagccgattacacgcggcattttattcaaggtgatcccgatttagcggatattcctgttctggccgctgcggcaccattcaaagttggcgggcgtaaaaatgcacccgcagagtttgttgaagttgaaaaaggtgatttaacctttcgtaacgcagcagatttgtatctctattccaatacactggctgttgtgaaagtcaccggtgctgatgtgattgaatggttggagtgttcggccggcatgtataaccagattgatccaaattcaactcagccgcagtatctgttgaattggagcggcttccgtacttataacttcgacatgataagtggcgtgaattataagattgatctgactcaacctgctaaatacgacgttgattgccagatcatccatcaaggggcgaatcgtatcaaagagctgacttaccaaggtaaaccgatcgatcctcacgctaaatttctcattgctaccaataattaccgcgcctatggcggtaaatttgctggcacaggtgaagatcacatcgcattctcttcaccggatgagaaccgcgctattttggcggcttacattgtcaaaatgtctaaacagaaagggatagtaacgaccaaagcagagaataactggtcgattatgccaatcaaaactgacaagaaattggatatccgtttcgaaacgtctccaagtgagaaagcggcgaaattcatcaaagcattttctcaatatccagtgaaatatttggaaaatgatgagatcggttttgcggtgtatcaaattgatctgactgaaaaaaaataa

SEQ ID NO: 9881 - DNA, 819 bp, Photorhabdus luminescens
ttgtttaccatcaacagggaaataatttcccataaaggaatgaagatgcgtttttttaatttattatcagcaatattcgttttactgattgtgggttgtgcgaagcaaccagaagtgactgactcgttggcgtctctatcaacattggaagagggggcatcttgtatcttaccggctactccgccgaaagattatgactatgttgctaaaggtgatcgttatggtcagaacgcaaccgcatcgacagattacttcaaactggctattagttattctcctgcattttgtaagggcaaagcaaagaatattgagcgcctgaaaaagagtaacaaacttgctgaagcgcagcgtgaatatgaaaagtttgaattgcaatgtttctccgaaaacaaatttagttgggtgattcacggcttgtgggcgcaaacctgtgatagtaaatcaatggcgcagtgccgtgattggtctgatgtcagaaaacatccacgtctttgcaaaggggatttgccgccactggattatcaggtgattaaaccttatctgtgcgcttctccaggggcagatttgttacaaagtgagtgggaaaaacatggtgtttgcgcgtttacaacgccagatcagtttttcagtaaacagcaagaactgtttgatggattggtattgccgagtgatcgcccatctaatgagcagttaattaaattcctccagaaaaataacccatcgttaaagggaaaaaccattcagatcaatcgtgatgaattatacatttgctacagcaaaaatttcgacgtgattgattgtccaaagcgtgagttgtga

SEQ ID NO: 9882 - DNA, 606 bp, Photorhabdus luminescens
atgacaaatagaaatgttatctggttagtaaggcccgtaggctatcaggccattttgaaacgttgccctggctgtgaagtaaaaaaggagttttatccagccggcacttttagggttaatgcgcagaaaaaagtcttagatgtgtggagtatctataaatgtgagaaatgtgattacacctggaatattgatattttttccaggattcatgtcaacaaattggaaagcaatttgtatgaacggtttttgcataatgatcaagatgaaatacgacggtatgcatttgattaccgcgtattggcaaaaaatagagctgaactcggcactgctcctgactttatcatcgaaggtaaaaagcttcaggacatcgctcaaattccagcggcagagatcacaatacagcttgaatatcccattcctatcaggttgatctcaatcttgaccaaaaagctcgcattgtcacgtagtcgagtggagaagcttgttgggcaaggcgctattcagggggtaacggaaacggaattaaacaaaaagttgaaacgtgatatcactcttagcgttaacgttaacaatttattgcaagaatatgataattatggcgtctaa

SEQ ID NO: 9883 - DNA, 1524 bp, Photorhabdus luminescens
atgaatgaaatgaatacgataaaaaaatggtgggtgctcactgctgtttcagtcgcgttatcgctggttgctatcgatatgaccgtgttatataccgcgttaccgagtctgacccacagtttgggggcgaatacaacggaaaagttatggatagtgaatatctatcctcttgtcgtctctgggttgttgctaggcgcgggtaccttgggagatcgcatcgggcataaacggttgtttgtttatggtctcatcatctttggcttctcatccttgatagcggcctactcctattcgccagaaatgttggtggtttctcgggcattattaggggttggggcggcaatcatgatgcctgccacactgtcgattatcgctttgacattcgaagatgaagatgagaaatcatttgccattgggatttggacagcggttgcttctggcggcgcggcaataggtcccctgattggcggtgtattgcttgaatatttttggtggggatcagtgtttctgatcaacgttcctctggtgattttgacactcattctgtcgtggttgtttgtcccaacagcgaaaacagattcgtctcacccgtgggatcttattggctcattgcagatcatggttgtcttgataagcttcgcctatgccatcaaagaatttgccaaacgggagccttcttatatcggaatattgataacttccactctgacgataggttttctgacgttgttcattcgacggcaaaaacgcagtgtgcatccgttgattgattttgacctgttcaaaagcccggccttctcatctgcggttatcgccgggctggtggcttccgcctgtttgatgggccttaatctggtgttaagccagcgtttgcaactggtattatcattaacgcctttgcaatccgggctctattttctgccattctcattgggtgcgattgttgcaagtcctgtgagtggttgggttcttcctcgcttagggagtgcacgcttccttataacctcgttgttgatgtatgccattgccatactggcgctcatggcgagtttttcagcgccgctacctttgcagatagtttgcttttttgcgctcgggacatgtcttggagcaacaatgactgcggcatccagtactatcatgcaggcagcaccgcctaatcgggcagggatggcggcgtccgttgaagaagtttcctatgaattgggtgggggattgggcattgcgatcatgggtagcattatgtcatttatctatagctatttcattgaaattccagtggattctcctatctacgatgtggctaaagatggtattgatggcgcattgattgcggcaaaagagatggctccggatgcggggcaggctttggtcagccttgctaagtcagcgtttgacgatgctgttttttctgtgatgggtgctgcgtccctgtttcttctgatgatggcggcgttggtgtggttcaatttccgccgctcctcactgagtaatacatctcatgctgcgattcatcgtcagtga

SEQ ID NO: 9884 - DNA, 588 bp, Photorhabdus luminescens
atgcgtgttcaattagggcaattatatgatttgcgatattcgctgagcgttgatcagttgtgtgtcggtgaagtattaatgcccttggagcgattggcaccggcacatcttaaggtagcgattgaatatctattgcataagtattctgttctgagagcacggtttgttggtagcgggatgaatatgaagatggatttcgtgccgcctagccgtgaattattgcatcaggtttttgaagttagagagcaaaccgatagtccatgtgatcgccgacgcttaatatcaaactacattgctgaggttagggctgccatgaatttggcaaatccgccgttattgcgttattgcttgtttgatggcaattgtgcccgtgatcaaagattggtattgatattcaatcatctggtctgtgacggtatttccagcagaatcttatggcgagatctttcaaaggcatacagaatgtcagtgaatggtcagccccttgcgcttgaaaatgccacaaattatgagcaattttgtgctgaattgtatgaacaacatcggcaaatcgtaaaaggcgctagcggctgtttttgggaagggtag

SEQ ID NO: 9885 - DNA, 183 bp, Photorhabdus luminescens
ttgtggggtattgggaaacccgatgaagatgcgcaagagataccattgagcatggatatagagatctatgccgatacgatggaggtcactatttcttccaggccagattgtcatctacagattttaccacctcgtttgatggaactttggttggaaatgatcggagaatctggaattgattga

SEQ ID NO: 9886 - DNA, 1854 bp, Photorhabdus luminescens
atgtataaagattgcccacagattggtgatgaagaattgctgtccatgcagcaaagcgctttatggttcattgacaatgatacccctggcgattccaaatataatatttccatggcattccgtattcacggatcgtttcaaatcgatgcttttcgctatgcggctaaccagctcgttgccaagaatgccaccttgagaagcactttcgttaatgtgaatggcgaaccaaagttggtcattaatgaacacttgccgccggcattggaggttttcgatgcaacgaacttgagccagaaggcgcttgaagatgccgttcagagctttcattccatcccttttcaattagaaaaattgtcgtgtctgcgtttcggtatctacgttgtcagcgcggaagaatacgttttacatatgtgtgttcaccatattgtgtcggattttacttcactggggctgatgttggatcaacttgaacactattatctggctggacttggcgaagatgacgattcctggttaccgcccgctgaggattttaaggattatgctgtcaaagaacggaagtattaccaaagtgaagcggcggaggaatcgaaagcttattggagtgaatgtttaaagcagccgccagacgtattgcaatgggatagtttttggcgcaaaggcgctaatgacaagtcatccgttctgtttagtattggtgaagagacaaccaaaaaaatcaagcggcttgcttcaaaaataggtggatcggtctttacagtcatgttggccgcatggagtgcttacatcgccagagagacaaaaactgctgatatcgttatgggggtgccggtgtcgatgcgtcactcggttcatcggcacattatcggctgtttgtttaatgtattacccatacgtttatccgtcgatcagacatttcaccactttctattagcagcgaaggagcgattgttatcggcccttgataatcgaaatttttgtctcagccaaatggtcgaacacctggctgcggaacgaaatgatggtcgtaacccattgtttcaggcaatggtgaatatgctagggcatgtagagcagtcgcgttgggtggcgctggagatggctggcgattctgttcaggtatcatgggcgggacggactatttccccattcagggtttgtcagcaggaaggccagattgatattgaactgctatttgtggatgccggttcccacttaagatgtgagtttaaagcggataaacattttttctcacattcaggtcttcagatatttgcagagcgctttgagctggtggttgaagcgcttgtcacagcgcctgatgaacagttgactactcagtgtttcactgctgatccctatattcatcatagacgtatgtataaaaccggtgatttagcctattgggatggggaacgaattcatttttgtggccgtgtagatgaccaagtaaaagtctctggttctcgaattgagattgctgagattgaggattgcctcaatcgtcatcatgctattgcggacgccgctgttatcgttgaatcttacgaaggactcgatcgtttagtcgcaatattcgtccctgtcaataaggataaccttcccgaagagtccgctattcgtgatcatctcaaggcttatctccccatctacatgttgcccagtaggatgatgctggcggatgaattgccgcgtaatgctcacaacaaaattgatagaagagcattaaacggcttgattgaagcggggcaattgacagatatcagttcgttgagacccgcgcctatgttacctgtcgattcgcgtttgccggatattgatctgttcgacagtggtgacccctcaattgagtaa

SEQ ID NO: 9887 - DNA, 135 bp, Photorhabdus luminescens
ctgcaagagatgtatatttcgcctgcctctgtctggcaggccgggggaagtatcaattgggatattttttaccagagcgaatatcgtaaatggctcccgctgccaacttatccatttgaaagaacggcaatctga

SEQ ID NO: 9888 - DNA, 1743 bp, Photorhabdus luminescens
atgagtaatattgaaattattcagagagaaataatcactatttttgcagagacatttggtttatcgaaagaagagataaaactagaaataccgctggttgaattgggggcggaatcactcttgttattcgaagcattagagcccatccataaacaatttggtgtaaaactttcagtgcggcaatttttcgcagaattacaaacagttcgtcaactcagtgaatatatcttgatggtgggtaaaaacagggttgtggaagataaccattcggttactcaacccgtcttgtctgatcaggaaaaaaggtctgaacaatccgatacgtcagatattccaccgattaataaagaacgctttttccaatggatgttgagaagtgcaccatcgattgaatctgaggagagaaaaaagtatctggcttcatttatatctgaatataacgagcgaacgattaaatcaaaaattcattcggtagcggtacgtaaaaatattgccgatagccgttctggaattggctttaaactctcgataaaagagctactttacccgattgtctgcaccaaatttgccggacctgttgtcaaggatattgatggtaatgattacattgatatgacgatggggtttggtgcgcatttgtttggccatagcccaccctttgtagttaaagcgctcactcaacaaatagacaacagttttggtttgggaactcggcatgagataggcttagaggtggctgaacttatcaaagagattaccggcatggatcgcgttgctttcgtcaatagtggaacagaagcggtgatgaatgcggttcgggcagcacgggcgctcactcgccgtaatcatattgtgctcttttctagcagttaccacgggcattgggatgccgtactggctagagcgggtgactatgatgaagctaatgcgacaaaacccgtttcggtgggcatacctgaaaatatggttgctgatgtttcggtgtttgggtttggttccaatgaggcaattgagtttctcaaaaccaatagaactgatatcgctgcggtgctggtagaacctgtaccaacgcgtgacccaggattgagcaatccagattatttgcgacatttgcgtcgagtgaccagggagttagatattctgctgatatttgacgaaatcgtgacaggtttcagatctcatccagcgggtatccaggggttattcggtattgaggcagatattgtgatctatggcaaaacgatagggggtgggatgccactgggcgtcattacgggtaggaagaagatgcttgattcgattgacggtggaaactggaatttcaacgatgatagtttccccgcagcggagccgacattctttggtgggacctattttcaacatccgctttgcatgactgctgcgaaagccactttgcaagagatcaagaggagaggggaaacttttaccaaggtactgactcagcgtactgaatcgtttgtttcacgtttgaaccaactgttcttaagccgtcgggttcctatcgaggcaagatcattttcctcattttttagattaatgcatcgcgacaacatggatttgctttactacaacctattgatgagaggggtttatatttgggaatggcgttgctggtttatctctgatgcgcatgatgacactcatctggaaaaagtttatttggcatttgtggatagtttggatgaacttgaggaaaacaacctgcttcctcgatatagctag

SEQ ID NO: 9889 - DNA, 489 bp, Photorhabdus luminescens
atgccgttggcaaataaaagtgttttcgttggtgggccgattcaatttgcaatttgtgataacggttttcatgaggagttgagaacgactatccaactggcgattaagacggtgaaggcattgaatggtaatgtattttcggcgcatttgactgagaaatttggcattgatacacctagttatacgccagatatggtatcgaaacgggatttccaatggatgcagcagtgtgattttttcatgccgattcttccggttcatcaaggtgatgaattactgcgtactgacggtacacatattgaacttggttgggcctctgctctgaaacggcccgtcttgttgatcactcaactaccgattgtgaatggtggtagtcatttgttaaagggattagagcatatttgcaacgtgtcgaaattggatattcacgatttccgtcaaaatccgggacagattggcgagattttcaggaattttgcagttgagtag

SEQ ID NO: 9890 - DNA, 870 bp, Photorhabdus luminescens
atggaaaatcgagttattgaaccaacctatgatgttttaggaatgaagataaaaaacccaattattgttgggtcgggtctgctttctgatcaagctaaaaatattcgccagtttatcgctcacggcgcaggggcggttgtgacaaaaacgatttatccgcgctcggaaaaattgcatacagaaaagacctatttattcagtacagggatgctgaacaatacgacatattcgaagaaaaccgttgaatattggttaacacttctccgtgaatttaaggaagaacaacttccggtgatcgtttctatccatgcggaatcacctgaggcgttagcttcattggctgttcgtatttcggcagtgaccgatgcccctttggagttaggcatttcatgcttgcatgcggacgacttcacggaagatacaccagaacgagtattcaactacactaaagtggtgaaggagcgaacgaacaccccttttgcggtcaaactctcgcttggcgataatttgtatgggcgtgttcaagctgcggtagaagggggggctgatgcgataactttgagcgataccatttcaggaattgcattcgacacagcgaatggtgaagcgctgcttaatggggtttgcggatactctgggccggggattaaaccaatggtgcttgccgctatttataacctgcgtaagcgaggggtgacgattccaatacttgggtcgggaggcgtacaggatggtaatgatgttcatgaatacctactggcaggggcgaatacggtgcaggtttataccgcgcttcatcggcatatgtataaaacattgcagcgcattgttcatgaatatacgcaagtcatgacgtcagaaaaaggatga

SEQ ID NO: 9891 - DNA, 771 bp, Photorhabdus luminescens
atgaggaaaagggataacatcatgaataataaaaaaattagagagtttgcggaactgaccagtgagcaggttttaaccgcagttgaaggtaagacattgatatggccgattggcgggattgaacagcatgggcctcatctgccgttgaatgtggattccgtgatcccagaagcctttgcccgcgtgttggcggaggatattaatggtttcaccttaccggtacagccggtgtctgccagatcattgccacagagtggtggagggcttgaatttcccggcacagtttacctggatggatcaacatttaccgcttatatcagccgaaccattaagagcttgtgttcactaccctttaagcaactggtgatcattaatggtcattttgagaatgaaggttttattttcgaagcagtagatgcattacgggcagaagggcattttaacgatcgttccgttatcgtatttagctggtggagtttggtatctgatgattggactcgtgaacatttagttgattttcccggttggcatgctgagcatgcagggttaacagaaacgagtttaatgttgcatttacgcccggatttagtgagagcggagcgacctgatcacgataaacctccacgtgcagggatctatcaagtaccgattaaaaaagaattttcaacgagaggcgttctttctaaaacatccggttcgagtgcggagattggcgaactcattttcgagcatgtcaggcagcaaatactggaactggttactgcggattaa

SEQ ID NO: 9892 - DNA, 915 bp, Photorhabdus luminescens
gtggcaaagaaagaaaaacggcctcaccatgatgtattattcaaatattttttaacgcagcctgaaacggctagggaattcttatacctttatctgccggaagaggtccagtcgttgtgtgacttagccacattgaaactggaacccggcagttttgtggaccggcatttacgtcaactgcacagtgatgtgctgtactcggttgaaacagctcggggacaaggttatatctattgcctgattgagcatcagtccactcctgacccgttgatggcctggcggttgatgggttatgccatgtcagctatggcggcccacctgaaaaaaggtcatactgaactccctttggtggtgcctttgctgttttatcatggtgaggttcgtccttatccttactcaaaccggtggctggattgttttacgttccctgaacaggctgcccgcttatactgccaggagtttccgttggtggacgtcagtgtgctcagcgatgaagagatcctgacacataaaggggtagccctgatggaactggtgcaaaaacatattcgctgccgggatatgctggaatgggtccctcaattggtgaaacttttgaatgcggggtataatacaactgagcagcgcaatgtggtgttacgctatattttactgaatggacatacgccggatctctcacaatttgtccatcaactgattgaacaatctccggagcatgaaacgatgttgatgactattgcagaacagcttgaacaaaaagggcgcgaacaaggccgagttgaaggccgagttgaaggtagagaagaaggtaaactggaaacggcttgtgccttgttacggcatggcgtgagtttggacattattgtcaccagtactggtttgagccgggataaaattgaagcgttaaagcattaa

SEQ ID NO: 9893 - DNA, 297 bp, Photorhabdus luminescens
atgccgatgttcaagatcggcatttttgttcttattcaggatgatggctatacgagggacttttacgtttgcccggcgaagctgaaaccggtcatactcaagcaactttatagaggacgaaatgacaccctaataacatggggagcgcgattaggtgagttgtttgtggaaacaaatactcgttctgttgtagtagttattattcctattgcatattccttattacctgtgaaattaatccatagggtatatgttggcaagagcaagtcacgcagtacattcaaaaccagcaagtaa

SEQ ID NO: 9894 - DNA, 3687 bp, Photorhabdus luminescens
atgaaaattttgagtttacggctaaaaaacattaattcattacaaggtgaatggaaaattgatttcacagcagagccgtttgccagcagtggtttgttcgccataaccggcccgaccggtgcgggtaaaaccaccttattggatgcgatctgccttgcgctttatcacgaaaccccacgcttgacgatttctacctcacaaaatgagctgatgacccgacacactgcggaatcattggctgaagtagagtttgaagtgaaaggtgtcgcttaccgtgctttctggagccaacggcgagcgcgtaatcaacccaatggcaacctgcaagcccctaaagtggaactcgcccttagcagcagtggtaaaattctggccgataaaatccaagataagaaagaaaaaatcattgaaattactggattagattacggccgtttcaccaaatccatattgctatcccaaggagatttcgcggctttcctcaatgctcagccaaacgaacgggctgatttattggaagagttaaccggcactgaaatttacggaattttatcccaacaaatttaccaacaacataaacaagcacaatcagtgctggatattctgcaagccaaagcatctaccattgatttgctaacggcagagcagcatcaacaatatctggaacaacagcaacaactcacccatgcagaatcacaactcaatcagcagataaaaacagtgcaacattcggcgcaatggctgacacgtgaagaagaacttgagcaactcgtcactgaaaataacgctatcttacagcaggcagaaaaagcgcttactcatgcagagccgcaactgcaaaaactggctaacagtgaacccgcagaaacactgcgcccattgctggatgataaaaaccgaacacaatatgaacatcagagaaccagcaaacagttggaagagatgcatcagcaacttcaacaactgcaacagacgctcacaccgatacagcaaaaggtggctcatgcagattctgccagagcagagtatcaacagcaccggcaacaacaagaaaagctgataacagaacaggtgattccattagatcatcaaattgcggtacagattaaagagctcaatcttactcagcaacaaatcaacgaacagaaaacggtgcttgaaaaccgttgtcaacaatatgacacagcaaatcagcgcgccttatcattcaccaatcaaagaaaacaactggaaaactatttcgaacaacaaccttatcatcaatatttcggtgaaaaactggctttttggcaacaccaattctcgtggcggcaagaacatcaacaacaaattgaccaccaaacacaaaaagtaggcaagctcactgccgaaatcacgcaacttagcaataacctgaacaaacaaggggaagacttaaaacaacaaattgaaaataaccaaccgctggaactggcatttgaacaggccaagcaacaattttttactctgcaaaaacaatattcgccagagaaattaaaaaaacaattaactcaatatcaggaacagctaccgctgcaacataaactggagatcctgtcgccacaaatcttacaattacaagccgctattgccagtcatcatattcgcttacaacaaccggaaaaattattaaaagaatttcctgttcaaattgaatccatcgataaacaactctcagacaaacagcaacatttatccgatcttactcaacgtattcagttagaacaaaagattgtcagtctggaaaaagagcgggcacagctcaaggaaggttctccttgcccactatgcggtgctgaacatcatcctgcaattcaggcttatcaaaatattgaactgccaaaatcagaacaacggttaaaagatttacgccagcaatttgaagcgctgcaagccaccaaaatatcattggttaataaaaaagagttccaacagcaagaatacgaccatattttacaagaaattactgatgctgaaccacgattgaatatattaacgcaacaatggcaggaaacttgcgcaatattacagaccgaaatttctctttcagataaacccgctcttgaactatttgtgcaacaaaaccaatcggctcatcggctttgccaaactcaattaaccgaatttgaactggcagaaaaaacgtaccagaaaacagaaaaaacagtgaccgctcatcaagaatacgttaaagaaattgaacgaaatattgaactgagtaagcatcaacacaatatactgaaaaaacagttatctgaattgcaaccagagatacaacaacagcagcataaactaactgatgtcatcgaaaaaatgacgtcagaattacagcaatataatttatccctgccaatgctgaatgatactgaaaactggctgcaacaacgtagagaagagtggcagatataccaaaactgtcatgaaaactggcaacagatccaaaaagaagaagcggtcattcaaaatcaaattgaatcattgcataaacagaaagaagaatatctctcccatctaaataggcttaatcaaacagctcaacaacagaaacagcaactcgcagagacacaacaacagcgccaacaactatttggtgaacaatccgttacggaaatcactcaggcattacaacaacaatctcaaaagcttgaggaaatgcacaaacaagcattgtcacatctgcaacaagcgcaatccagcatcaaccaactgaccggtgccattcatgagacagaaaaaaacgataaccagtctgagcaacaaaaacagcaggcagaacagaatttcaatgctgcattagcaaaaagcccatttgccgatcagcacgccgttgaatcagcgctgttatcgcaagagcaacgtaaagaattgcgacaacttaaagaacagcttgaacaacagcagatacaagccaacgccctatgccagaaagcagcagaaaccctgcaacaacatcggaaaaatcgccctgagttacttaatcaatatacaaaatcacaactgaccgaacagttggaaaacatgactgatgagctaaaaagaaacaccttacaacaaggagagctgaaaaacctgcttggtaatgatgcaatacgccgtcaacagcaaaaatccttattggaagagatcagccattgccgacaaaattatgatgactggagttatcttaataacctgattggttcggctgatggtgctaaattccgtcgctttgctcaaggattaacactggatcatttggttcatctcgccaatcaacggctgaaaaaattgcacggacgctacgatttgcaacgtaaaaacagtgatggtcttgaactacaagtggttgatacctggcaagccgatgctattcgtgataccaaaacgctttccggtggcgaaagttttctggtcagcctcgccctggctttagcactatctgatttagtcagcaataaaacctgtattgattcactgttcctggatgaaggctttggcacacttgatccagaaacccttgatattgctcttgatgcactggatcatttaaatgcttccggtaaaaccataggtgttatcagccacattgaagctatgaaagaacggatacctgtacagattaaggttaaaaaaattaatgggcttgggataagtaaactctcacctgagtttcgttatgatcaacaatag

SEQ ID NO: 9895 - DNA, 1236 bp, Photorhabdus luminescens
atgcgtattattcacacttcggactggcatcttggccaatatttttttacaaaaagccgggctgctgaacatcaacattttctgcgctggctgattaaacagattgaacattatcaggtcgatgcattaattgttgccggagatatatttgacacgggttcaccacctagctatgcccgtgaactatataatcgctttgtcgttgaactacaaccgaccggttgtcagttaattagccttggtggtaaccatgattcagtagcaacattaaatgaatcaaaagaactcctttcctgcctgaataccaccgttattgctcacgcagaaaaagatcaacaaaaacagataaaaatactcaccaccaaacaaggcaatgccggtgcaattctttgtgcagtcccttttctgcggccaagagatattatgatcagccaggctggtcagtcaggagaacaaaaacagctcgtattacaagaagctattgcagaacattatcatcgactctatcagcaagcgtgtgaattacgtgatgaattgaatttacccttacctatcattgctaccgggcatctgacgaccgttggcgccactgttacagattcggtgcgggatatttatattggtacattggatgccttcccggcgcaagctttcccgccggtagactatattgcgcttgggcatattcaccggccacaaatagtggctaaatctgaacatattcgctacagcggttcccctattcctcttagtttcgatgaagtcgggcaagagaaaagtgtctgtttggtggaatttacccaagacaaactggaatccatcaagcttttacccattccgcaatatcagcccatgcaactcatcaagggcaacctgcaacacattgaacaacagttgcaaacttttaatgactatcaaggagagcaacccgtctggctggatattgaagttgcaacccaagattacctccatgatatccagaaaaggattcgatcaatggttgccgagcttcctgtcgaaatcattctgctacgacgtagtaaaacacaacaacaaaataggctagcacaagaaaacagggaaactctgacagaacttagcgttaacgaggtttttgcccgacggcttgcacaatcagcactcgaagatgaagaacataaaaaacgtctgaccacccttttcgaacaaacactgaacgatatctatcaggctaaaaacaaggaggagcaggcatga

SEQ ID NO: 9896 - DNA, 690 bp, Photorhabdus luminescens
atggcaagacgcattctggtagttgaagatgaagctccgattcgtgagatggtctgttttgttctggaaaaaaacgggtatcagccggtagaagcagaggattatgattctgcgttggcatgtttatctgaaccctatcctgatttagtgttattggattggatgctccccggtggttctggtttgcagataattaagcagatgaaacggaataataatattcgcgatattccggtgatgatgttgactgcccgtggtgaagaggaagatcgggtgcgtggcctcgaagttggggcagatgactatatcactaagcctttctctcctaaagagctggttgccagagttaaagcggtattacggcgtatttcaccgatggtcatggaagatatcatcgaaatggatggtttagttttggattcaacgtcccatcgggtgaccagccgggataaagcactggatatggggccgacggaatttaaattactgcacttctttatgactcaccctgagcgagtctatagccgtgaacagttgcttaattatgtttggggagcaaatgtttatgttgaagatagaactgttgatgttcatattcgccgtttacgtaaagtattagagattggcggccatgataaaatggtgcagaccgttcgtggtacgggctatcgtttttctacccgttactaa

SEQ ID NO: 9897 - DNA, 1341 bp, Photorhabdus luminescens
gtgttagaacgtctatcttggaaaaaactggtttcagaactgtttctcttttgtttgcctgcgttaattctggcgatatttattggtcatttgtcctggtgtttattggtttcggtatttttggtgctgatatggcatggttataacttgctgaaactttcgaattggctatggttggatcgcagtatgttgccaccgtcggggagaggagggtgggagccaattttctatggtattcaccagatgcagcaacggaatcgaaagcggcgtcgtgagctggcgctgttgatcaaacggtttcgtagcggggcggaatcattacccgatgctattgtgatgatgacaacggaaggtaatattttctggtgtaaccgtttagcgcaacatttacttggttttcgttggcctgaagacaatggacagcatatttttaatttacttcgctaccctgattttagccgatatatcctttccagagatttttcgcgccctttatccattgaattaaataatgggttcgttgttgagttccgggtgatgccttattctgaggggcagttcttaatggttgccagagatgtgactcagaagcgaacactggaaaatgcccgtcgtgacttttttgctaatgttagtcatgaaatgcgtacccctctaaccgtcttgcagggttatttggaagtgatgcaggatcaggcagcagaggatagttcgctaaataagaaagcgctgaatacgatgcaggaacaaacccggaggctggacggtttggtgaaacaattgttgcaactgtccaaaattgaagtcgctccccaaattgatatgaatgaagtcgttgatgtgcctttgatgcttaaagtattgcgtcaggaagcgattgcgctaggtaatgaatgttataagattaattttgatattggtgaagatctaaaagtattcggtaatgaagagcagcttcgcagtgcaatgtcgaatttggtttataacgcggttaaccatactcctaaagggactcaaattgatgtcagttggaaaaagaattcccacggtgctgaatttacagtgaaagataatgggcaaggtatcagtgctgaacatctacctcgtttgaccgaacgtttttatcgagtagataaagcgcgttccagacaaactggaggaagtggtcttggtcttgcgattgttaaacatgccttacatcatcaccattctcatcttaaagtttccagcgaaataggcaaagggacgatctttagttttacttttccggccggattgattgtacctgtcaaaataaccagcagaagagataggaatagtttgattaacagtaataattaa

SEQ ID NO: 9898 - DNA, 1332 bp, Photorhabdus luminescens
atgacacatcgtttatcatctaaggatatttgggcattagggtttatgacttttgctctgtttgtcggggcgggaaatattatttttccccctatggtggggttacaatcaggtgaatatgtttggttagcagcactaggctttctagcgactgcggttggtttacccgtcattacaatcatcgcattggcaaaagttggcggtggtattgaagagctgagttcacctattggtcgagttgctggtttgctgctggcgacagtttgttatttggctgttggtcctttattcgctatcccacggaccgcaacggtctcttttgaggtaggcatcgccccgcttaccagtaccagcgagttatccctgtttatctacagtcttatttattttgttctggtaattgctgtttccctttacccaggccgtttgcttgatactgtcgggcatgtgttagcacccatcaagatgttggcgttaggtatacttggtgttgctgctttactttggccagccggtgattcaattcccgcgattgatgtttatcagcaaatcccattctccagtggtttcgtcaatggttatctgacaatggatacgctgggagcgatggtgtttgggattgttattgttaacgctgcgcgttcaagaggcgttgcctcatcttcattattaactcgttatgcaatgtgggcaggttttattgccggctttggtctgatactggtttatctttccctgttcaagttgggggctggcagtggatcgttagtgcctcatgcagaaaatggtgcggtcattttgcatgcctatgttcatcatacttttggtggtgttggcagtgttttcctggctgtgctgatttttgttgcctgtatggtgactgcggttggattaacttgtgcatgtgctgagtttttcagccgttatttgcccctgtcttatcgttcattggttctgatccttggaggattctccatgttgacttctaaccttggtttgagtcatttgattaagatttccataccggtactgacagctatttatccaccttgtatcgttctgattgtgttgagttttacgctgtgctggtggcacaattttactcgtattttggctccggtaatgttagttagtctgatatttggtattttggatgcgattaagtcatccgaagtattagtttatttgttaccaaactgggcaacgcgtttaccactggcggatcaaggattggcttggctagcaccatccctgttggttttagttgtggctggtatttatgaccgtgttttagggcgttcaggtacccgtgagactcaaatgcatcagtga

SEQ ID NO: 9899 - DNA, 1761 bp, Photorhabdus luminescens
atgttgaaaacatggaaaacaccgctggtaataatatccctgctcgtctcgtcccacctttatgccgcttcagaaccggctgttgaagccaaaaatggtatggtcgtttcatcccaacatcttgcttcacaagttggtgtggatatcctcaaaatgggtggaaatgcggttgatgcagcggttgctgttggctatgcccaagccgttgtcaatccatgttgtggcaatatcggtggtggtggctttatgacaattcatttaaccgacggtaccgatacttttattaacttccgcgaaaccgcgccaagtgcagcaagtgccgatatgtatctggataaagaagggaatgttattaaaggagccagtttatatggctaccgcgcggcgggtgtgcccggaaccgtgatggggttagacagcaccctaaaaaaatatggcaagttgagccgtgaacaagtcatggcccctgcaattaagctggcacgagaaggctttatactggcccgtgcagataccgatattctggacaccacaatcaagcgtttccgcaaagatccagaagcagctcgtatcttcctacgtaaagatggctctccttatcaaccaggagatagattaatacaaaccgatctggcaaatacgttagaattaattgctaaaaaagggcaagacgctttttatcacggaaatattcctaaactggtcgccgaagccgctaaaaaatccggcggcattattaccgaagctgattttgccaattataaaatttcagaaacaacccccgtcacctgtcactatcgcggttataaatttatctcttccccgccgccaagttcaggcggagtaaccatgtgtgaaattctgaatattttggaaggttataacctcaaagaaatgggattcaactcggctgattatattcacacattgacagaagccatgcgccatgcctacatggacagaaatacttaccttggtgatccagaatttattaaaaatccaatcgatcacttactgagtaaacactatgctgaatctctacgtaaaaaaatagagccaggtaaagcaacattatcggagaatattcagccgggtattggaccccatgagaagccagaaaccacacactactccattgtcgacaaagaaggtaatgcagtttcaactacctatactatcaatggactttttggtgctgtcgtcatcgcccccggaacaggtttcttcctcaatgatgagatggatgatttcaccactaaaattggtgaaaagaatctttatggtctcattcaaggtgcgactaactctattgcccccggtaagcgcccactatcctcaatgagcccgacacttgtcacaaaagacaataagacattccttgttctgggctcacccggcggctcccgtattatctctattaccttgcaaaccgccttaaacattattgatcacggtatgtctcctcaagaagcggtcaatagcccccgtattcatcaccaatggttacccgatgaagtttattatgagcaacgtggtatttctaaagactcgttgaatttgctagaaaaaatgggatataaaatggtggagcagataccatggggcgcggctgaagtgattatggtcggtttacctaaaaccactagcacttcagctaagtcttcaggcaatgatgccaccgtatctggtcaagttcgtgaaaaccatctttatggtgccaatgatgtccgacgcccggctggtgcggctattggctactaa

SEQ ID NO: 9900 - DNA, 603 bp, Photorhabdus luminescens
atggttctggtaactcgtcaagcccctgactttacagcagcagcggtcctcggcaacggcgaaatagttgggaatttcaacctgaaaaaacacctaaatggtaaacctgccgttatctttttctggccaatggactttactttcgtatgcccttctgagctgatcgcatttgaccaccgctacgaagagttcaaaaagcgcggagtggaagttataggtgtttcttttgattctgaattcgtccacaacgcatggcgtaaaactcctgtcgatcaaggtggtattggcgaagttaaatatgcaatggttgctgatactaaacgcgagattcaaaaatcctacggcattgagcacccagaagcgggtgttgctctgcgcggctctttcctgatcgacaaaaacggcgtagttcgtcatcaagtcgtgaacgatctgcctctgggccgtaacattgacgaaatgctgcgtatggttgacgcactgcaattccatgaagagcacggcgatgtttgccctgcacaatgggaaaaaggtaaagaaggcatgagcgcatctccagatggcgtagctaaatacctgtctcaaaacgctgctaaactataa

SEQ ID NO: 9901 - DNA, 597 bp, Photorhabdus luminescens
atgaattttctcgctcaccttcatttagcaactctggctgacagttccttactaggaaatctgatggctgattttgtgcgcggtaatccagagggacaatacagtgctgatgtggttgcaggtattcgtatgcatcggcgtgttgacgtattaacagatacccatccactggttattcaagcccgtcatttattcagtaattcatatcgacgggttgcgccgattactttagatattatctgggatcacttcctctccttgaattgggataaactggttcccacttactcattaccggcatttattcaccatgctcgtagtcagattgaacctcatctttattacactcccgaaaaatttcaggagctgaatgcgtttttatggcggcaaaactggctgatccgttatgcagatcttgcatttatcgcagatgtattaaaaggcatggctcgaagacatcccagattatcggctttatctggatcatttcaggatatagagcaacattacgctgatttcgacgcactattctggcaattttatccctatatgatggaaaaggcagaaaataaggatttttactgcttaccccaatag

SEQ ID NO: 9902 - DNA, 1068 bp, Photorhabdus luminescens
atgcgtgtctccgattttacttttgaacttcctgacgaaatgattgctcattaccctcaaccacaacgtagtggctgtcgtttgctctcgcttgatggtgaaacgggggcattaacgcatggtatttttacggatgttctcgataagctgaatgccggagatttactggtttttaataatacccgcgtcatacctgcgcgtattttcggccgaaaagctacgggcggtaagctggaagtgctggttgaacgggtgttggatgataagcgggtacttgcacatgtgcgtgcttccaaagcgccaaaagagggaactgagctgttattaggtgacaatgaaagtcttaaagcaaccatgttggcccgtcatgataccttgttcgaaatacgttttgatgatgaacgtgatgtgttgtccattttggatgacataggtcatatgcctttgccgccttatattaatcgtcctgatgaagaggcagaccgtgagttgtaccaaactgtatacagtgaacggcccggagcggtagctgcaccaacggccggtcttcattttgatgagccattattggaagcgctgcgtaaaaagggcgtggagatggtttttgtgacattgcatgttggtgcgggtactttccagcctgtgcgggtggagaccattgaagaccatattatgcatgctgagtatgcagaagtgccacaggatgtggttgatgctgtgctggcatgtaaggcgcgaggtaacaaagttgttgccgttggcacaacgtcagttcgatcgctggaaagtgccgcaaaagcctgtcaggatgagttaattgcgccattttttaatgacacgcaaatttttatctatccgggttttgaatatcaggttgtggacgcgttgattactaatttccatttgccggaatcgacacttattatgctggtttctgcgtttgcgggttataaaaatacgatgaatgcttatcaagaggcggttgcagaaaaatatcgtttctttagttatggtgatgctatgtttattcgtcgtaatcccttcgcttgcaaggaaaagatttcttaa

SEQ ID NO: 9903 - DNA, 1125 bp, Photorhabdus luminescens
gtgaaatttgaattacaaactaccgacggtcaagctcgtcgtggtcgtctgatttttgagcgtggcgtggtagaaacgccggcatttatgccagttgggacttatggcacagtaaaaggaatgacaccggaagaagtgaaagaaaccggtgcgcagatcttgcttggcaatactttccatttgtggctgcgtccagggcaggaaatcatgaaacttcatggcgatctgcatggatttatgcaatggcatggtccaatcttgacggattcaggcggttttcaggtattcagccttggcgccatgcgtaaaatcaaagaggaaggtgtacatttccgtaacccaattaatggtacgccggttttcctcagcccagaaaaatcgatggaaatccagtatgacttgggttctgatattgtcatgatttttgatgaatgtacgccatatcctgctgattgggattatgcgaaacgttcgatggagatgtcgttacgttgggctgcgcgtagtcgtaagcgttttgatgaactacagaataaaaatgctttgtttggtattattcagggaagcatttatgaagatttacgtgacatctcagtaaaaggtctggtggagattggttttgatggatacgctgtaggtggtctggcggtaggggagcctaaagaggatatgcaccgcattcttgaacatgtctgtccgcaaatcccgcaagacaaaccgcgctatctgatgggagtaggaaaaccagaggatttggtggagggagttcgtcgcggcattgatatgttcgattgtgtgatgccaacccgtaatgcccgtaatggtcatctttttgtgacccatggtgtgattaaaatccgtaatgccaaacataaagaggatacttcgccactggatgagcagtgtgactgttatacttgtcggaattatagtcgggcatatttgcatcatcttgaccgttgtaacgaaattctcggtgcaaggctgaatactatccataatttgcggtattatcagcgcctgatggctaagatccgtcaggccattgaggaaggtaatcttgaacagtttgttgaagatttttatcaacggattggtaaacccgttccggcattaagtatttga

SEQ ID NO: 9904 - DNA, 330 bp, Photorhabdus luminescens
atgagtattatttctgaagcagcagcatctgctggcgcaccggctcagggaagcccatattctttgatcatcatgctggtcgttttcggcttgatcttctatttcatgatcctgcgtccacaacagaaacgtaccaaagaacacagaaagctgatggattctatttccaaaggtgatgaggtgatgaccaatggtggtttgattggtcgtgtcacaaaagtttctgacacgggttatatcgttgtagcactgaatgacactactgaagtgaccattaaacgtgatttcgtcgctgccgttttaccgaaaggtacaatgaaagctctgtaa

SEQ ID NO: 9905 - DNA, 1848 bp, Photorhabdus luminescens
gtgctaaaccgttatcctttgtggaagtatctgatgctgatcgctgcgatcctcatcggtttgctttatgcacttcccaacctttatggtgaggatccggctgtacaaatcactggcgcgcgaggcattgccgccagtgagcaaacgctggtccaaatccataatgttttagaaaaaaatcaaatcgcgagtaaatctattgcgctggaaaatggtgcgattcttgctcgtttcgataattccgatattcagcttcgtgcccgtgaagcattggtgtccacattaggcgatcagtacgtggtggcactgaacctggcaccagcaacaccaacttggttaagtaaggttggtgccgaaccaatgaaactgggtcttgatctgcgaggtggggtgcacttcctgatggaagtggatatggaaaccgcattaggcaaactgcaagagcagaatattgatggcctgcgcactgatttgcgtgaaaaaggtattccttactccactgcccgtaaaattgataattacggtgtagaaatccgcttccgtgatgagaaagcacggtctgaggcggaaaactatcttactggccgtcaccgtgatttagttttcagtattggaagcaataatactctgaaagcggtgatgagtgatgaacgtcagcgcgaagcccgctcttatgcggtgcagcagaatattaccattctgcgtaaccgtgttaatcaactgggtgtggctgaaccattggttcagcgtcagggcgctgaccgtatcgtggttgaattaccgggtattcaggatactgctcgtgcaaaagagattcttggtgcgacagcaacgttggaattccgtctggtcaataccggtattgactctaccgcagctacatcaggccgtgtgccaggtgattctgaggtgaagagcactcgtgatggtaatccggttgtgttatataaacgtgttattctgaccggtgatcacattacagattcaatcccggataccgatgaatatggtaatccacaggtcagtatttcactggacagtgccggtggcacagcgatgtctaatttcaccaaagacaatgttggtaagccaatggcgacattgtttgtggaatataaagacagcggtaagaaagatgctaatggtcggtcggtgttagttaaacatgaagaagtgattaacattgctaatattcagactcgtctggggaacagtttccgtatcacgggcctttccaacgcaaccgaagcgcgtcagttatccttattgttgcgtgcgggtgctctgatcgcgccgattcagattgtagaagagcgtactattgggccaacccttggtctgcaaaacattgaacaaggtttagaggcttgtctgtggggcttaattgcatcaattctgtttatggtgatttactatcgcaaattcggcgtgattgcgagcagtgcgttgttggctaatctggtgctgattgttggtatcatgtctctgttaccaggggcgacgttaaccatgccggggattgcgggtattgtgctaacgctggcggtggcggttgatgcgaacgtgctgatcaacgaacgtatcaaagaagagttgcgtaatggccggacagtccaacaagcgatacatgaaggttataaaggcgctttctccagtattattgatgctaacttgaccacgttgattacggcggtcattctttatgctgttggtaccgggtcaattaaaggctttgcgataacaacgtcaattggtgtcgcgacttctatgttcaccgctattgtaggtacgcgaggaatcgttaacctgctatacggcggtaagcgtattaagaagctgtcaatttaa

SEQ ID NO: 9906 - DNA, 969 bp, Photorhabdus luminescens
gtggcacaggattatactgttgaacaattgaactacggtcgcagagtctatgactttatgcgctgggacaacgttgctttcggaatttcgttgctgctgttggtagcttctgtttttgtgatggcaactcgcgggtttaactggggactcgattttaccggtggtacggtaattgaaatcaaactcagtcaatctgctgatctggataagatgcgtgataacctggcaaaagcgggctttgaagatccgctgttgcaaaatttcggtagtagccgtgatgtaatggtgcgtatgccaccagttacgggtgcggcgaatgaggaactgggtaaaaaggttattaaagtcattaatgacaccattgataaagatgcgagtgtcaatcgtattgaaattgttgggccgagtgtcggtgctgagctcgcccaagatggtgcaatggcgttgctggcggcgcttatctgtatcttgatttatgttgggttccgttttgaatggcgtttagcattgggtgcggttcttgcgcttgcccatgatgtcatcatcacgctaggggttctgtcattgttccgtatcgagattgacctgaccattgtggcatcgctgatgtcagttatcggttactcattgaatgacagtatcgtggtttctgaccgtatccgtgagaatttccgtaagatccgtcgtggtacgtcgtatgaaattatgaacgtctctctgacgcaaacattgagccgtacaatcatgacatctgcaacaactttactggtggtgctgatgttgtatattttcggtggtgcaatgttgaagggtttctcactagcgatgttaattggtgtttctatcggtacggtatcttctatctatgttgcttccgctttagcgttgaaactgggtatgaagcgtgaacacatgatccagcaaaaggttgagaaggaaggagctgatcagccatctttactgccttaa

SEQ ID NO: 9907 - DNA, 450 bp, Photorhabdus luminescens
atgcattgcccattttgtgctgctgttgataccaaagtgattgactctcgtttggtaggggatggctcgcaggtgcgccgacggcgccagtgtcttgagtgtcatgaacgattcaccacttttgaaatggctgagctagttatgcctagagtaataaaaagtgacgatatccgagagccgttcgatgaagagaaattgcgccgtggtatgcaaaaagcactggaaaagcgcccagtcagttctgatgatgtagaaatggcgattagctatattaaatctcagttacgtgctaccggtgagcgggaagttccatccaagatgattggtaatctggttatggatgaattgaagaaattggataaagtcgcctatatccgttttgcttctgtctatcgcagctttgaagatattcgtgaatttggcgaagagattgctagattacaaggttga

SEQ ID NO: 9908 - DNA, 1110 bp, Photorhabdus luminescens
gtgaataacgataaaaaatatatggcgcgcgctttggaattggcgcgtcaagggcgctttaccacgtcacctaatcctaacgttggttgtgtgattgtgcatgatggacaaattgttggggaaggttttcatttacgttctggtgagccgcatgctgaggtttacgcgttacagatagccggagataaagctaaaggcgcaactgtttatgtcacgcttgagccatgcagccatcacggtaagaccccgccttgtgccgatgcgttgattgcggctggcgttagccgtgtggttgcggcgatgcaggatcccaatccacaggtagcaggaagagggctttataagctgcaacaggctggtattgcagtagaacatggactgatgatggaagaagctgaatctctcaaccgggggtttttgaagcggatgcgtaccgggtttccatatattcagttgaagatggcgacttctctcgacggccgaacggcattagcttctggtgaaagtaaatggattacatcaccacaagctcgctgtgatgtgcaaaaattccgtgctcaatgtagcgcgattctgagttccagtagcactgttttagctgatgatcctcacttgacagttcgttggagtgaattggacgcagaaattcaggcggtttatcccgaggaaaatctttgtcaaccggtacgtgttattgttgacagtcagaatcgtgttagcccccagcatcaggtcatacagcagcccggttattgttggctggctcgcactaaagtagatgaacatgacttatctgaaaatgtagaacagatactgttacctgctcatggtattggggtagatttggtgtcattgatgatgcagctgggtaagcgccagatcaacacagtctggactgagtgtggggcattgctggcaggcgcattgctaactttagggttggtggatgaattggttctttatgttgcgccaaaagtgctaggtgatacggctcgtggtttgttcactattcctgaactcaaaaatctggcagaggcaccggaatttgacattttcgatgtacagcaagttgggcctgatcttcgtctgcatctgcggcctgtatactga

SEQ ID NO: 9909 - DNA, 471 bp, Photorhabdus luminescens
atgaacgtaatcaaaggtgttgttgcagctccacaagctcgtgtggcgattgccattgcacgttttaacaacttcattaatgacagtctgttaggaggagcggtggatgcgcttgagcgtatcggtcaggttgcttcagagaatatcactgttgtctgggttcctggtgcttacgagttgccattaacagtgaagacattggtcgaaacccaaaaatatgacgctgttgtcgcgctaggtacagttatccgtggtggtaccgctcattttgaatacgttgctggtgaatgcagttctggtctgtctagtgtagcgatggctagtgaaattccagtagcgtttggtgttctgaccacagaaagcattgaacaggcgattgagcgtgctggaaccaaagcgggtaataaaggcgcagaagccgcattaaccgcactggaaatggtcaatgtaattaatgccattaaaggctga

SEQ ID NO: 9910 - DNA, 417 bp, Photorhabdus luminescens
gtgaaacctgctgctcgtcgtcgtgctcgtgagtgcgctgttcaggctatatattcatggcaattatctggcaatagcattgctgatgttgaattacagtttctgtcggagcaggacgtcactggtgttgacgtaacctattttcgcgaattgctgtcaggagtagctgtaaatgcggctaagctggatgctttgatggccccttatctttcccgtcagctcgaagagttaggtcaggtagaaaaagccattttgcgtattgctatgtttgaactaagttatcgtgatgatgtcccttataaagtggctattaacgaagctatcgaattggcaaaagtcttcggtgctgaagatagccacaagttcgtaaacggggtactggataaatctggcccggcagtacgcagaaaaagataa

SEQ ID NO: 9911 - DNA, 990 bp, Photorhabdus luminescens
atggcatgtggcgaatttgacctcattgcacgttattttgatcgccaggagattaaccggcgtgatgtaaatttaggtattggtgatgactgcgcactgatgacactagccgataaacaacaattggcggttagtacggataccttagtttcaggcgttcattttttacctgatatttctcctgaagatttagcttacaaatctcttgctgtgaatctgagtgatctggccgcagtcggcgctgatcctgcctggctttcattagcgttaacattaccggaagtggatgaacgctggctgagtggtttcagtgacagtctgtttgagcagttgcgttattatggtatgcagcttattggtggtgacactacccgcggtccgatgagtctgacgttgacgattcatggtttagttcccgcaggcagggcgttacggcgtactggcgcaaaaaatggcgattggatttatgtgagtggatcgctgggggatagtgcggcgggtttggctctgttacaaaatcgtttgcaaatttttgatccggtatctcacaactggttggttcagcgccatctcaggccgcagcctcgtattttacaagggcaagcactacgtggcttggcaacatcagcaattgatttatctgatggtttgatttctgatttaggtcacattctgaaagccagccgatgtggagccagaataaatctggatgcgcttccttactctgatgcaatgaaacagtacgttgaaccacaacaagctttaatgtgggctttgagtggtggtgaggactatgaattgtgttttactgtcccagagaggaatcgtggtgcgttggaaattgcgttggcgcataccggtgctggttttagctgtgttggacagattatggcggaatcagagggtattcgttattacagcaataataaagagattaaattagatctgaaagggttcgatcactttattaccgaggaagcacatggataa

SEQ ID NO: 9912 - DNA, 492 bp, Photorhabdus luminescens
atggataaggcaaagcatcgtttacggatgagtaatccctggcatctattagcgacaggttttggtagtgggctgtcgcccgtggtgccggggacaatgggatcggcagcggctattccattctggttattactggttcagtttccggaatggatttgctggttggttattattgttgggatgtttttcggcataatgatttgtcagcgtacttctgatgatatgaaggttcatgaccatggtagtattgtctgggatgaatttatcggtatgtggatcacattgatggcaatccctatggttaactggcagtgggttttgaccggttttatagtgtttcgtattctggatatgtggaaaccgtggccaattcgctggtttgatcgctatgttcatggtggattaggcatcatgttggatgatgttatcgctgctggattttctttcgtgattgtttggttactggcgttttatcagatttttattttctga

SEQ ID NO: 9913 - DNA, 273 bp, Photorhabdus luminescens
atgggtactgaaacttatgttcgcacacgtatagacccagcaattaagcaagaggcaaccgatgttttagctgctattgggattaaaatgtctgactttctacgcattgctgtaacgatggtggccaaagaaaaggcgctacctttcgagatcaagaaaatccctaacagagttactgttgaggctatgaatgaggcgagaagctcaatgaatgcacgttttaacgatgcggatgatttaattcatgacattgaaaaagactgcggcaagtaa

SEQ ID NO: 9914 - DNA, 159 bp, Photorhabdus luminescens
ttgagccgttctgggcgctatgacatgcaccgattaaaatctgttgtaatgctcctcattgctaatgattcaccgctaggagctgaatataaagatcatgagttaatcggagattgggctggatttagagagtgtcatattggggggattttcttttaa

SEQ ID NO: 9915 - DNA, 294 bp, Photorhabdus luminescens
tggacgtcccctttttcagcggtaaagagtgtcactttcatcacgaagaaacgtcgtaacatgaaagcgcgtatgctggcagagtgggataaaatcatgttatcaacgcgtttcatcatagaaaccatcaatgatcaattaaagaatatttctcaaatagagcattcgcgccaccgaagtataacgggatttctgttgaccgttttaggtggtgtgattgcttactgccttaaattaaaaaaaccatcactgaaaattttctactcagaagacgattttccagtgatggtttaa

SEQ ID NO: 9916 - DNA, 501 bp, Photorhabdus luminescens
cgagaagcctgttccgggagcaaaattttggtgaacgccgaaaacagctccggggaggaacaggccaaggataagttagtggaaattttctgcgatgtcgacgatttttgccgttttttcatccctcagtggacacagttttgccttgataacggataccgtctacgtcaccgccaaggtcgcatgtctcccagtgaaatcatgactatcctgatcctctttcatctatcacattaccgtgattttaaacatttttatctggagcatatttggaaatatcaccacaatgattttcccaccttgctcagttatacccgttttattcgtgtcgcgccttccgttttggcaccactgtgcagttatctgactcaattaaaagggaaaccgactggcattgcttttattgattccaccagtttgggtatttgtcataacatccgcattccccgtcatcaggtttttgaggggatcgcaaaacgaggaaaaacctcgatgggatga

SEQ ID NO: 9917 - DNA, 525 bp, Photorhabdus luminescens
atgatgctaccaatctggcacgaagaacctataggcaaacatcatgatcgtggtgcttttgactgtggtgatgaggcgttgaatcagtttttacatcgccatgcaaggcagagccatgagaaaggtggggcaaaaacctaccttgcagttagcaagaacaatggaacggtattaggttactacagtctaagtcccgcttctattgcttatgaacgtgcaccggaagtgattaaacgtggtctggctcgacatgaagtgccagtatttcggcttggccgtctggctatagatctttcagtacagagtcaaggactcggtggtcagttgttgctagccgctggtcggcgctgtttattggtggccgcacaggctggcggggttgcattgctgattgatgccaagaatgagcgtgttgccgagtggtacgccagctatggtgctattccgctattagatgcccacctatctttgctgttaccattcaaaacaatacatgcagctctagtcactgcggggaagctttaa

SEQ ID NO: 9918 - DNA, 279 bp, Photorhabdus luminescens
atgcctcagatcccagtagaaactaacgaccgaatgtcgctacgtattgcctcagaagaaaagtcgctgttgatgcgtgcagccgctttacaacataccaacttgactgagttcgtgctccgcaatgtgatgccagcagcacggaaagttatcgacgagaacgaacggctggagctgaccgaaagagatagtttgcatgttctggatcttttggataacccaccggcacccaatgataaattgttggccgcagcatttgccttgccgaaacaatcatga

SEQ ID NO: 9919 - DNA, 1866 bp, Photorhabdus luminescens
atgagcattgatatagccaaataccccacattggcattagcggaaaatcctgaagaacttcgtatgttgccaaaagagagcctgccgaagttatgcgatgaacttcggcaattcctgctaaacagtgtcagtcgctccagtggtcattttgcctccggtcttggtactgttgagctgactgtagcattacattacgtctataaaacgcctttcgataaattggtatgggatgttggccatcaggcttatcctcacaaaatcctgacaggacgtcgagatcgcattgatacgattcgtcaaaaaaatggtcttcatcctttcccgtggcgagatgaaagtgaatatgacaccttatgtgttgggcactcatcgacctctatcagcgctggattaggtatggcaattgctgctcaacgcgaaggcaaaggccgccgtacagtttgtgttatcggtgatggtgcgataacagcggggatggctttcgaagcgatgaaccacgccggggatatcgacccggatatattagtcattcttaatgacaacgaaatgtctatctcggagaacgttggtgcattaaataaccatctagcccaacttctttccggaaaactctacaccacattgcgagaaggcgggaaaaaagtcttttccaatctaccaccgattaaagaactactgaaaaaaactgaagaacatatcaaaggcatggttgttcctggcactctgtttgaagaattaggttttaattacattggtcccatcgacggacatgatgtactgacattgactcaaacactgaaaaatatgcgtgagttgaaagggccacagctactgcacatcatgaccaaaaagggtcgtggctatgcacctgccgaaaaagatcccatcagctggcatgcggtacctaaatttgatccgaccactggcgcattacctaaaagttcagacaaccgccctactttctccaaaatctttggagattggttatgtgaagaggccgctaacgataaaaaattgatggcaattacacccgccatgcgtgaaggctctggtatggtgcgtttctcccgagaatatcctgatcaatactttgatgtcgccattgcagaacaacatgccgtgactttcgccgctggtttggcaattggtggttacaggccgattgttgctatctattcaacatttctccaacgtgcttatgaccaggttatccatgatatcgccattcagaatctacctgttttatttgcaatagatcgcggcggtatcgtaggtgctgatggtcagacacatcaaggtgcctttgatctttcattccttcgttgcatccccaacatggtcattatggcaccaagcgatgagaacgaatgccgccaaatgctacataccggctatcattatcagcaaggtccagtagccgtacgttatccacgaggaaccggaacgggagcagaaccccaaccatttgaacaattgccaattggtaaaggtgttattcgccgtcagggtaataaggtagcgatcctaaactttggtactctgttacccgatgcaataacagcagcagagtcactggatgcaactgttgttgatatgcgttttgtcaaaccactggataaagaattaatattagacatggccgataaccatgatttattggtcacactggaagaaaatgccattatgggcggtgccggaagtggcgttaatgaattactaatgcagaaaggccgcctggtacaaattctgaatattggcttgcctgatcaatttgtgccacaaggtagtcaggaagaaatcaaagcggatttagggcttgatgccgccggtattcaaaatagtatcaataaaaggctattttcctga

SEQ ID NO: 9920 - DNA, 918 bp, Photorhabdus luminescens
atgtctgaacaaaattcaacccaatttaaagaacagcttaaaatctgtcaacaacgagtcaataacgttctgataagcacactatcttcagtggcatttgcaaacaacccactagttcatgcaatgcaacatggtactttactcggtggtaaacgcctgcgcccatttttagtttatgccgttggtgaaatgtttggattatccgcaaataatctggatgctccagcagcagccgttgaatgtatccacgccttttcattaattcatgacgatttaccggcgatggataacgatgatttacgccgtggacaaccaacctgccacataaaatttggtgaagctcacgcgattctagcgggagatgcattacaggctctggcgtttgaaatcctatctaaaagagaaatgccggatgttacaacagcagatcgccttgaaatggttgctgaattggcaaccgccagtggtatagccggtatgtgtggtggccaagccctagacttggccgctgaaggcagacacattgatctccatatgctggaacaaattcatcgccataaaacaggtgcgcttattcgttgcgccgtcagaatgggcgcatatggtgcaggccaaagtgggcatgacgccctgcctgaattggatcaatatgcccaagcgattggtctcgcattccaagttcaggacgatattcttgatgtcattggcgataccgaaatgataggaaaacgtcaaggcagtgaccaacagctaggaaaaagcacttaccccgcattactagggttagaacaagcacagaaaaaagcatacgaactgtatcaagaagccttaaaagctttgaataaactggaagataaatcctataacacaacaatgctgcgcgcacttgccagctttattattgaacgtaataactaa

SEQ ID NO: 9921 - DNA, 279 bp, Photorhabdus luminescens
atgccaaagaaaaatgcaatatcagaaagtacaaacagtacgccagaaactgcaccagcaatgacatttgaaagctcattaaaagagctggaacagattgtcgcccggttggaatcaggtgaactggcactggaagaagccctaagcaagtttgagcgtggtatccaattagcccgccaagggcaacaaactttgcaacaagcagaacaacgagtacaaattctgcttaacgacgacacccaatcgccactgagtcatttctccccggatactgaataa

SEQ ID NO: 9922 - DNA, 1449 bp, Photorhabdus luminescens
atgaagtttattattaaattattccctgaaatcacgatcaagagccaaactgttcgtttgcgctttattaaaattctcgcgagtaatattcgcaatgtgctgaaaacgttaggagataatattgccgtggttcgccattgggataatatcgaagttcgcactaaagatgaaaaccttggcgttcaaatttgtgatgcgctgacacgtattcccgggatccaccatattctgcaagtagaagagcgtgaatttcgtgatatgcatcatatctttgaacaagcttatgaggcttatggagaattgctccacaataagacattttgcgtgcgggtaaagcgccgaggtaaacatcaatttacttctaatgaagtagaacgctatgttggtggtggtttaaaccagcatattgaatctgcaaaagtaaaactcaatcatcctgatgtgactgttaatctggaaattgatcaagatgtgttgattctggtaaaagcccgctatgaggggattggtggttttcctatcggaacgcaggaagatgtattgtctctaatttcgggaggttttgattccggtgtttccagctatatgctaatgcgccgtggctgtcgtgttcactattgtttcttcaatcttggcggttctgctcatgaaattggtgtgaaacaggttgctcattatctttggaatcgttttggcagttcccataaagttcgtttcgttgctgtggattttgaacctgttgtcgctgaaattttggaaaaagttgatgatggtcaaatgggggtggtgcttaaacggatgatggtaagagcggcatctaaagttgcagagcgttatggcgtgcaggcgattgttaccggtgaggctttgggacaggtttccagccagacactcactaatttgcgcttgattgataatgcatcggatacgttgattctgcggccactgatttctcatgataaagaacacattatcaggttggcacgtgaaataggcactgaggattttgctcgtacaatgcctgaattctgtggtgttatttcaaaaagcccgacagtaaaagccgttaaagctaaaattgaagcagaagaagcgaatttcgattttaatattttggaaaaagttgtcagtgaagctcagaatgttgatattcgtcagatcgcagaacaaagcagtgagcaagtggttgaaattgaaacagtgacagcgttcgctccaacggatgtgttattggatattcgttcacctgatgagcaagatgatcggccattacagttgaatggtgtggaaatcaaatcattgccattctataagttgagcagccagtttggtgatttgccaaaggagaagacttatctgctctattgtgaacgtggagtaatgagccgtttgcaggcactttatttatctgaacagggttttgataacgtgaaagtttatcggccttaa

SEQ ID NO: 9923 - DNA, 378 bp, Photorhabdus luminescens
atgattatgaacccttcagcactcatctgcctgactcacggtagtgaagaaacagaagccgttacaactattgatttactggtacgcgctggcatcagtgttacgattgccagcaccgccagtgatggagaattggttttaacttgctccagaggtgtgaaactggttatacgattcggggttcacgtaataggaaccccgaaacatagaattgaaacaattaaggccgataaactttcacgttatcaaaaccctgttcagataaataaagtgcctgcaaacggctcattactccacgttcacaatagagcagataagtcttctcctttggcaaatcaccaaactggctgctcaacttatagaatggcaatgatttga

SEQ ID NO: 9924 - DNA, 873 bp, Photorhabdus luminescens
atgaagataaccgttcttggctgtggcgctataggaaaactgtggctagcagcattatcacaacaaaaacatcaagtacaaggttggctaaaaagttcccgatcttatttatctgttcatattgacgaaatgaatggggaaatattcaaccaaccaatcccaactaataacagcgaccatcttaccaacagcgaattactgattgtctgtctgaaagcatggcaagttgctgatgcagtgaataatttactccccaaactttcacctaattgtccaatcttattactacacaatggcatgggcacccaagaagaactattatcagcgcctaatccaatactgcttggcgtcacaacgcatggcgcatatcaggatgaccaacaggtttatcataccgcttccgggctaacctatattggttcagcaacatcaaatgcaactgggcttagctctctggctaatgtattacaccaatctttgccagatgttgcatggcataatgaaattctctctattagttggctgaaacttgccgctaactgtgtcgtaaacccgctgactgcgctttatgaatgccaaaatggagatctgcttcgctacccagaacaagtgaatattttgtgcgaagaaattattcaggttatgcaacgagaaaacatccataccactatcgacaacctgatttcctatgtctacgatgtgattaaacttacagcaaaaaactactcatccatgttgcaagatgtccgcgcaaagcgtcgcactgaaattgactatatcaccggttatttattacgccaagcccgggcacatggtctggcagcccctgaaaatacccgtatctataacctagtaaaacataaggaaagatga

SEQ ID NO: 9925 - DNA, 492 bp, Photorhabdus luminescens
atgccatctttcgatattgtttcagaaattgatatgcatgaagttcgcaatgcggtagaaaatgcgcagcgcgagcttactagccgttgggatttccgtaatgtcaacgccagtttcgaattaaatgaaaaaagtgaatctatcaagattgccagtgagtcagattttcaggtaaatcagttggttgatatcatgcgtgaaaagttggctaaacgtggtatcgatggtgctgcattgaatatccctgatgatatgttgcacagtggtaagacttacagcgttgacgcgactttgaagcaggggattgatacccctacggcgaaaaagatcgtgaagctgattaaggatagtaagctgaaagtacaggcacagattcagggtgagcaagtgcgagtgacaggtaaagctcgtgatgatttgcaaagtgttatggcattagttcgtggcgcagagctgggacagccattccagtttactaatttccgggattga

SEQ ID NO: 9926 - DNA, 1380 bp, Photorhabdus luminescens
atgaacgataataaaatgacgccacttgagcttcgggcgacatggggcctaggttcagttttttctctgcgaatgctaggtatgttcatggttcttcctgtattaacaacctacggccttcatctaaaagatgccaccgaaacacttattggcatcgctattggcatttatggtttaacccaagccattttccaaattccagttggcctgctttccgacaaaattggccgtaagcccttaattattggcggattattgctattcgtccttggcagtattattgctgctctcagtgattccatctggggcataatcattgggcgagcgttacaaggcgctggagcgatatctgctgcaattatggcgctactttctgatttaacccgtgaacaaaatcgaactaaagcgatggcttttattggcattagcttcggaataactttcgccatagccattgtacttggcccaatccttacgaatgctattggattaaatggcctattttggggaattaccattctggccggtagtgccattctgataacactattggctgttccttccacagataaacacatgcttaaccgtgaatcaggcattgttcgtcacagtttcagtaaggttctggctgatagccagttgctgaaacttaactttggcattctcagtttgcacactttgctaatggcaagttttgtcgcccttcctctggtgatgcaacaagcagggctccctacccagcaacattggaaggtttacctgatcactatgctagtttcattcttatctgttttacctttcattatttacgcagaaaaaaaacgccgcatgaaacaagtgttttcactgtgtatcacgatgctgctgattgctgaaattgtattgtgggcggcgggacatcacttatggatgatttttatcggcatacaaattttctttattgctttcaatgtaatggaagctatcttgccatcactcatcagtaaagaagcaccagcgggttataaaggtacagcaatgggtatctattccaccagccaatttttaggtgtcgctttagggggtggcctcggtggttggttatatgaattaaaaggagcaccgctggtatttgcagcaggtatcgttctgacaatcatttggttcattatcagcacaacaatgaaacaacctccttatgtcagcagtatcagaatttctctaccagaaaatatcgtcaataaggcattgctggaacaaaaaattcttgttcagcccggcgtttgcgacgtcgttattgttccggaggagcatagtgcctacataaaagtagatactaagctgataagcagagcacaacttgaacaattgatagctaataataatgacacgatagattaa

SEQ ID NO: 9927 - DNA, 885 bp, Photorhabdus luminescens
atgattaagcaatacctgcaagtaactaaaccaggaattattttcggcaatttaatttctgtgatcggtggttttctactcgcctcgaaaggggtgattgattaccctttgttcatctcgactctgctcggcgtttcattagtcgtggcttctggttgtgtatttaacaactacattgaccgtgacatcgatcggatcatggaaagaacaaaaaaccgtgtccttgtaaaaggacttattgatccgaaaatcagcctgatttacgcatcaatactgggtattgctggcatagtgctgctctatgcagcagccaatgctttagcaatgcaattagcgattatcggttttgtcgtctatgtaggggtttacagcctctatatgaaaaggaaatctgtttatggcacgttgatcggcagtttgtccggtgctgcacctccggttatcggttattgtgcagtaactggtcagtttgatacgggcgcgttgatcctgttactgattttcagcctgtggcaaatgccgcactcctatgccattgctatttttcgtttcaaagattaccaggcagccaatattcctgtactgcccgtcattaaaggcatatctgtggcgaagaaccacattatcctttatatcctggcatttatgattgcaacccttatgttagccatcagcggttacgccggttacaaatatttggttgttgcagcagcagtgagcgtctggtggctaggaatggcattatccggttacaaaactgataatgaccgcatttgggctcgtaaattatttatattttccattgtggcaatcacttccctgagtgtcatgatgtctattgacccgcatgtgccctcagaagccttcctaacttacgtccggtaa

SEQ ID NO: 9928 - DNA, 333 bp, Photorhabdus luminescens
atgagtcattctgataccgctcatactggagctagccacggtagcctgaagtcttatctgataggcttcgttctttcggtgatactgacagtgattccgttctggatggtaatggatggttctgcctcccatacgactatcctgacaacagtagttgctctggctgtggtgcagattattgttcattttatctacttcctgcacatgaacacttcgtcagaagagcgctggaacttagtagcattgctgttcaccattttaattatcggtattgttgttgttggctcactatggattatgtacaacctcaacattaatatgatggttgattaa

SEQ ID NO: 9929 - DNA, 615 bp, Photorhabdus luminescens
atgtcaactgaaactatgactaaccacaatcatgcccacgagcatcacgggcaccacgatgcgggagccactaaagtattcggtttctggatctacttgatgagtgactgtattttgttcgcatgtctgtttgcgacttatgcagtactcgttaacggaaccgcgggcggtccatctggcaaagagattttcggcctctcttttgtattggttgaaactttcctactgttattcagtagtatcacttatggctttgccatgttaggaatgaacaaaggaaaaatcggccaggttaacgcctggctcggtatgactttcctgttcggccttggcttcgtagcgatggaattgtacgaattccatcacctgattgttgacggccacggccctgaccgcagtgcgttcttgtccggattcttcgcattggttgctactcacggtatccacgttacctgtggtctggtctggattattatcatgataatccaagtaacccgccgcggtttaactgatgtcaataaaacccgtctgaactgcctgagcttgttctggcacttcttggatgtggtatggatctgtgtatttaccgttgtttatctgttaggagctatgtaa

SEQ ID NO: 9930 - DNA, 1992 bp, Photorhabdus luminescens
atgttgggaaaattaacacttgatgcaatcccattgcatgagcccattgtcatggtcactcttgctgggattctcttcgcagggctcgcgattgtcggagccctgacctatttccgtaaatggaaatggctgtggagcgagtggttaaccagcgttgaccacaagaaaatcggtattatgtacattatcgtggcgctggtcatgatgctccgtggttttgccgatgccatcatgatgcgtggtcagcaggctgtcgcctctgcgggtgaagcaggtttcctgccaccgcatcactatgaccagatctttaccgcccacggcgtcatcatgattttcttcatggcgacaccttttgttgtcggcctgatgaacatcgtggttccactacagatcggcgctcgtgacgtggcattcccattcctgaactcactgagcttctggtttttcgtcgttggcgttgcactgattaacatctctctgggtataggtgaattcgctcaaactggctggttagcttatcctccactctcaggtatagaatatagcccaagcgttggggtcgattattggatatggagtcttcagatatccggtatcggtaccttgctgactggcgttaacttctttgcgacgatcctgcgtatgcgtgctcctggcatgtccatgatgaaaatgcctgtattctcttgggcagcgctctgtactaacgtactaatcatcgccgcattcccgattctgacagttaccattgccctgctaacttttgaccgttacatgggtacccatttcttcaccaatgatatgggcggtaacatgatgatgtatatcaacctgatatgggcttggggtcaccctgaagtttatattctggtgttgccagtctttggtgttttctctgaagtgactgcaacgttctcgaaaaaacggctgtttggctatacatctctggtatgggcaaccattgccatcaccgtactatcgtttatcgtatggctgcatcacttctttacgatgggctccggggcgaacgttaacgccttcttcggcatagccaccatgattatctcaattccgacaggcgttaagatcttcaactggctgttcacgatgtatcgaggccgtattgagtataaaacaccgatgttgtggaccgttggcttcatcgtcaccttctctatcggtggtatgactggcgttctgctggcagttccaggtgcaaacttcgttctgcataacagcttattcctgatcgcacacttccataacgtgatcatcggtggtgttgtcttcggttgtttcgctggtactgcttactggttcccgaaagcttttggtttcacactgaatgaaaaatggggtatccgcgcattctggttctggatcaccggcttctttatcgcctttatgccagtttacgcgctcggatttatggggatgacccgtcgtattagccaagatatcaaccctgaattccataatctgctggtcgtctccgcgattggtgttgcactgattgccgttggtatcctgtgtcaggtcatccaattctacgttagtatccgtgaccgtgaccaaaaccgtgacctgaccggtgacccgtggggcggacgtactctggagtgggcaacatcttctccaccaccgttttataactttgctgacgttccacatgttcaaacccgtgatgcatggtgggatatgaaagaaaaaggcactgcttataaacgtcctgctaagtatgaagaaattcatatgcctaaaaatgccggtgcgggtgtaattattgctggctttaccttgctgtttggtttcgccatgatttggcatatctggtggctggctatcgcaagcttcgcaggcatgattatcacttggattgcaaaaagctttgatgaagatgttgattactacgtacccgttgctgaagttgagcaaattgagaatcagcaccatgaacaaattagcaaggcaggtctgaaccatgtcaactga

SEQ ID NO: 9931 - DNA, 936 bp, Photorhabdus luminescens
atgagacttatgaaatacaataaaggtattgggatattatcaatactcgcagctactcttgtgctgagtggctgcgatatggtattgatgaatcctaaaggcgccatcggcgctgaacaaaaaacgctgatactcacggctatcggcctgatgctgatcatcgttattccggtaatcatcatggcattcacctttgccctgcgttaccgcgaagccaacagaagtgctacctatcgccctaactgggcacactcaaataaaattgagctggtagtatggaccgttcctatcattatcattattattttagcaaccattacttggaaaacaacccacgagcttgacccatataagccactggtcagtgatgaaaaaccagtgactattgaagttatctctcttgattggaaatggctattcgtttacccggagcaaggtatcgctacagttaacgaaattgctttcccttccggggttcctattaacttcaaaatcacctctgattctgtgatgaactcattcttcatcccacagttaggtggtcaaatctatgcaatggctggtatgcagactaaacttcacttaattgccgatgaacctggcacttataaaggtttgtccagcagctatagtggccacggcttctccggcatgaaatttactgctaccgctaccgcagatcgtgaaggttttgaacaatgggttcaaaaagtgaaagcctctcccaagaccttggataccatgcaggcatttaacgagttagctaaacaaagccagaaccatccggttgaatacttctcaagcgttaagcctaacctgtatcaagacattattgccaaatttatgggcaacatgaatatgcatggcggccacggtacaacgacaggtcataacatgaatatgagcgaaactgctcatgccggagttgaggaataa

SEQ ID NO: 9932 - DNA, 762 bp, Photorhabdus luminescens
atgagaacaaccattctggctactgctttattcaccaccgtctcagttccagcttatgctgaatatcaagggggctttgctaatatcagcatgaactacctcgactggactagccataccacacacaagtcagggcaaacctctcataaagacgactttgcctacttagaactggaaggcggagccggatttaactggggtgaactatacgggttctttgatctggaaaatgctttcaacaatcagcatgctgaaccaggggataaccaaagatacacttttaaaacaaccggtcgcttttatctggctgatacaggtttcaatctctatggtcatgtttatggtacttattcgctcccaggtacagcacatggcgggaacttccatgaggtaaataccctctatggtattggctacaacactgatttcgctggtgtctggttcaaaccgtttgtggcgctgcactatgttgaccaaactttctactccggtaataacggctatgtcgttggttgggttgcgggttacgactttcaactctgggaagaaaaattcagcataactaactggaatgaaatagaacttaatcgaaatgaacgctacggcaacggtggacggaatggtaccaatggtgcaatagcgttatggtggacacctcaccaatccttcacaactggcattcaatatcgatatgccgatcataaattgggtgaagacttctggcaggatgggattgtttacactatcaaatataatttctaa

SEQ ID NO: 9933 - DNA, 1479 bp, Photorhabdus luminescens
atgtcttatcgttatctcaccgtttttacccaacataattcacgaattctgcttttactcggctttgtttctggtttaccgctcgcattgaccgccagcaccctgcaagcatggatgaccgttgaagacgttgatctgaaaacaattggctttttttctcttgtcggccaagcgtatgttttcaaatttctttggtccccttttatggaccgctttatccccccttttcttggacgtcgccgtggttggctacttgttacacagttattacttatagccagtatcgcggcaatgggctttctccagccatctcaacatttatggtggctagccacactggcagtaaccgtcgctttctgttctgcatcacaggatatcgtctttgatgcttataaaaccgatttattgagtagcgaagagcggggtgtaggtgctgccgtttcggtatttggttatcgattagccatgttagtttcaggcgggttagcattatggatcgcagaccgctatattggctggcaacacacctactggttgatggctggactgatgctgattggcgtctacgcaacgttaaaagctagagagcctgaaattgacgctccgtcaccaaaaacactccagcaagccgcaatagagccattagtcgatttttttaatcgcaataatgcatggctgatactactgttaattgtcatgtataaaatgggagatgcctttgctgccagcctaagtaccccatttcttatccgaggtattggctttgatgctggtgaagttggaatgatcaacaaaacgctgggattagcagcaactatcgttggtgcattatatggtggttatttaatgcaacgatggagtttattccgctcactcatgatctttggcatcctgcaagcgatttccaatattggatactggctgttatccattactgacaaaaatatctacactatgggcagcgccgtttttctggaaaatatctgtggcggaatgggaaccgctgcatttgttgccctaattatggcgttatgtcataaatcgttctctgcaacacaatttgctttattatctgctttatctgctgttggacgagtctatgtcggcccaattgcgggttggttcgttgaattacatggctggccaaacttctatctattctctatagcggcttctgttccaggcttattactgttatttatctgccgccagactctggtttatacccagcgaactaacgattttatgccacgtactgaattcaaaaattcctatcgtctagcgcttggcttactatcattagcaagcatcttgctcacattctggttatttaccatcaccaccaatgctcttaactggactcatgcaccttatctggccgaaacattgctattatgggcagcacaaattggtatcacaggcatcattctcggtagctttctagattatctcgcattaagaaggaacaaattggcttaa

SEQ ID NO: 9934 - DNA, 579 bp, Photorhabdus luminescens
atgttgaaaagaatcttattcccattcattacgctttttcttcttgctggttgtgccgctcccagcaatatcctgactatcgaacctaaaattacattgccaacagcagatccaacaatgggcgcgattaccatcagtatcagcggtgccgacaatcgtcagtctcagacacttgctcaagttaaccgcaatgcaaagctggaaatactgaaaccctcccgtgatctgcgttttctactccaagaaatcctggaaaaacagatggccgcccgtggttatatgattggctctccagccaatgccaatctgcaaattattgtgaacaatctatatgcagacgttaaagaaggtagcctgcgccataatatttcaacaaaagccgatatttccatcattagtacagcgcaaaatggcagtaaacaagttaagaattaccgcactagttacaatgtacaaggtcctttaggcgcaactaatgagaaaattgctgatgcagtcaatactgtattatcagaagtcatagcagatatggctcaagatccttccgtcagtaatttcatcaaacaaaatgctcgctaa

SEQ ID NO: 9935 - DNA, 315 bp, Photorhabdus luminescens
atggtgtatcaggatatagaagagaaattacaggttgcatttaatccctcatatcttgaggtcattgatgaaagttatcgtcacaatgtacccataggttctgaaagccattttaaagtcgtcatcatcagtaataaatttgctggtgaacgtatgctgaaccgccatcgttccgtttacagcgtattatcggcagagttggccgcaggtgttcatgctttggcgttgcatacctacacagaaaaagagtggaatgaattacaggatactgttttagcgtcaccggcatgtcgtgggggtaatattgttgtctga

SEQ ID NO: 9936 - DNA, 1305 bp, Photorhabdus luminescens
atgcaagtttctgttgaaaccactcaaggccttgggcgtcgtgtgacaatcaccgttcctgctgccgatgttgagaaagcagttagtagtgagttggtcaatgtagcaaaaaaagttcgtatcgatggtttccgtaaaggcaaagtgcctatgaacgttgttaaacaacgttacggtgcttctgtcattcaggacgttctgagtgatctgatgcaacgtaactttattaatgcaatcatcgaacaaaaaattaatccagcaggtgcgccaagttatgcaccagaacaattcaaaaatggtgaagatttcacttactctgtagagtttgaagtttatccagaaattgaattgaaagatctggaatctattgaagttgaaaagcccgttgttgaagtaaaagacgaagatgttgatgcaatgctggaaacattgcgtaagcagcaggctaattggaaagaaaccgaagaagctgttggtgcagaagatcgtgtgactgttgacttcaatggttctgttgatggtgaagagttcgaaggtggtaaggcttccgattttgtgctggctatgggccagggccgtatgatcccaggttttgaagagggcattgttggtcataaagcaggggaagaatttaccattgatgtcaatttcccagaagattatcacgctgaaaatctgaaaggtaaagcggctaagtttgcaatcacgttgaaaaaagtggaacagcgtgagctgccagagtttaatgaagaattcatcaaacgtttcggtattgctgatggcactgttgatggcctgcgtgcagaagtacgtaaaaatatggagcgtgaactgaaaaatgcagttcgtaaccgtattaagtctcaggttatcgatggattagttaaggttaacgaaatcgacgttcctgctgctattgttgatagcgaaattgatgttctgcgccgtcaatctgctcagcgtttcggtggcaatgaaaaacaagctttggaactgcctcgtgaactgtttgaagaacaagctaagcgtcgcgttgttgttggtttgttattaggcgaagttatcagtagtaatgagctgaaagctgatgaagaacgtgttaaagcattaattgaggaaatggcttctgcctatgaagctcctcaagaagtgatcgaattctatggtaaaaaccaagaattgatgaataatgttcgtaatgttgctttagaagaacaagctgttgaagttcttttgggtaaagcaaaagtttctgaaaaagaaacaactttcaatgagttaatgaatcagaatcaaatggcataa

SEQ ID NO: 9937 - DNA, 624 bp, Photorhabdus luminescens
atgtcatatagcgacaagcgggatcaatatgcgcctcacatggctttggtgccgatggtagttgaacagactactcgtggagaacgttcatacgatatctattctcgcttattaaaagagcgtattattttcctgaccggtcaggttgaagatcacatggcaaatctggttgcagctcagatgttgtttcttgaagcagagaatccggaaaaagatattttcttatatatcaattcaccaggtggtgtgattactgcgggaatgtccatctatgatacgatgcagtttattaaaccggatgtcagtactatttgtatggggcaggcatgttcaatgggagcattcttgttgactgctggggcaaagggaaaacgtatctgcttgccaaattcccgggttatgattcatcagccattaggcggtttccaggggcaagctacagatattgaaattcacgctcaggaaatactgaaagtaaaatcgcgtatgaatgagttgatggcaaaacatacgggaagaccgattgaagagatcgcgaaagatacagaacgtgatcgtttcttgtcagcagacgaagccgtagagtatggattggttgataagattttcacccatcgcgattaa

SEQ ID NO: 9938 - DNA, 1272 bp, Photorhabdus luminescens
atgacagataagcgcaaagacggttcaggaaagctgctgtattgctctttctgcgggaaaagccaacatgaagtgcgaaaattgattgctggcccgtcagtgtatatctgcgatgaatgtgtggatttatgtaacgacatcattcgcgaagaaattaaagagcttgtaccacatcgtgagcgtaatgcattaccaacgcctcatgaaattcgtcagcatttggatgattatgtgatcggccaggaaacggcgaaaaaagtgttggcggttgctgtttataaccattacaagcggttacgtaatggcgataccagtaacggtgttgaattaggtaaaagtaatatcctgctgattgggccgacagggagtggtaaaacactattggctgaaacattggcccgttatcttgatgttccttttactatggcagatgcgactacgctgactgaagcgggatatgtgggagaagacgtagaaaacattattcagaaattactgcaaaaatgtgactacgatgtgcaaaaagctcagcgcggtattgtttacattgatgaaattgacaagatttcacgtaaatctgataacccgtcaattactcgggatgtttcaggtgagggtgtacagcaagcgctgctgaaactgattgaaggtacaattgctgcggttcctcctcagggggggcgtaaacatccacaacaggagtttttacaggtagatacctctaagatcctgtttatttgtggtggtgcgtttgcaggtttggataaagtgattggtcagcgtctaaataccagtacaggtattggatttagtgcgaaagtcaaaggtgagtcagaaaaagcgactgaaggcgaattgcttgcacaggctgagccagaagatctcatcaaatttggtcttatccctgaatttattgggcggttacctgttgttgccacgctcagtgaattgagtgaggaagcgttgatccagattttgaaagagcctaaaaatgcgttgactaagcagtatcaagcactgtttaaccttgaaggtgttgatctggaattcagaagtgaagccctgacggctattgctaagaaagcaatggttcgtaagacaggtgcccgcggcctgcgttctatcgttgaaggcgcattgctggacactatgtatgatctgccatcaatggaaaacgttgggaaagttgttgtagatgaatcggttgtcaatggtcaatctgcgcctttactaatttacagcaaaccggatgcccaagtttctggtgaataa

SEQ ID NO: 9939 - DNA, 2355 bp, Photorhabdus luminescens
atgaatcttgagcgttccgaacgcatagaaatccctgtattgcctctgcgcgatgtggtggtttacccgcatatggtgatcccattgtttgtagggcgtgagaagtctattcactgcctagaagcagcaatggatcatgacaaacagatcatgttggttgcgcaaaaagaagcttcaactgatgagccaggggttaatgaccttttctccgttggtacagtagcttctattttacagatgttaaaattgcctgacggcaccgtaaaagtgcttgtcgaagggttgaaacgtgcccgcattacaactctgactgacaatggcgaacatttttctgctcatgctgagtatcttgactcaccgatcgttgatgaacgtgagcaggaagtgatgatcaggacagctattaatcagtttgaaggctacattaagctaaataaaaaaatcccgccagaggttttgacttcgctacacagtgttgaagatgcagctaaattagctgatacaattgctgcgcatatgccattgaaactcagtgataaacagactgttttggaaatgtctgatgtcgttgagcgtcttgaatatctgatggcaatgatggaatcagaaattgatttgttacaggtagaaaagcgcatccgtaaccgcgtgaaaaaacaaatggaaaaaagtcagcgcgagtactacctgaatgagcagatgaaagcaattcaaaaagaactgggtgaaatggatgatgcgcctgatgagtatgaaactctgaagcgcaaaattgaagcggcaaaaatgcccaaagaagctcgtgaaaaagccgaagctgaattgcaaaaactgaaaatgatgtctcctatgtcggcggaagcgacagttgtccgtagctatatcgattggatggtgcaggttccgtgggttgctcgcagtaaagttaaaaaagatttggttaaagctcaggaaactctggataccgaccattatggtttagagcgtgtgaaagagcgtatccttgagtatctagcggtacaaagccgaattagcaaaattaaaggaccgattttatgtctggttggtcctcctggggtgggtaaaacctctttaggtcagtctattgcacgagcgaccgggcggaaatatgtgcgtatggcattgggtggggtccgtgatgaagcggaaattcgtggtcatcgccgtacttatattggctctatgccgggcaaattgattcaaaaaatgtccaaggttggagtgaaaaatcccctattcctactggacgagattgataagatgtcgtccgatatgcgtggtgatccagcttctgccttattggaagttttggacccagaacagaacgtggcatttaacgaccattatctggaggtcgattatgatctgtcagatgtcatgtttgttgcaacatccaactctatgaagattccggcaccattgttggatcgcatggagattattcgtctttccggttataccgaagatgaaaagttaaatattgccaagcgtcatttgctgcctaagcagattgaacgtaatgctctgaaaaaaaatgaattaactgttgatgacagtgctattattggcattatccgttactacactcgtgaagccggagtgcgtagtttagagcgagaaatttctaagctgtgccgtaagacggtgaagacattgttaatggataaaaatttaaaacatattgaaatcaattcagataacttgaaagattatctgggtgttcaacgtgtggattatggtcgtgcagatacagaaaaccgtattggtcaggtcacagggcttgcatggactgaggttggtggtgatttactgaccattgaaaccgcgtgtgttccggggaaaggtaaactaacctataccggctcactcggtgaggttatgcaggaatccattcaggcagcattaacagttgttcgtgctcgtgctgataagttgggtatcaactctgatttctatgagaaacgggatattcatgtccacgttccggaaggtgcgacgccaaaagatggcccaagtgcgggtatcgccatgtgtacagcattggtctcctgcctgaccggtaatccagttcgggcggatgttgctatgacgggcgaaatcacgttgcgtggtttagttctgccaatcggtggcttgaaagagaaactattagctgcccatcgaggtggaattaaaacagtcttaattccggaagagaataaacgtgatctggaagaaattccccagaacattgttgcagatctacagatccatccagttaaacgtattgaagatgttttggctattacattgcaggaccctgtgtttggcgcagaattagtgtcagtcaaatag

SEQ ID NO: 9940 - DNA, 276 bp, Photorhabdus luminescens
gtgaataaatcacaactgatcgacaaaattgctgctgactctaatatttctaaagcagctgcggggcgtgtagtagatgcattcatttcttctgtaacgggtgcattgaaggatggtgatgatgttgctctggtgggattcggtacttttgctgttcgtgaacgttctgcacgtacaggccgtaaccctcaaacaggaaaagagctcaaaattgctgcggctaaagtacctgctttccgtccaggtaaaggtttgaaagacgctgttaatgggtga

SEQ ID NO: 9941 - DNA, 1872 bp, Photorhabdus luminescens
atgatggacaacctacgcacggcggcaaacagtcctgtgcttaaaatcgtgctggctctcattatcctgtcttttgttttgacgggggttgggggctacctgacaagtggagctggtagttatgctgccgaagtgaatggccaggctatcagtcgtgctcaattggagcaggcgtttcagcaagagagaaatgcattgcaagagcaattaggagataaattctcggtgttagcaagtgacgaacaaagcatgaagcagattcgtaatcaggctttggatcgtctaattaataatgcattgattgatcaatattcccgtgaattgggtttatctgctagtgatgagcaagttaaggattctatccgaaatacttcttactttcagacagacggtaaatttgataacaacaaatatctggagttgctcaaccgtttcaatatgagtccggatatttttgcggaacaaacacgccagaatttagttaaccaacaattaattatggccttttctggcagtgaaatagcattgcctggtgaggtgaaactcaatgctgaattgcttctgcaacagagaactgctcgtatagctacactggagctgaagaaaattcaggcgcagcaggaagtaacagataaagatttgcaagattactataatctgaataagagcagctttattgcttctgaagaagtgaaaatcagctatatcaagatggatgctgtagatgaaatgaataaagtttcagctacatccgctgatgttgatgcttattatgagcataatttgaagcgttatacacaaccagagcagaaaaaatacagtctgattcagcttgcaactgaatctgaagccagaaccgtgtttgatgagttaaataagggtgctgattttggtaaattagcgactaaaaaatctacggataagttttcagcgaaaaatcatggtgagatcggctggatggaagaagatgctcttcctgaagaattgaaacaagctaatttgaaagaaaaaggccaaatttcttctgtgattaaggttcctaatggcttcgctattttccatttggatgatgttaaaccccaaataattaagcccttatctgaagttcgttctgaaattgagaaaatggttaagcaggaaaaagcggtagatgctttctatgctctgcaacagaaagtcagtgatgctgctaccagcgataatgaatctttagctgcggctgaggaagtttcaggtattaaggttgtgacgactgattggtttgatcgcaatagtgtgccagcagagattaattttggtgccgttattcatgccatttttgaaggtaatcttgttgatggacaggggccaacaggaactaattctgatgttatctccgttgaaggtgatcgtgcatttgttctgcgtgtagataattataagccagaaacagtacagcctttcgagaaagttaaagatcaggttactgaactggttaaacgccagaaagctgaaaaacagcttcaagtcgaaagtgagaaattactgaccgccttaaaagaaggtaaaggtgagcaagccttgaaagatgcaggtattcaatttggtgaatctcaggttattcagcgtacatctcaggataatgtgttagttggtgcagtattcgctttaccactgccaaaagaaggtaaggcagaatatggtttgacgaaaaatagtttggatgacgttgtgttgatccaactggataaagttactccaggtgttgtatccgaagaacaaattaaaagcatgactgatggctatcagagtgaaatgggtaacgctatgctggagtctttactgattagtttgcgtgaaaaagccaaaattaagttagggcataccgaataa

SEQ ID NO: 9942 - DNA, 375 bp, Photorhabdus luminescens
atgaaaaaatcgggaattttatctgttttgctcgctggcttgctttatgcgtgtggagggcaattcgcgattgccgccgagcaagtaaaagataaagtcgctaaagcagccagtactaccagccattcttcaccagaaaagcaattacagcaacaggacgctttgaaagtagaagaaaagggaaaggtgaatattaatactgcaagtgctgaagagttagcaagagcattaaatggtattggggtaaaaaaagcacaaggaattgttgaatatcgagaaaaacatggtgcgtttactgcggtggaacaattgcaggaggttcagggaatcgggccagtttttattgaacgaaatagaagtaagttgagttactag

SEQ ID NO: 9943 - DNA, 408 bp, Photorhabdus luminescens
atgagttcaattataaaagttcatggttatcatatagatttgtttcaacatgtgaacaatgctcgctatttagaatttctggaaagtgctcggtgggaatggttgcataagcattctgtagtggaatggatacagagaaacaatgttgggtttgcagtggtcaacattaatattaattatcgtagttcagcagttcttggcgatgaattggaagtggattgccgattgacggaactgaggaacagaagtggtgtattttctcaggaaatcatacgtagaaggaataatcaactcattgcagatgctaagactacgtttgtctggattgatagaaagacacaaagagcattatctattgaaggtgaattacgtgaaataatgggggctttggtgaaaacagggcaatga

SEQ ID NO: 9944 - DNA, 699 bp, Photorhabdus luminescens
atgagacgagctgttgttgtattcagtgggggacaagattccactacctgcctgattcaggcaattaatcaatatgacgaagtacattgtgtcacttttgattatggccagcgccatcgtgccgaaattgatgttgcacgtaatgtcagccattttcttggtgttgttgcacataaagtactggatgtcacattacttaatgaactggctctcagcagtctgactcgtgataacatccctgtccccgaccacagtgaaagcgaaaaaagtgccatacccagtacatttgtccctggccgcaatattttgttcctgacactggctgctatatatgcttatcaagttgaagccgaagcagttattactggcgtatgcgaaactgatttctccggttaccctgattgccgtgatgaatttgtcaaggcattgaacaaagctgtaagccttggcattgcccgtgatatccgttttgaaactccattgatgtggctcaacaaagcggaaacttgggcattgtccgactactaccagcacttagactttgttcgtagtcagacactaacttgctacaacggcattcaaggtaatggatgtggtacatgtgcagcttgtcatctcagagctaacggattagaacaatatctgaatgctccggagaaaataatgactgaaatgaaagcaaaaacacatctagtttaa

SEQ ID NO: 9945 - DNA, 1053 bp, Photorhabdus luminescens
atgtcacacagttggaccaccaaggcaatcagagagattcaagcagaccatcaacgcagctctgatactcatcttatccgccttaatttgccagtttttccaggtatccatttatatctaaaagatgaaagcacccatccaaccggcagtttgaaacataggcttgctcgttctttattcctttacgcgctgagtaatagttggataaaggaaggtaccccggttattgaatcctcatcgggtagcactgctgtatccgaagcctattttgcccgcctgcttgggctaccttttattgctgttatgccctcatacactgcgaaacgtaaaattcaggaaattgaattttatggtggtaaatgccattttgttaaccattcagcacaaatatatgacgaatcagaacgactagcgaaagaactaaatggtcattatatggatcaatttacttacgccgaacgagcaacagactggcgaggtaacaacaatattgctgaaagtatttttcgccagatgcaaatggaaccatttcctgaaccagattatatcgttatgagcgctggtactgggggaacctctgcaactttaggacgctatatccgttaccaagggcataacactaaactaattgttgtcgatccagaaaactctatattttatgactattaccgtcaaaattgctgtgatattcgtggcaattatagcagcaagattgagggtattggccgccctcgagcagagccttcttttattccctcagtcattgatgacatgatccaaatacccgattgcgccagcattgcaacaatttactggttggaaaaattactaggcagaaaagttggcgcatctacggggactaatgtctggggagcgcttctgcttgctaaccaaatgcatgagcgtggagagcaaggtgcaatagtaactttactgtgcgacagtggtgaacgttatctcgatacttattacaatccagattgggtaaaaaataacatcggcgatatctctccttatctcaaacaactacccaatttccgtagttataagtaa

SEQ ID NO: 9946 - DNA, 462 bp, Photorhabdus luminescens
atgttggataaaacagaccgcaagttgcttaagttactacagaaagattgtagtctgtctctgaatgcattggcggaagctgttaatcttacctctactccttgttggaaacggttaaaacgacttgaagatgaaggctatatcgttggtaaagttgctttgcttgatagcgaaaaattaggattagggctgacagtgattgttatgatcagaactcagcagcatagcagtgattggtatgagcaatttgttgcatttataaagcaaatgccagaagtcctagctttttatcgtatggctggtgaatgtgattatttaatgcacgtagaagttgtggatatgaaaagttatgatcttttctacaagcgtatggttaatggtgttccggggttgattgatgtgacatcgagttttgcaatggaaaaaatcaaatacactacagcattgccgataccagattaa

SEQ ID NO: 9947 - DNA, 1770 bp, Photorhabdus luminescens
gtgagattgttttctcaattaagttggtacttccgtagcgagtggcgtcgctatcttggggcagtaactctgcttattattatctctattctactactcattcctccatatctggtgggtgtaatcgttgatgggatcagcactgcgtctatgtcattttaccaattgatggtgtgggcgggagttatactggttatcgcattgattgtctatatcttgcgttatatatggcgtttatggttgtttggggcgtcatatcaattagccgttaaattgcggaataatttttaccagcaacttagccgacaaagccctgaattttatttgcgtcaccgcacaggggatttaatggctcgcgctactaatgatgtggatcgtgtagtgtttgctgcgggtgaaggtgtgcttacgttagttgattcgctagttatgggctgtgcagtgctaattatgatgagcatacaaattagttggcaattaactttactgtctttgttacctatgccgattatggcaatcattattaaacgatatggtgatcaacttcatcgtcgcttcaaatctgcacaaggcgcattttctgctctgaataaccaggctcaagaaagtctgaccagtattcgtatgattaaggcgtttggccttgaagatctgcaatcaaatcagtttgaacaagttgccgtggaagctggtcgtaagaatatgtatgttgctagggtggatgcgcgatttgatccgacaatttttattgctatcggtatgtcaaatttactggctatcggtggtggtggttggatggtgttaaatggtgttttaacactcggtgagctcactagttttgtgatgtaccttggcttgatgatttggccaatgttggcattggcatggatgtttaatatcgttgaacggggaagtgccgcttatagtcgtatccgtagcttgttgcaggagcctccggtcattaaggatggtattggcaatttattgcctgagcgcggtattctggatgtgaatatcaaagcgtttaattatccgcaaagtaacaaaactgttcttagtcaaattaatttccagttattacctggacagttattagggatctgtggttcaactggttcaggtaagagcacattacttgcgctgatacagagacagtttgatgtgactgatggagaaattcttttccaatcgctcaaaattgcagatatcaggttagatgaatggcgagcacgatttgctgttgtcaatcaaaccccctttttattttcagatactgttgccaggaatatcgctttgggacgtcctgatgcaacacaggaacagattgaagaagttgcccgtcttgccaatgttcatgaagatattcttcgtttacctgaggggtatcagacagaagtaggcgagcgtggggtaatgctttctggtgggcaaaagcagcgtatttccattgcgagggcattacttttagatgccgagattttgattctggatgacgctttatctgcggttgatgggcaaactgaatacaatatcctacaaaacctcagtcagtggaggcaacaacggacggttatcattagtgcccaccgtctgtctgcattaactgaagcggataatatcctggtgatgcagcaaggttctgttatacatcagggacggcatccgcaactggcagagcagccgggatggtatcgtgatatgtattattatcagcaacttgaagcagaattggatggcgaggaaacagcagaaggggataaagatgactaa

SEQ ID NO: 9948 - DNA, 1785 bp, Photorhabdus luminescens
atgactaaagttcgtcaattgtggccgtctctgaagcgtctgttggtttatggaaaaaattatcgtaagccgttggggctggctgtactcatgttatggggggctgcaattgcggaagtcagtggtccggttctcattagttattttatcgataatatggttgcaacgggtaatatgcctactagagtggttatcgggctagctataacttttattgttctgcaactgattacggcggcgttacactattttcaggctttattgttcaatcaagtgtcagttgatgtggttcagcagcttcgtactgatgtgatgaatgcagcattgcgccagcctctgagtgcttttgataatcaaccggtagggcagttgatttcccgtgtaacgaatgacaccgaagtcattaaagatctttatgttaatgtagttccatcggtatttcgcagcatggcattgattggtacgatgctgattgctatgtttatgttggaatggcgtatggcattgattgcaattcttatttttcctgtcgtattgattgttatggcaatatatcagcattttagtacacccattgtccgccgggtacgtagttatttggctgatattaatgatgagtttaatgaagtcattaatggaatgagtgttattcagcagttccggcagcaggcgcgttttggtgaacgtatgttgttaaccaatcgggcccattatcaggcgagaatgcaagcgttgagattagatgggcttttgttacgcccattattgagtttgctatctgctatggtactgtgcggtcttatcgtgttgtttggaattagtgggccaggggcgattggtatcggggtattgtatgcttttattaattatttggggcggttgaatgaacctcttattgagctgacatctcagcaatcgattttgcaacaagctgtcgtttctggcgagagaatatttgaattaatggatagccctcaacaaggttatggtatggatggtcagccactatccagtggtcgaattgatatagaaaatgtcagtttttcctaccggcatggaaaaatagttttgcaagatattaacttacaggttccggctcatggttttgttgctttggttggtcatactggtagtggtaaaagtacgctggcaaatttgctgatgggatattacccgtggcagaaaggggaaatttatctcgatggcaggcctgtatcatctctgtctcattcggtattacgcaatggtgtggcaatagttcagcaggacccggttgttcttgcggactctttctttgacaatattacgcttggtcggaatatttcagaagagaaggtttggcaagtactggaaacggttcaattagctgagttagtacgtacattgcctgatggacttcatactatcttgggagagcagggtaatacgttgtcagccggtcaaaaacaattgcttgctatggcgagagtgttagtgcaaacgccacaaattttgatccttgatgaagcgactgcaaatattgattctggtacggaacaggcggtacaacaggctttgagattgattcgtcaacaaacaacattgatcgtgattgctcatcgtctgtctaccattgtggaggctgatactattctggtgctgcatcgtggtgcagttgttgaacagggatgccatcaacaattatttgtgagtcgtggacgttattatcagatgtatcagttgcaacaagtaggtgagacattaaatgaatgtggcacaatctctgagaaagaggtgttaatttaa

SEQ ID NO: 9949 - DNA, 339 bp, Photorhabdus luminescens
atgaagctcattacgacaattataaaaccattcaaattggaggatattcgggaagttctttctggtcttggtgttcaggggttgaccataacagaggtaaaaggatttgggcgtcagagaggacatgcggagctgtatcgtggagctgaatatagtgtcaattttttacctaaaataaagatagatattgctgtagcagatgaattggttgaggaggtcattcatgctattcagcaatcagcttttactggaaaagttggcgacggtaaaatctttgtcattgaattacaacaggctattcgtattagaacaggagaaactaacgatgcggcactgtaa

SEQ ID NO: 9950 - DNA, 1320 bp, Photorhabdus luminescens
atgcggcactgtaactcactgatagagaagatagatatgaaaaggcaattctcagtggctgccagtgttgtggccagttgtgtaccatcattatctcaggctgcggaaggcgttgttgataaagcggataatgcttttatgatgatttgtacagtgcttgttctgtttatgaccattccgggaattgctctgttttatggtggattgctacggagtaaaaacgttttatcgctaatggctcaggtcatggtgagctttgctttagtatgtgtgttgtgggtgatttatggttatagcctggcttttgagccagggaatggttttttcggtggttttagtcaagtgatgctaaagaatttggcattcactgacttaagtggcaatttttatcagctaattcatgtggcatttcagggctctttcgcttgtatcactgttgctttgattattggcgcgttaggggagcgtattcgctttccggctttgttagtttttactgtgttgtggctgacattttcttacttgcctatggcgcacatggtttgggggggaggtgtgctttcacaagatggagcattggattttgctggtggtacggttgttcatattaatgctgctgtagctggattggttggtgcttacttactgggaaaacgtactggctttgggaaagaagcatttaaaccgcataacttgccgatggtcttcacgggcactactgtgctctatattggttggtttggttttaatgctggttctgctagtgctgctaatgagatagctgctttggcatttttaaataccattgtggcgactgccgccgctatcctgtcatgggtttttgcagagtggcttttccgtaataaaccgtctcttttaggggcatgttcaggctgtattgctgggctggttggtattacacctgcggcaggaatggttggtgttggtggtgcattaatcattggcctgattgcgggttttaccggactttggggggtggtggccttaaaacggtggttacgtgttgacgatgtgtgtgatgtattcggcatacacggcgtatgtgggatcgtaggttgccttctaacaggggtttttacggctaaatctttgggagggatcggttatgcagagggtataaccatgttgggacaagttggtattcaggcttttagtatactggtttgtgtgatttggtcagtcgttgttgcctttattgcttttaaaatagcagatctgttggtagggctgcgggttacggttgaaattgaaagggaagggttggacattaattctcacggagagagtgcttataattaa

SEQ ID NO: 9951 - DNA, 864 bp, Photorhabdus luminescens
atgagcaagtcattacagaatctgataaatttgatgaaattggaaaaaattgaggaaggtatttaccgagggcaaagcgaagatctcggttttcctcaggttttcggaggacaagtgattggtcaggcactgtatgctgccaaacaaaccgttgtcgatgaccgaatgggcaactctttccatagctatttcttacgccccggtgacagtcacaagcctatcgtctatgatgttgagattttgcgggatggaggaagttttagtgcccggcgagttagtgcaatacagaatggtaaacctatcttttatatgactgcctcatttcaaagtcacgaagaaagttttgaacaccaaaatataatgccggatgtaccctatccagaagaacttatccctcaggatgaaattgtgaaaaaaatgtcgcatctgctgccacagaagatgcagaatacgcttctttttccctgcccgttagaaatgagacccgtaaaatatcacagtccattcaattgtccaccagaagaacctatacgctatgtttggttccgcagtaacggcaatatgcctgataatccttttattcatcaatatctgcttggctatgcctccgattttaactttctgccaacagcattacagccacatggtgtcgggttccttgagaaaaatattcagatagcaacaattgaccattctatgtggttccaccgcccgtttagactagatgactggctgctatatgctgtagatagtccctcagcttccggtgcccgtggttttgttcggggacagatttataatcgtgaagggatacttgttgcttccactgtacaggaaggtctgattaggaaacgcaatagataa

SEQ ID NO: 9952 - DNA, 447 bp, Photorhabdus luminescens
atgaaattatggcagttacccgctggcgtattactagcggttgctttggttgggtgtaatgtcaaaggtgctgaggtagcagatactcaggtggagcagattgaaaatctaatgaaacggtcttttgttgaaggtaatattaatatactacagcgtatagcattgccagcagatgctgttctgacagtggcgttatctgatgtgtctttggctgatgcgccttcagttactctgtctcagaaggtagagcgtttaggtgggaaacaatcacctttccattttgttttgccttatcagccaaacaaaattaagccgaatgcacgcattgttgtcagagcttctgtttcgctgcatagccgcttgatgtttgttacagatacagcatatgaagtgattaataatgggaagactaaagatgtcgaaattacgttgaaagccgttagataa

SEQ ID NO: 9953 - DNA, 204 bp, Photorhabdus luminescens
atgactaaaactgattatctgatgcgtttaagaaaatgcaccacgattgatacactggaacgtgtgattgaaaagaacaaatatgaactttcaggagatgaacttgaactattctactctgctgcggatcatcgcctagctgagctgaccatgaataaactgtatgatagaattccaccttcagtatggaaatatgttcgctaa

SEQ ID NO: 9954 - DNA, 3150 bp, Photorhabdus luminescens
atgcctaaattttttatagatcggccaatctttgcatgggtaatcgcaattatcaccatgctggctgggctgttggcaattatgaaattacccgtagcgcaatatcctactattgcaccaccggcgatttctatctctgcaacttatcccggcgcagatgccaccactgtgcaaaacacagtgactcaggttatcgaacagaacatgaatggtatcgataacctagtttatatgtcttccgacagtgattctgctggaaacatgaatatcacactaacctttgaggccggtactgatcccgatattgcacaggtacaagtgcaaaacaagctacaactcgctatgcctctgttaccacaagaagtgcaacagcaaggtatacgtgtagataagtccacgacctctttcttgatggttgccggattcatctctgaagatggttcaatgtcacaggacgatatctctgactacgttggtgcaactgtcaaggaccctttaagtcgcgtaaccggtgtaggtgatacaatgcttttcggtaaccagtatgccatgcgtatctggttaaatcctgacaagctcgttaactacaagatgacgactttggatgtaataaatgcaatcaaagcgcaaaataaccaaatagccgccggtcaattagggggaacccctccggttccaggtcaacgcctgaatgcgtcgatcattgctcaaacacgtctaacttcaccggaagagttcagtaatattctcttgcgcgtcaatactgacggttctcaggtccgtctgaaagatgtagcaaaggtggaactaggtgcacaaagctacaacatcattgcccgctataacggtaaacctgctgcgggtatcggtgtcaaactagcgacaggcgctaacgctttggatacatccaaagcagtaaaagaagcgctaaacaatatggaacctttcttccctcacgggctgaaaatcgtctatccatatgacaccacaccattcgttaaaatctctattaacgaagtggtaaaaacactggttgaagcaattatgctggtgttcgtggtaatgtacctatttctccaaaatttccgcgcaacactcattccaaccattgcagttccagtcgtactcttaggaacatttgcaatactcgctacatttggctattcaataaatacattaaccatgtttgctatggttcttgccattggcttactggtagacgatgccattgttgttgtagaaaatgttgaacgtgttatgcaggaagaaggtctatcgccaaaagaagcaaccaggaaatcaatgggacaaatccaaagcgccttagttggtattgcaatggtgctgtctgctgtatttatcccaatggccttcttcggcggttcaaccggtgcaatttatcgtcaattctcgatcactatcgtatctgcaatggtattgtctgtgctggtagcattaatcctgacaccagctctatgtgctaccatgttgaaacccattgccaaaggtagccatggtaagcagaccggcgtctttggctggttcaaccgcatatttgacaaaagtacccaccactatactgacagcattggtcgcattctacgtaatacaggccgttatctggtaatttatgtattcctggtggcaggtatggccgtcatgttcacacgtttaccatcctcttttcttcctgaagaagatcagggagtattgctgacaatggttcaattacctgcgggggcgacacaggaacaaacagaaaaagttctagataaagtaagcgattacttcaatacagaagaaaaagatcgtgtggtttctgtatttactgtcagtggctttggttttagtgggcaaggtcaaaacactgggttgggatttataagcctgaaagactggggtgaacgtccgggggctgaaaacaaagtacctgctattgttgccagggctagtgctcacttccagacaatcaaagaaggtatggtttttgcgtttaacatcccggcaattgtagagttaggttcagcaactggctttgattttgaattaattgataaagcaaaccttggacatgacaaactgacagcagcccgtaatcaattacttggcatgatacaacagcatccagatatgttagtaggtgttcgtcctaatggtcaggaagatacccctcaatatcggctcagaattgatcaggaaaaagctgaagctctcggtgtttccatcgctgatattaactcaacactcagcacgatgtttggtagtaactatgtgaacgactttattgatcgcggtcgtgtcaaaaaagtttacgttcagtcggaagcaccttatcgtatgttgccaagtgacatctacaagctgtatgtccgtaacaaacagggtgaaatggttccattctctgcctttacagacacgtccaaagaaccctggacctacggttcaccacgtctggaacgttacaacggcttaccatcaatggaaattctgggtgaagccgctccgggtaaaagtaccggtgatgcaatggccctaatggaagagctggcatctaagctaccaaatggaatcggtttcgactggacaggtatgtcctatcaggaacgtttgtctggtaatcaagccccagctctatatgcattatcattgatagtggtattcctctgtctggctgcactgtatgaaagctggtcaattccattctcagttatgctagtagtaccattaggtatcgttggagccttgttagcaacaacattccgcggcttggataacgatgtttactttaaagttggcttgttgaccactatcggtttgtcagctaagaacgcgatactcatcgttgaattcgccaaggacctgatggaaaaagagggcaaggggttgatagaagctacgctagatgcggtaagaatgcgtcttcgcccaatcctaatgacatcactagcatttatgttaggtgttatccccctagtactgagtaatggtgcaggatccggctctcaaaacgcagtgggtactggggtattaggcggaatgattgcagcaacctcgctagccatctttttcgtgccggtattctttgtggttataagacgacgtttcagtaagaaagctgaggagattgaacccgcatcagaatctcactaa

SEQ ID NO: 9955 - DNA, 1194 bp, Photorhabdus luminescens
atgcgaataaacaggggagttttgcctctggctacagtactggtactctcaggcagcttagctctttcaggatgtaacgacaaagactctcagcaagttgctgggaaccaacaggctcctgaagtcggtatcgtgacgctgaaaactgaacctctgatggtcacgacggaacttccaggccgaacatcagccttccgcattgcagaagttcgtccacaagtaagtggtataattctgaaacgaaattataaagaaggtagcgatgtaaaagcaggcgcttctttatatcagatagatccagcaacttaccaggctgcctatgacagtgctaaagctgatttggcaaaagctcaggctcatgcagagatcacacgcttgacagcgaaccgatataaatcactgttaggtacaaactatgttagtcaacaggaatttgataaagccagcgccgactacgcacaagcggatgctatagtacaggcagcaaaagcggtcgtagagaccaaccgtatcaatttggcatataccaaagttacagcgccgattagtggtcgttccggcaaatctacgataactgaaggtgctctggtttctgttggtcaaccaacagcactgacaactgttcaacaactggatccaatttatgtggatgtcactcagtcaagtgatgattatctgcgtcttaaaaatgaaatcgctaaaggtattgtgcagaaagaggacaataaggctaaagttcacctaatcatggaaaatggtaaaaactacagtgaaacaggttacttagaattctctgatattactgtagatgaaacaacaggctctatcactatccgtgcaatattccctaacccaaatgaagagctacttccaggcatgtttgttcgtgcaaaattggaagaaggtattcgccaggattcaatactggttcctcagcaaggagttacccgtacacctcgtggtgaagctactgtcatggtggttggtgcagacgaaaaagtcgaaccgcgcgttatcactaccaaccaagctattggtgataaatggctagtagcttccggtctgaaagcaggtgatcgggtcatcgttactggtttgcaaaaaattaaacccggcatcccggttaaagcagaagaagtggacttaaatgcaaaacctgctgcgaaccaagctgaacctgcgaaaaagtcttaa

SEQ ID NO: 9956 - DNA, 642 bp, Photorhabdus luminescens
atggcacgaaaaactaaacaacaggctgaggagacccggcaacagattatagacgcagctataaaagagttttctgagcgcggtgtctcggctacttcactgacagatattgccacaacggctggggtaacccgtggggcaatttactggcattttaaaaataaagtagacctgttttccgaagcctgtagaataacagattctaagattgacgaattagaaaaagagtatcaagcaaaatatcctaataatccactcctgattttaagaactttaatcatccatatcctgacgtcggtcgttgatgatccgaaaaaccggctattaatggagatttttttccacaaatgtgagtttgttggtgaaatgtctgccttggtggaagtgcgtcaggaactgtgtgttgcagactatgttcgtattgaagagtctctttctggttgtattgcatcaggccagcttccttataatcttcatctgcggcgagcggctatcatgttaagaggattgataacgggcttgttggaaaattggttatttgcaccagatagttttgatattcagaaagaagcggagtcgttagtggatagttttatcgatatgcttaaatatagtgagcatatgaaaattgctgaaaaatga

SEQ ID NO: 9957 - DNA, 675 bp, Photorhabdus luminescens
atgctggaaatacgaaatgtaacgtacgcctatggcgagcgagtgatattgcaagaattaaatttgcagctaaaggaaaaacgcattgccatcataggtagcaacggttgtggtaaaagtacatttgcacgtcttcttaatggattattggtgccgaaaaatggtgatgttttggtggatggtttgaacaccagaacggagggtaaagcgatccggcgtaaggttggtttcgtatttcagaatcctgacaatcagatcgtgtttcctgttgttgaagaagatttggcctttggaatgaaaaatcttggtttttccaaggacacgattcgacaaagaactcaagaggcgctttcacgctatgatttacttcaatttagggagcatccagcccatcttttaagtggtggtcagaaacaactccttgcgatttccggtgttctggtgatggagcccgattacattattttcgatgagcctacaaccttgctggatttacgaaacaagcgccgtgttgccgcagcaatcgataacttatctcaaactgtaattgtagtgtctcatgaccttgattttttggcgggatttgatcgtgttctggtttttgatgatggtcgtgttgttgttgatgacataccctctattgctattcctgaatacgtaaggatgatgttatga

SEQ ID NO: 9958 - DNA, 630 bp, Photorhabdus luminescens
atgagcctgtctggatataatcctggttcatcatttgtgcatcgagtgagtcctgggtttaaaattatttctttgctcattctgggaacattgcttttcgttgttccgcgtatcgatctttctgctgcggcattggcgggcatcgtacttttatacttgttagccaaaatctcattaaaaacggcttggatgcaattacggccggcgttatggatcttcgtgcttatttttatagtccaattgtttctacaccactggaccgcaggtgtacttgtaatagttcgtcttatctctcttttattgttggcctcgctggtcactctcactactcgttcttctgatatgatcgacgcgttggaaaaggggcttgggtggctgtattattttggtatcaatcctggaaaggtgagcttggctttatcgcttgctttgcggtttatccctgttctggcgtcaattacagaagaagtacgggaggcgcagaaagcaagaggtcttgataagagtgtcattgcaattgcagttcctgttattgtgcggatgctcaaaatggcagacgatatttctgccgcgattgaagcgaggtcttatgatccagaatttgacaaaagtaaatcaagcagcaagtaa

SEQ ID NO: 9959 - DNA, 549 bp, Photorhabdus luminescens
atgtctaccaaagatattgtttatatagcactatttgcctctttaaccgtagcactgggtttatttccgccactgacacttcccgttgtgggcgttccgataacagcgcagtcaatgggagcaatgcttgctggtgccattattggtgcgaaacggggtggattggcattgttgctcttttgtgtgtttgtttccgttggattaccggtaatgtctggagggcggggaggattgagtgtatttctcagtccaagtggtggttttattttggcatggccgattgccgcttttgttatcggttatttgtatgagaaaaatcttgcaaaactgaatacctttaaagaagctgtatttcttgtctttggcggaattatggttgtttatgtaatcggtatcccgtggattgccgtatttgctaatatcagcacttggcaagcagccgtaggttcaattgggttcataccgggagatattatcaaaatcgtactggttattttgattgcgaaaacggttcgtcgggcttaccccactcttgaaccgcgttcttaa

SEQ ID NO: 9960 - DNA, 765 bp, Photorhabdus luminescens
atgtcgtcacggtgggtatcaaacgagcttgtcaaattatcatcagaaagcttgcaggcaatcatagacaacaagattccagctgcgatgatagatgattttgcaacgacagaagaaacagaacaactttcgtctgcaatcctgagcataaaggcaaaaccctatgaattcggaaggccggggttttatttgggaaatacactcgctcattatcgtgatcgaccaaaagagcaatatttttctcaagttagcgtagctgaacaagatcgcatccaaattatcaatcaagcttttgatccagttgatcggttcatgcgatacaccaatcacgatacaaatttcagcatttcagtcgcagaagagccggggttcggtccctattttgccggtatcgtccgaattatctccggtggctcagatctacatgtagattacgcacccacttttgcgaaagggaatttaatcatcggagatatatcgactcaacttgcttggaacctctatattttatctccctctcagggaggagaaaccgtgatctataatcaaccattcaagagtactgtggttgataaaacatacaagccgtatgacagttctctattagttgattgcgaatctttcacttttcgacctcaagttggttcagtcgttattttcaacacaactaaccctcatattgtcctgcctgcaagtggcaatcgcattgcaacaggctccttcatcggtgtattaaatgagaagaagctgattttatggtcgtaa

SEQ ID NO: 9961 - DNA, 438 bp, Photorhabdus luminescens
atgacaatatctctgagaggtcatcaccttttgtgtatttttacctacgctggcaacggatattccactggttttgttgaaaattacaataggattattcctcgaattcgggacgaggatatcttgattgtggcagggccggatgacatatgtattcctttgcttggagaagacaaacctcattgctttggcgagagtgtcattgtccgggatagtcgagctttggacgctgttggttctcttatgggccgatcaattgatataggtcatacgttgaggcttgatgagacctatttaaaacaggcgcgatgggctttcaatcgtgggatcataagatctgcttgtataggctgtgaatgggaatcgctttgcactcgaattgctgcggatgattattcttcaacgcttcttaaacgaaatagtggaaagagtgaatga

SEQ ID NO: 9962 - DNA, 168 bp, Photorhabdus luminescens
atgtccgtcgaacatgcaccacccgaagttcaacttgctgttgatctgatctatttactggaatgcaatgaaatcactcctgaaatcgcactcgccgcactggaaatagtcaaacacgattatcaagcaaaattagcgaagcaatcaccatcggcaaaggagtattga

SEQ ID NO: 9963 - DNA, 543 bp, Photorhabdus luminescens
atgaatacgcagccgttattaaatttactcgaaaaacaggtcgatatactggcggaagagatagcaccattagcagacacaccattctctactgcccggtttgatcaggctttatttaaccgacacagcgataaactccgtggttatctacaagaagtcaggcacaacatggaacaactcaaagagtgtgtgcaagatcaccgaaccgaacaggtcgcatttctgactgaacgcttagttgcccaaatagaagcattaaggcgtgaattgtctacccagtcattgagaaaaaaagagagccgatttgagcataaacaacaagctactgacctgtatcacaaactggctgaacatcaggattatgaacgccgcctgctcgcaatgatcaatgatagagagctaaaattgaatcaacaaactacacttagtcatcaacaaaaaatacagaaagaaatcgcggcattagccggaagactagcacgttgccgtcaatctctgatgcgtattgaaaaatcaatcgaatacaaagagaacatggactaa

SEQ ID NO: 9964 - DNA, 552 bp, Photorhabdus luminescens
atgaccgcaaatgcgcagcaactgcaatttattaaagacagtattgaaactattcctgattatccaaaaccgggggttctttttcgtgatattaccactttactggataaccctcttgcctaccaggcaacaattgatcttctggtagagcgatatcagggcaaaggcatcacaaaaatagttggcactgaagctcgcggttttctgtttggagccccggttgcattacgccttggtgttggttttattcctgttcgtaaagcgggcaaactacctcgggaaacattgagtgaaacgtacaatctggagtatggcactgatacgttggaaatgcataaggatagcgtaagagaaaacgataaggtgctggttattgatgatttgctggcaacgggtggtacggttgaagccactgttcgtttaatccgtcgtttaggtggtgaggtttctgaagcggcttttattattggtttgcttggcttaggtggtgttgagcgtctgcaaagacaaggtgtaagtagttttactctacttgaattcccagatcattaa

SEQ ID NO: 9965 - DNA, 1977 bp, Photorhabdus luminescens
atgagctatcaggtacttgcccgtaagtggcgcccacaaatattttctgatgtaattggtcaggaatatatcctgaccgcgttagctaatggtcttgcccatggccggcttcatcacgcctatttattttctggcacgagaggtgtcgggaaaacaacgatcgcccgtttgtttgctaaggggctaaattgtgaaacaggtattactgataagccttgtggtaaatgtgttaattgccttgaaattgaacaggggcgatttgtcgatttaattgaaattgatgcggcttcccgtactaaagttgaagatacgcgtgaattgctagataacgtgcaatatgctccggctcgtgggcgttttaaagtctacttgattgatgaagtacatatgctttctcgccacagtttcaatgcattattgaaaacgttggaggagccacctgagcatgtgaaatttctactagcaacgactgatccgcaaaaattgccagtgactattctttcccgttgtttgcaattccatctcaaatcgctggatataggtcaaataagcgatcagcttgagcgtattcttaaagctgaacatatagagagcgataaccgcgctcgtcaactattggctcgtgctgctgatggtagcatgcgtgatgctttgagtctgaccgatcaggctattgctatcggacaaggcttggtgacaactgaaatagtcagcttgatgctaggaacgttagatgatgaacagccattatcaatcattgaagcattgattcgagctgacggtcagcaggttatggcattggtggaacaagtcgcttcacggggggctgattgggaggatttgctcgtagaaattcttgcattgctgcatcgtattgcaatgctccaattgttaccttctcagccagagagcgattcttcatcaattgaaggccgtttgcggatagtggcaaaagctgtttcaccggaagatttgcaactttattatcaaactttgctgattggtcgtagggacttgccgtatgcaccggagcgcaggatgggtgttgaaatggctctgttcagagctttggcatttcatccgaaaacagttattgaagaggttgcggcaccggtggtacatcctgcggttataccatcagttacagcacagccgaaacatagtgctcagggagatgtgccacctgctaatgatattaatgaaccggcaccattggatagagcttctcagtcggaaccccagatacctcaggcgcttgcatcaagcccaaccgcgcagttgctgaaagcaaggaatgtgttatcccgacagcaagagcaaacgccaacaaaaaagcctgaatcggctatgcctgttaagatgaagtcagcaacttcagcattggaacggcttgccgcagtgtcaggacagcgacctcagtcatcaatagataaaaaacaggaaaacaaacctgagaaaaaagaagcttaccgttggcgtgccaagaatattgaggagaaaacagaaactcatgtggccacaccaaaggctttaagaacagctttggaacatgaaaaaacaccagagctggcagagaaattaacggaagaatctaaacagagagatgcatgggccgcagaagttggtaaacttaaaattcctaaactggtgcagcaattggcattaaatgcattcaaagagcagattagcgcaaataatatccgtttacacttgcgttcgagccagcgccaccttaattctgctttcgcacaaaagtcattagcgggggctttaagtgagttgtacggcgtaacggttgaattcagtattattgaagatgataatcctgcggagaaaactccgctggagtggcgacaagccatttatgaagagaaattggcacaagctcgccaatcaattattgcggataaaactattcaaacattgcggcaggtatttgatgctgaattggatgaagagagtatccgaccggtttaa

SEQ ID NO: 9966 - DNA, 330 bp, Photorhabdus luminescens
atgtttggtaaaggtggtttgggcaatttgatgaaacaggcccagcaaatgcaggacaaaatgcagaaaatgcaagaagagatcgccagtctggaagtaacgggggaatcgggagcaggtctggttaaagtgactatcaatggtgctcataattgccgtcgtgttgagatcgatccaagtctgatggaagatgacaaagagatgttggaagacctgattgctgccgcattcaatgacgcagcccgtcgtattgaagagactcagaaagagaaaatggcaggcatttccagtggtatgcaattgccaccaggctttaagatgccattctga

SEQ ID NO: 9967 - DNA, 606 bp, Photorhabdus luminescens
atgcaaaccagtcctctccttgaatccttgatggaagcattacgctgtttaccaggggttggccctaagtctgcacagcggatggcttttcatctgctacagcgtaatcgcagtggtggaatgcgtttggcacaggcattgaccagagcaatgtcagaaattggacactgcaaatattgccggacttttaccgaacaagaacagtgcacaatttgtgctaatccacgccgtcaacaaaatggtcaaatctgtgtggttgaaagccctgcggatattcatgctattgaacaaaccgggcagtttgccgggcgttactttgtattgatggggcatttatccccattagatggcattggtccaatggatattggtttagatcgtcttgaggatcgtctcgccacggaagagatttccgaggtgattctggcgactaatccgacagtggagggagaggccactgccaattatatcgcagagatatgcgttcagtatggtgtaacagcaagccgtattgctcatggtgtgccggttggtggtgaacttgagatggtagatggtacgacattgtcccattcacttgctggtcggcagaagattacttattga

SEQ ID NO: 9968 - DNA, 2073 bp, Photorhabdus luminescens
atggaaaaattattcaatatttacaatcacatagcaaaaccaagcttatatgtaactttgatgtctgtatctatgctatctcacgcagctccagcaaataccatctctaatgcaaatgataagacgattaaacaagcagaagagaaaacaggagatactcttgttgtgattgctaacaacaatgcacaagatgatggaaaaattagcagcaatgaaataaaagtcagacagcctcaaagtgtcggtgaaatattaaaaaatgttccaggtgttcaagccggacatcctagcggattaggtcagcgctttaaaattcgtggtatggatgaccaattcataaacattactatcgacggtgcaagacaagagggatatcacttccaccacgcaggcaattacggaatagaccctgagttattaaaacaagttgatatcaacatcggtagcaacagtatcacatacgatacaggtgcaattggcggggcactaaaatttgagactatagacacggatgacttattaacccccggtcaattatttggagcaaaaagtaaactgagctattcaagtaatggttctgaattccaaaaatcactggccgcctatgggaaactaggtgctgttgatttattaggatatgttaaccatcgtaatatgcacgattctgaatccggcagagatggacgaggaagagactcaattcctacagatgggaaattactcaattatctattaaaaacaaaattcaatcttaccgatgaacagtatattagcttatcaaaagaacattataaaaatgatgcagaaaccaactttagattaaattttggacatgatataaataatggaaagaaagggaggtatgaaatagaccgtgatacccataatatcacttatggttacactccaaccgataacgatttaattgatctaaaaatttccgcatatcatactgaacaaacctttacccatatgaagccagtaagcggtgatgggaaaggcttcgatactattgtaaaaacgcaaggcattaaacttcgcaacacatccaactttgatacacagaatctattccattcattaacctatgggtatgaatattttgataccagaatggcttataccgatgtagaagaaaacataaacaaaaaagatatagaaaaaggaaaagcatcttccttctacttagaagatgatgtccagcttggcaacttccatgtaataccgggtatcagatgggaccactataaatatcaaactgttaataaaaaggaacaaccttttgagaaaagctattcacatatctcaaaagcactcggtttaaaatatgagctaggaaaatcaacaacattatttaccaactacactgaattatttagaggtccattaggtaaagaaattggtctgggattaactaatcatagtaataatttaaaagcaacaacgggatacaacctggaagctggattgattggttcttaccctgccatttttactgacaacgacacgctaactatctcagggaaagtcttccaaaccaatttcaaaaacctgtcaacaactttagccaacagagaattgcataacatccctaaagcaaggctggaaggatttgagttatctacaggttatcgtattaaggggctaggtttaagagctagttatgcaaaagtaaatgacaaaattgtcaaaggcaacgagttatttaaagaaggtcttgaattcgaaccatcacttggtgattcaattacagttggcggcagttatttgtttgacaaaactgatattgaagccggctggaactcccgatttgtattatctaaaaactccaaaggcaaaggtggtaaaggtggtaatagcgctgtagacgttcataaatctggatatggtgtaagtgatatatatatcgcttggtctccaaaaacaggaacatttaaaaataccgaaatactgttgggcgtagataatatctttgataaacgttacaacgagcattcttactacctgaatactactcaaggacaggaagaaaaaggccgtacgtataaagcaacgatttcttacaaattttag

SEQ ID NO: 9969 - DNA, 1893 bp, Photorhabdus luminescens
atgaaaggtcaggaaacccgtggatttcaatctgaagtaaaacaacttctgcaattaatgatccattcactctattccaataaagagattttccttcgtgagctaatctcaaacgcttccgatgctgctgacaaattacgtttccgcgcattatctgttccaaaactttatgaaaatgatggtgaactacgcgttcgtctttcttttgataaagagaagagatgcatcacgattagtgataatggcattggtatgactcgtgatgaagtcatcgataatcttggaacaatcgctaaatcaggaacaaaagcttttctggaatctattggttcagatcaggctaaagacagccagttaattggtcagtttggtgttgggttttactctgcatttattgtgtctgataaagtcactgtacgtactcgtgctgccggcgcttcaattgatcagggcgtattttgggaatctgctggtgaaggtgattacacgattgccgatattgaaaaagaaacccgtggtacagagatcacccttcatttacgtgaaggagaagatgaattcctgaatgactggcgtttgcgttctgttatcagtaaatactctgaccatattgccttgccggttgaaattgaaaccaaaaataagagcgaagaagaaggtgaagaggatacagtaacttgggagaagattaataaagcccaagctttgtggactcgtggtaaatctgaaattacagatgaagagtacaaagagttctataaacatatttctcatgattttactgatccgctgatctggagccataaccgcgtagaaggtaagcaggaatatactagcatgctctatattccatctcaggctccgtgggatatgtggaaccgtgagcataagcatgggttgaaattgtatgtccagcgtgtgtttattatggatgatgcggaacagtttatgccgaactatttacgctttgtccgtggcttgattgactccaacgacttgccgctgaacgtttcccgtgaaattttacaagataactctattacccgtaatttacgtaatgcattgaccaaacgtgcattacagatgctggataaactggcgaaagatgatgcagaaaagtaccagcaattctggcaacagtttggtctggtcatgaaagaaggtccggcagaggatagcaccaacaaagaagctatcgctaaattgctacgttttgcttctactcataatgacagctcggcacaaaccgtttctctggaagagtatgttagtaggatgacggaaggtcaggataagatttactacatcaccgcagacagttatgctgcggcgaaaaacagtcctcatctggagttgttccgtaagaaaggtattgaagttctgttactgtcagagcgcattgatgaatggatgatgggatacctcactgattttgatggtaaaaaattccaatcagtcagtaaagctgatgaatccctggataaattggcagatgaaaataaagccgaacaggaagaaattgaaaagcagctagagccgtttgttgagcgtgtaaaaacattgcttggtgatcgcgtaaaagaggttaaattgactcaccgtctgactgatactccagcaattgtcacaacaaatgtggatgaaatgagcacgcagatggcgaaattgtttgctgcggctggtcaacaggtgccggacgttaagtacaattttgaactgaatcctgatcatcagttggtaaaactggctgctgatatcagtgatgaagttcaatttgcggattggattgaactgttgcttgatcaggcattgtttgctgagcgtggcacgttggaagacccaaatcagtttattcgccgtatgaatcagctattgttgtctgagaaagcttga

SEQ ID NO: 9970 - DNA, 645 bp, Photorhabdus luminescens
atgcgtatcattctgctgggcgctccgggcgccggtaaagggactcaggcgcaatttatcgtggagaaatatgggatccctcaaatttctactggcgatatgttgcgttctgcggttaaggctggcacagaattgggtttaaaagcaaaagcgctgatggatcatggtaagctggttactgatgaactggttattgctttggtcaaagagcgcatcaaacaagatgactgccgcaatggtttcttgttggatgggttcccccgtactattccccaagctgatgcgatgaaagaagcgggcattaatgttgattatgttctggaattcgatgttcccgatgaactgattattgaacgtatcattgggcgccgtatacatgcgccatccggccgtgtttatcacatcaaatttaatccaccggtagtggaaaacaaggatgatgttacaggtgaagagctgacagttcgtaaagacgatcacgaagatatcgtgcgtaaacgtttagttgaataccatcagcagacagcacctttagtatcctactatcaaaaagaagcagaagcagattataccaaatattttggaattgatggtactcgtaaggtatctgagattagtgaagaattatctaaaattttggattaa

SEQ ID NO: 9971 - DNA, 978 bp, Photorhabdus luminescens
atgaacaacggtaaatttggtgttttattagttaatcttggcactcctgataaaccgacaactgcggctataagacgttatttagctgagtttcttagcgataaaagagtcatagatttatctcgatttatctggaagccaatattatatggttttgttttgcctttccgctcttcacgtgtagcaaagttataccagaaaatttggactgatgaaggttctcctctgttagtatatggccgtcggcaacagaaattactggcagaaagacttgctggcatccctgttgaactgggaatgaattacggttctccatctcttgaacaagcgattgacaacttacttaagcagaatgttgagcagctgattgttttaccactttatccccaatattctggttcctcatctgcggctgtatttgatggtgtcagtctggtattgcaaaaataccgcactattcctgggatgcactttattcgtagttatgctgatcatccggcttatatttctgcactgaaagaaactattgagcagagtttcgataagcatggtcaaccagacagattattgctttcctatcatggcattccgcagcgttttgttgatacgggtgatatttatgctgagcagtgtaagttaacaacacgattgctaaagcaagcaattaattatccgacagagcaggtaatgatggcttatcaatcacgttttggccgtgagcaatggctgacaccatacgtagatcaaacgatgaaaacgctacctaatcagggaataaaacatattcaggtactttgccctggtttttcgtctgattgtctggaaacgctggaagagataaaacagctaaataaagagatgtttcttaatgctggtggggaaaaatttgaatatattccggcgcttaacgacaatgctagtcatattttactacttgaagagttggtcaacgggtttgtcagaaatagggatgaatag

SEQ ID NO: 9972 - DNA, 1104 bp, Photorhabdus luminescens
atgagtaataaaccgattaaaggcactaatttcagtgaagaatattttaattattacaattcaaaacaagatgatgaaattgatttgtttgagttattctctgttttatttcaatcaaagttattgattattactgttaccatcctttttgctgttattggctttgtagcagcatctttgatgccacaaaagtggagcagttcggcttctattgttaagcctcaacttgaagaaatacaaccacttaaagatatcctgactaagttagaggttttaaatctacaaccatcagtaacttcatcatcactgtataataattttttaaataattttaattcacgggttttgcgtgaagaatatctggttaatacagaatattttaaaaatctggtggctgaatcaggtgatcattcaccacttgtaaaaagaaaacttattgaaaagattgtgaatgataatatttcatcttcttcaaaagcggaaaaagatgatgaaaatggtgaaactaaattgactttcagtgctggaaccgcagaagatgcatataatctgttaaatggctatattgactatgtgtcgtctgttgtccatgaacaggtgaagagtgaattaagtgatatggtaaaacaaaagcttaattactctgaaggtttgtatagcgttgatttaaaccgtgtgaataatatacaggaagctaatgttgagcgattgaaacatgcattatctatcgctaattcggcaggaattaaaaagcctatttccagtgaaggggcaatgatcaaagacgatccagattattccattgctttgggggctgatgcattacagcgtaagttgcagattacagaggagataaaagatcccactttgattgatgctgacttacgtaaccgtttgttctatataaaagagctgaaagcacttaaagtagataaagttaacttccaaccatttagatatatgcaggctccttatgagccgacagcgaaagattcaccgaagcgtctacttatcttaataggcagtgctttccttgggctgatcttggctgtggtgtctgttctaattcgtcatatggtacgtagtcgtcagcaagcggcttaa

SEQ ID NO: 9973 - DNA, 1311 bp, Photorhabdus luminescens
atgaaattccctggtaaacgtaaatcaaaacactattttcccgtcagtctgcgtgatcctttactccagccaattaaagagatgatggatggtgagaataaccgagcttatatcgttggtatcgatcagacattagtggatattgaggcgaaagtagatgaagattttatccagcgctataacctcagccaggggcattcattagttattgaagatgatgtagctgaaaccctgtataaagaacttactgataataatcttattagccacgaatttgctggtggcactattggtaatactttacataattactcagttcttgccgatgatcgttccgtcttactgggcactatgtgtagtaatattcagattggcagttatgcttaccgctacttatgtaacacgtctagccgtactgatctgaactatttacagggagtgaatggggcaattggtcgctgttttacgttagtaacggaaaatggtgagcggacttttgccattagtcctgggcaaatgaatcaacttaaaccggaaagtattcctgagaagattattgctgaagcttctgctttggtattaactgcttacttgattcgttgtaaaccgggagaaccaatgccagaagcaaccatgaaagctatcgaatatgcgaaaaagcatagtgtacctgtggttctgacgctagggacgaaatatgttattgctgatgatccacaatggtggcgtgattttctggttgagaatatttctgttctggcaatgaatgaagatgaagcttatgagcttacgggtttcagtgatccactattggcttcggatgtggcactagattgggtcgatttagttttgtgtaccgcaggtccggctggattatatatggcaggttatacggaaaaagattatatgcgtcagacaacccatccattgttaccgggtgctattgctgagtttaaccgttatgagtttagccgtgctatgcgtaaatctgattgccaaattccgatgaaagtttattcccatattgaaccttatatggggggaccagaaaaaatcatgaatactaatggggcaggtgatggtgctttatctgctttgctgcatgatataacggccaacaatcaccacagaatgaatgtgcctaattccagtaaacatatgcgtacttatctaacatattcatcgcttgctcaggtatgtaaatatgccaacagagttagctatcaggtattgagtcagcattccccacgattaagccgtggtttacccgaaaaagaagatagtttggaagaatcttactgggaacggtaa

SEQ ID NO: 9974 - DNA, 612 bp, Photorhabdus luminescens
atgaatagttactacgattatataagaattgccagtatggtgagtatggtcttaattatgccgggaccaacaaatactcttttagtatcatctggatattcacatggttttattagtacactcaggctgatattagctgaggcattgggttatataacagcaattagtttgtgggggttatttttatctacagtctctcatgttttcgtatggtcactggtcatcttaaagatgtgtgcttcgacatacattgcttatctggcttttaaagtttggcatttctcattagacaagaacgtagcaaaaatccattttatcacggtattatttgccacattgctgaatcctaaggcttttgtgtttgctacatatatatttcctcttactgcatttactttgtggtcagaatacattccatgcatgacggtttttgtttgtgcactattacccatttccctgatttgggtgggggttgggaaaatactatatgtaggaaagttgggaaaaggaattttaaaacccgatttgttttatcgttttgcttctttagtgttatgtgttttctctgtttcaatgttttacacgtcaatgaaaggtgttttatatctttga

SEQ ID NO: 9975 - DNA, 219 bp, Photorhabdus luminescens
ttgaggaaagcgactgctgatgaatcattctctagtccctaccaagtaaggatcatgagccgttcttatcacttaagtatcagtgataagaacggctcagaggggacaaaatgttcagttgaagtatcgctttactcaattctgtacaacaaaaatcaatcggattatcaattaatccttagcccattcaagacaagattcagcaacctattgaggtaa

SEQ ID NO: 9976 - DNA, 1707 bp, Photorhabdus luminescens
atggagcactcgacaccacttatcaccactctcgttggcgggttctttatcgcttatctgcttggtatgctggcacaacgcctgaaaatctcaccgctggttggttaccttactgcgggagtcctcgctggtcctttcactcctggttttgtcgctgatgcatcactggcccccgaactggcagaaattggtgtcatcttattgatgtttggtgttggactgcatttttcacttaaagatctgctagccgtaaaatccattgctatccccggcgctattgcgcaaatactggtcgcgacactactcggagtagggctatcagcaatactgggttgggaattatttagcggcatcgtctttggtctctgtctatcaaccgccagtaccgttgttctgttacgagcgctagaagagcgccaactcatcgatagccaacgaggtcaaatagctatcggctggctgattgtcgaagatctggcgatggtactgactctggtattactgcccgcagctgccggtattcttggtaataaggaagccaatatcgggcagctaattatggaacttgccatgacagtcggcaaagttatcgcttttatcttgctgatgattgttgttggccgccgtctaatcccgtgggtattggcaaaaaccgcgagtaccggctccagggagctatttacccttgccgtactggttatcgccttgggtatcgcttacggtgccgttgctctgtttgatgcctcattcgcactaggggcgttcttcgccggtatggtattaaacgaatcagaactaagccaccgtgccgcccaagatacgctgccactcagagatgctttcgccgtattgttcttcgtttctgttggtatgctgttcgacccaatggtcctcattcaacaaccactatcgatactggcaacgttggcaatcattattattggtaagtccgcggctgcaatgttactcgttaagatgttcggccactcacgccggaccgcattgacgatttcagtcagtctggcacaaatcggtgaatttgcctttattctagccggtcttggggttgcacttggcctgcttgatggaaatgcccgtaaccttgttctggctggcgcgattgtttctatcatgctaaacccagttctatttagtctgttagatcgctatctggaaaaaacagaaaccattgaggagcagttactggaagaaacgttggaagaagagacgcagattcctgtcgatatctgcggccacactattgttgtcggctacgggcgggtcggcagcttgctatgccaacgcttgcaggaaaaagagatccctctggttgttattgagaacacccgagccaaatttgaggaactcggtgaacaaggtattagtgcagtcatgggtaacgctgccagcaaagatattatgtcactggctcgcttggattgcgcctgctccctcctactgactattcctaatggctatgaagccggtgagattgtcgcctgtgcaagagaagcacgcccggatattaatattatcgtccgagccgactatgacgatgaagttacctatatcacagagcgtggagctagccacgtcattattggtgagcatgaaattgctaaaacaatggcaactgtattcgccaacagtgagcaaagctattcgattgaaccccctccagcatcgcctttttcaccatcactttga

SEQ ID NO: 9977 - DNA, 1218 bp, Photorhabdus luminescens
atgagcgaacaaagtaataccaccatagttccatctcaccccaaaaaaaccaggaataccgtttttactattcttggggcaatcagtgtttcacacttattgaacgatatgatccaatcgctgattctggcgatttatcctttactacaattagaatttaacctaagttttgtgcaaatcggtatgattaccctgacctatcagattaccgcctctttattacaaccactggtaggtctctatactgataaacatccacagccttattcattacctgttggaatgagtttcaccttatccggtctattactgctggcctacgccaacaatttcccgttaattctattagcatcggcattaatcggaacaggttcttcagtattccacccggaatcgtcgcgcgtagcgcgtatggcatccggtggtcgccacggattagctcaatctctttttcaagtcggcggtaattttggcagctcccttgggcctttgctagccgctctgtttattgctccctatggcagaggcaacgttggctggttctctctagccgcattactgggtatcattgtgctgttacagatcagtaaatggtataacgttcagaattatatcaagaaaaatcaagccaaaactggcccagccattaaagttttatcaagaaaaaccgtgataggttccttggttattttgctcatcttaatattttccaaatatttttatctcaccagtatcagtagctattatactttttacttaatacacaaatttggcatttccgtacaaagcgcccagtttcatctgtttatttttttattcgcagttgcagcaggaaccattattggtggaccgcttggtgacaggatcggcagaaagtatgttatctggatatctatccttggagttgcaccttttacattagctctgccttacgcttctctgtactggacaagtattctatcagtgattattggtgtggttctggcatctgcattctctgcgatcctggtatacgctcaggaacttattccaggtaaaaccgggatggtatccggcctgtttttcgggctggcttttggtatgggaggtattggcgcagcggtacttggtgatattgcggacagaacaagtattgaactggtttatcagatttgtgcttttctgccgttacttggcatatttaccgctttattacctaatatagaagataagaactag

SEQ ID NO: 9978 - DNA, 1659 bp, Photorhabdus luminescens
atgaaactctcgttcaagacctcagcttgtgctttggttgtatctatagcactacttccagcaatcgcaaatgcatgggagaaagacaaaacctatgacattaccattttgcacaccaatgaccatcatggtcatttttggcataacgattatggtgagtatggcttagccgcgcaaaaaacggtagttgatgaaatccgtcaagaggtcgtgaaaaaaggggggagtgtgttactgctttccggcggagatataaataccggtgtaccagaatctgatttgcaaaatgccgagcctgattttaaaggtatgaatttggtgggctatgatgcaatggcgttgggtaaccatgagtttgataatcctctgtcaatactgcgtcaacaggaaaaatgggcaacttttccatttctggctgccaatatttaccagacaagcaccggcaaacgtttgttcaagccttataccattttcgataagcaaggtgtgaaaattgcagttattggcctgacgactgatgatacggcgaaaatcggtaacccggctaattttcctgatgttgaatttcgtcttcctgcgacagaagccaaaatggttgttgaagaattaaagagagatgaaaagccagatgtgattattgccgcaacccatatggggcactatgacaacggtaatcatggttctaatgcgccgggtgatgttgaaatggctcgcagtttgcctgcgggctatctggatatgattgtcggtggtcattcacaagatccggtctgtatgtccgcggaaaataaaaattataagcagattgattatgtgccaggaaccccatgttcgccagatcgtcagaacggtacctggattgttcaggctcatgagtggggtaaatatgttggtcgtgctgacttccagttccgtaatggtgaattgaagttgactcactatcagttgatccctattaacctcaaaaagaaagtgcagaaggaagatggttctactgaacgtacttactacactcatgaaattgcacaaaacccggatatgttaaagttgctgatgccttatcaagataaaggtgataaacagcttggtgtaaaagtggggtctgttgagggtaaattggaaggggatcgcagcaaagttcgttttgttcagactaatatggctcatgttgttctttctgccatgatggaacgcgcggacgctgattttgcgattatgagtggtggtggtattcgcgattcgattgaatcaggtgatatcacttataaagatgtgttgaaagtgcatccatttgccaacacattggtttacgttgatatgaaaggcaatgaagtcaaacaatatctggcggcgattgctaatatgaaagttgactctggtgcttatgcacagtttgtgaatgttagcctgattgctgatggtaaaagtgttaaagaggtaaaaatcggtgggaatccattagatccgcataaaacttaccgcatggcaatgcttgactttaatgctattggtggtgatggctatccacgtgttgataattatccaacctatgtcaacaccggttttgttgatgcagaagttttgaaagactatatcgagaagcattcaccactgaaagcggctgattatgagccaaagagtgaaattatttatcaataa

SEQ ID NO: 9979 - DNA, 477 bp, Photorhabdus luminescens
atgacacctgcgatcattttgttagaaaaacagaaagttagcttcgctcttcatgcctatgagcacgacacaaatgaacataattttggtgatgaagcagtgaggaaattaagactccatgccaggcaagtattcaagaccttactggttgcacttaatggtgaggctaaaaatttggtggtagccgtcacccccgtttcaagtgagctggacttaaaaaaggtcgccaaagtttttaaagtcaaaaaagcagaaatggctgatccccaaatcgcccagaaagtaacagggtatctcgtcggcgggatcagtccgctaggacagaaaaaacacttgccaacggttattgataaccaagcgcaacagttctcaactatatttgtctctggtggtaaacgagggttagatattgaattggcgtcggctgatctctgtaggttggtgaaaggcaactttgctgatattgcaaaaacttaa

SEQ ID NO: 9980 - DNA, 813 bp, Photorhabdus luminescens
atgggacgactgattaaacaccttaccaatatattaggaatcaatgccctccaccgttatccctatcctgctcacgatattacactggcaggtgatagacatttgcatctggtaggcagtattcatatgggtacgaaaaatatgttcccactttcagaaatattgatagaacagcttaatcaatccgatacattaatcgtggaagcagatattactcaggcagactccccatttcatgatgagtttcaatcatatcaccgtatcgaacaacgtttatcttctgagatgtatcagaactttcaggactgttgcaatgaaatccaacagcaagaagaattcctcaatctattgccctcatggcaaatcgctttaattttacaagctggacaagcacaaaaccttggattacatccccaatacggtatcgattatcagctactaaatgcagccaaagctctaggaaaaacgattattgaactagaaggtactgaatcacaaattaatttacttaatcaaattcccaataacggcctgccactattagaagatacattaacccattggcacgcaaatgcccgtgctttacaaaccatgatcagttggtggatggactatcaacctaaacagcaagaacatgctctaccaacaactttcagtaaagagatataccaactattgatgactgaacgtaataaacaatggaataaacatttacggggattacctgccggtcgatacctcgttgctgttggcgttttgcatctgtatggtgaagggaatttgcccaagatgctggcagaaaaacagcattaa

SEQ ID NO: 9981 - DNA, 318 bp, Photorhabdus luminescens
atgtcagatatttatgagctggtaacattgattcctaaaggtcagatcacgttaccttggttcatccgtcaggtattgagtgttgataccggtagcacattggtatttgagttgcgtaatggtgaggttgttgtgactaatgtaagcgttgaatacgaagaccagttaattggggcattccttgacttgctgtctgccgacattcaggtcgggtaccatgtgagtgatttacctaaggaattggacgaggctatgcagcacaatacggggcacgttatcgatctgaatgaaaacattgtcggagatgtgatgatttga

SEQ ID NO: 9982 - DNA, 2736 bp, Photorhabdus luminescens
atgtcatacacaactattttaaccttgcagggactctcctgtatgcactgtgttaacagtgtgaaaaaggcactagcaaatcgtacagatgtggaacaggcggatattacaattgattatgccaaaatcatcggtaaagcctctactgaatcattaatcgaaaccattcaagcagccggttacgatgcgatgattgccagccaacccgatgttgaactgacactctctggactgagttgcatgcattgtgcaggtacgacacgtaaagcgctggaggccgtagatggtgttatcgccgcagaggtgaataccgaaaaagctaaagtttacggtaaagccgatgcggataccttgattgccgctgttgagcgggcgggttaccatgcaaaactcgcttctggtcaaaactccccaaaatctgagccgctgacattacctgcttcaaacagaccggaacctttggcagcggcaacctcctctgttccggtcgaaaaagctgacgtatccgttgtgagtgacagcaatgagagcatccagttgctgttggatggcatgacttgcgccagttgcgtgaataaagttcagaaagcattacaaggtgttgacggcgtggaaaatgccagagtgaatcttgctgaacgcagcgctttaattaccggcagtgcctcaccagaggcactgattaaagcagtagaaaaagccgggtatggcgcagaactgattcaggacgaaactaagcggcgtgaacgccagcaacaagtttctgacgctaatatgcgccgttttcgttggcagtcagcattagccttagtcgtcggtattcccgtaatggtgtggggcatgatgggcgataatatgatgctcacacctgaaaaccatcatatctggctgactattggcgttatcacgcttgccgtgatgatttttgccggtggtcacttctatcgtaatgcgtggcaaagcctgaaaaacggcagtgcgacaatggacacattagtggcattgggaacgggtgcagcctggctttactccatcagtgtcaacctatggccagatatttttccaccacaagcccgtcatctctattatgaagccagcgcgatgattattggtctgataaacctggggcatgctctggaacaacgtgcccgtcagcgttcttcaaaagcactggagcgtctgctggatctgacaccaccgactgcccgtgtggtgacagaagatggcgaaaaagagataccgctggctgatgtcaaacccggcatgacgttacgtctgacaaccggtgatcgtgttcccgttgatggtgaaatcattcaaggtgaggtttggatagatgaggcaatgctcaccggtgagccgattccacagcaaaaaaccaaaggcgataacattcatgccggtacgacggtgcaagacggtacagtgctgtttactgccgccgcggttggcagccagacaacattagctcgaattattaaactggtccgtcaggcacaaagtagtaagcccgaaatcggtcagttagcagataaaatttccgccgtatttgttcctgttgttgtcgccattgccctgattgccggcgctatttggtatttcgttgggccagcaccacagattatgtattcattggtcattattaccactgtgttgattattgcctgtccctgtgcccttgggttggcaacccctatgtcaattatctctggtgtcggccgggcagcagaattcggggtactggtgcgagacgcggatgcgctgcaacaagccagcaccttggatacccttgttttcgataaaactggtacgctgacagagggtatgcctcaagtgactgatatccatacttttaatgggtacagtgaacaagaagtattgcggtgggctggcgcactggaacaaggttctaaccatccattagccaaagccattcttgccaaagccaaagggctgacgttgccgcaagttgaacaattccgtactctggctggactcggtatcagcggtgaagtgaatggcacaaccttgttgctaggtaatcaagcttggctagaacaaaatcaaattgatacgcaagaattaaaatcgttgatcgctcaacaggcagaacaaggcatcacaccggttcttctggcagcaggaggtcaagcggcggcagtgctatctattcgcgatccactgcgtgaagatactatgactgcattgcagcgattacatcaccaaggctaccgtttagtgatgttaaccggtgataacccagtgactgccaatgcgattgccaaagaagcgggtattgatcaagtgattgcaggtgtattgcctgatggcaaagctgaggtaattcagaaactgcaagcagcaggtcgcaaggttgctatggtgggggatggtattaacgatgctccagccctagcgcaagctgatgtaggcattgcaatgggtggtggtagtgatatcgccattgaaaccgccgcaataacgctgatgcgccatagtttacatggcgtggctgatgcggttgagctatccaaaggcactctgcgcaatatgaaacagaacctattaggcgcatttatctacaacacattggggattccgatcgccgctggtgtgctctatccctttactggaaccctgttagatccggtagtcgcaggtgcggcaatggcgctctcttcaattacggtagtgagtaatgctaatcgattactgaggtttaagcctaagttctga

SEQ ID NO: 9983 - DNA, 402 bp, Photorhabdus luminescens
atgaacattagtgagattgcccaaaaaaccggtcttaccagcaaagctatccggttttatgaagaaaaggatctgattacaccgccggaaaggggggataacggctaccgttattatcagcagaaacatattgatgaactaacgctgttacgtcaggcaaaacaggtcggttttacgcttgatgaatgccgtgagtttttagtgttatttcgcaaccccaatcgtcatagtgctgatgtaaaagtggcaacattgcataaagtggctgaaatagaaaaggcgattgaagagttgcagaaaataagaagtaaattgttatccttagcggaagagtgccctggagatgacggggctgcatgccccatcatagatcatttatcgggttgttgctctcatcactga

SEQ ID NO: 9984 - DNA, 456 bp, Photorhabdus luminescens
atgattgcacagattgcggcgcaaactccttggctctggttctctttcggcggcttactgttaattgcagagcttctgggaactggcggctatctgttatggacgggcatagccgctatcgttgttgcgtttgtcacctggctgctaccaggaatagattgggaatggcaaggcattttgtttgccactctgacgctgctttctgcaatgctatggcgctactggttacgtcgccgcccatcaaaaggcggcgataccctgaaccagaaagagcaccagctcatcggtatccgagccaaactgactaccgatactgaaaatggttacagccgggtcaagctagctgatggaagctggcgagttcactgtaatagtgaactaccagcccacaccgaagtagaagtgatcgctgttgatggcattaccctgaaagtaaaaccggtcagttctcagtga

SEQ ID NO: 9985 - DNA, 921 bp, Photorhabdus luminescens
atggatttattcgcttttggtgccgtacccattctgatatttattgcggtggttattgtctttacttgcgtaaaaaccgtgccacaaggctatcaatggacggtagaacgtttcggccgttatacccgaactttattaccgggtttgcatattatcgtcccttttatcgatcgcattggccgtaaaattaacatgatggaacaagtgttggatattccttcacaagaagtgatttcccgcgataacgccaatgttactattgatgcggtctgctttattcaggttgtcgatcctgttcgagctgcttatgaagtcagcaaccttgaactatccattatcaatctgacgatgaccaacttccgtaccgttttgggttcaatggaactggatgaaatgctgtcacagcgtgattccatcaacagccgcctattacatattgttgatgaagccactaacccatggggggtgaaaattacccgtattgaaatccgtgatgtgcgtccaccaaaagagttgatctctgccatgaacgcccagatgaaagcagaacgtacaaaacgtgctgatattctggaagcagaaggtatccgtcaggcggctattctgaaagcagaaggagaaaaacagtctcaaattctgaaagcagaaggggaacgtcaatcggcatttctccaggcagaagcacgtgaacgtgccgccgaagcggaagctcgcgcaactaaaatggtatccgatgcgatcgctgacggtaacatgcaggcaattaactactttgttgcccagaaatatacggatgccctgaccagtattggcgcttccggtaacagcaaagtcattatgatgcctctggaagcgagcaacctaatgggtgcgattggcggtattactgaattgattggcgaaagcaaaaaaggtaaataa

SEQ ID NO: 9986 - DNA, 858 bp, Photorhabdus luminescens
atgttaccgacctctattggaattaatgttaacgaaagcaacctccatcaaatcgttgaacagtctatgactgtacctgttttattttatttctggtccgaacgtagcccccattgccaagaattaagcgtaacactggataaactggccgcagaatatgcggatcaattcatattggcaaaagtggattgcgataaagagcaaatggtcgccgcacaatttggtttacgcgccattcctacggtttatattatgcaacaaggtcaacccgtagatggttttcaggggccacaacctgaaaacgttatcagagagatgctgactcgcgtattaccgaagccggaagagttgaaagccgctcaggcggaagaacttatcgccgaaggaaaacatcaggaagcactaccgttattgaaagaagcctggcaattagcgcccaaaaacagtgcaattgcacttatgttgaccaaagtgcaaattatgctcaataatatagaggaagcccaggaaattctgaatcttattccattacaggatcaagatactaattatcacagtttactggctcaaattgagttacaaaagcaagcggcggatacaccagagatccaacaattgcagcaagaattcgccattcaaccggagaatgccgagctagctgttaagctcgcgctgaaactgcacgaagtcagccgtaatgaagaagctctggaattattactcagcttcctaaaaaaggacctttctgctgccaacggggcggtacggaaaacaatgatggatattatgtctgcaatggggaccggtaataccttggcttcgaaataccgtcgccaagtttactcactgctttactga

SEQ ID NO: 9987 - DNA, 786 bp, Photorhabdus luminescens
atgcaaaagtcagttcttatcacaggctgttccagtggaattggtctggtggcggccaaaacactacatcagcggggctacagagtattagcagcctgccggaaacccgcagatttacagcatatgcgcgaattaggactggaacctatcgaattggatcttgatgacaaaatgagtgttgaacgtgccgccgccgaggtcatcaagctaaccaatggccgtctttacgggctgtttaataatggcggctttggtatttatggcccactcaatactatcagtcgtgaacaactggaacggcaattctctactaatctatttggtacacatcaacttacctgcttattacttcccgcaatgcaacttcatggtgaaggccgtattattcaaaccagttcagttatgggactgatttcaaccccaggccgtggtgcttactctgccagtaaatatgccttggaagcatggtcagatgcgctaagaatggaattagccggcacaggaattaaagcctgtttgattgttcctggcccgataaaaacacgtttttcagaaaacgtgaatcaaacgcaaagcgataaacctgtcaaaaaccccaggatcgcccgtcactttaccctgactcccgaagccgttgtgaataaactaattcatgctctggaaagtccgaatcctaaattacgttacccagtgacttgggtaacccatgcagtcgctattatgcgccggattttaccaggaagagtaatggataaaatactgagcaaacaaagtggtacaacttga

SEQ ID NO: 9988 - DNA, 636 bp, Photorhabdus luminescens
atgctgaacttcaagaatattccccgttaccatttacttttccttttactgatggtgctatttagcgccagagcgactgcggctgatacccttctgattctcggtgatagccttagtgccggttaccatctgcctattgagcagtcatggcctgctttgatggaaaaaaagtggcaaaaatccggcaataaaatcacggtcatcaacggcagcatcagcggcaacaccgccgctcagggccttgagcggctacctgaattacttaaacaacataaaccccgttgggtactgatagagctgggtgccaacgatggattacgcggttttcctccacaacacaccgaacaagatctacaacagatcattactttagtgaaacaagctaatattcagcctttattgatgcagatccgtctaccaccaaactatgggcgccgttataccgagtcttttgccaagatttaccccaaactggcagaatataatcaaattcccctgctcccgttttatatggagcaagtcgccattaaaccggagtgggtgcaacaagatgggttacatcctaatctggcagcccaaccatttatcgccgattggatgtctgacacactatcagcacatcttaattattcttaa

SEQ ID NO: 9989 - DNA, 687 bp, Photorhabdus luminescens
atggtaacggggaatattcttgaagttcagcatctcagtaagcacgttggtcagggaggacataagatcactatattgcagggagttgagttggttgtcgagtcggcacagactatcgctttggtgggagagtcgggttcgggtaaatccacattgcttggcattattgccgggttagatgatggcagtgacggtgaggttcggctgctagggcataatttaagccagatgaatgaagagcagcgggcgcaactccgggctgaaagtgttggttttgtctttcagtcctttatgttaattccgacattaaacgcattagagaatgtccagcttcctgccttattacgtggtgagtctgaaaatagtagtaggaaacaggcggttgaattgcttgaacaactgggattggggaagcgtttgaaacatatgccagcacaactttctggcggtgaacaacagagagtggcattggcacgggcattcagcagtcaacccaaaattctgtttgctgatgagccaacaggtaatctggatcggcaaaccggtgatcgtattgctgatttactgttttctctgaatcgtgattatgccacaacattaattttggtcactcatgacagccagcttgcggcccgttgtcaacgttgcttgcggttggttgatggaaaattgagggaagaaagatga

SEQ ID NO: 9990 - DNA, 2433 bp, Photorhabdus luminescens
atgatttggcgttggttttggcgcgagtggcgcacaccttctttattgattgtctggttatctcttaccttggcggtagcttgtgtgctggccttaggaaggattagtgatcgcattgatcaaagtgttcattaccagagtcgggattttctggcgggtgatttagtcctgcgtgctgcttatccggtagatgaagaatggctacagcaggcgaaaaaacggggattaaaattaagtcgccaactctctttcaccacaatgacttatgctggggacattcctcaacttgcgaatgtaaaagccgcagacagtcattacccgttatatggtgaactggaaacccatccaccgggtttgaaagcggaaaaaggcacagtgctggttgcacctcgcttgcttgaattgttgaaaatcaaagttggcgataatctcgatgtgggtgataccacgcttaaggtgagtggagaattaattcaggaaccggacagtggtttcaatccctttcagattgcgccacggattttaatcaatcttgatgatgcgccatctaccggtgcgattcagccgggtagccgcctgacttatcgttatatgttttcgggtgataaagaagcagtttatcagtatcagcagctcattgatccccaacttaaagctgatcagcgctggtataccttgaaacaggacagcggggcgctggaaaaaacgattgaaagggcacagcaattcttgttgttatcggctttactgacattattactcgctgtcgccgcggtagcagtatcaatgactcactattgccgtagccgccatgatttgattgctgtgcttaaaacactgggtgcggggcgttgggcgttgcgtaaatgggtgattggtcaatggctggtgatattaattgcggcggcgctggtgggaacgcttctgggattgatgtttgaatatctgctcgtgcagattttggcccctatgttgccgaagaccttaccagtagcaggattctggccgtggatatgggcgttaggtgcgttatctgttatcgccttactggtgggaatacgtccgtataagcagttaatggcaacccaaccatcacgagtgctgcgtaatgatattatcgcgcctatctggccgttacgttattacttgccgttggcggtattggtggtcattagtgggctgagtctgttagttggcaccaagcccatgttatgggcgttacttgcaggcatgatgatggttgcgctattactggcggtgtttggttggggaggattgtggttattacgtcatttgaaacttcgccaactcagttttcgtctggcggttaatcgactactgcggcagccgtttcaaacagtagctcaattggcggctttttctttatcatttatgttatttgctttgttgctggtggtccggggagacttgcttgaccgttggcagcaccaattgccaccagatagtccaaactattttctgattaatatgactggacagcaaattccacaagtagaacatttgctggctcagtatcaggttaaacctacggcattctatccggtggtattggctcgcttgacggaaattaatggtcagtcagctatcgcgtgggcagaggccagaggatcggatagcaacacggtacagcgggaattgaacctgacatggaaagaggagttacccccgtttaataccttggtggaaggtcactggccgctaaagaaggatgaggtttctatcgagcaagggcttgctgagcgtttggcaatcaaaatcggcgataagctgacattcagtggtgatacgcagcaattcagtgccatcgttagcagtattcgactggtggattgggaaagtttgcggccaaatttcttgtttattttcccgaaacaagcattagaaaatcagcagcaaacttggttgaccagtttccattatgagggagagggtcgccttctgacggatcttaatcgtcagtttccgacgttgagcctacttgataccggcgtgatgattaagcaaattcagggtattttgcagcaggtaagtaaggcattggaagtcatggttggattggtcatggtttgtggcgcattactgctattggctcaggttcaggtagggatgcatcaacggcaacttgaattagtggtttatcgcaccttgggagccagtaaacagctactgcgtcgtacgctttggtatgaatttgctttgcttggattaatggcgggttttactgcggcattaggggctgaggttgcgctctggttattacagaccaaggtatttgattttccgtggcaaccagaatggcagatgtggctgttattaccaataatcagcagcttgttactttcattgtgtgggagtgggttggggcttcggttattacggggtacgggattacaccggcgagttcaggggtaa

SEQ ID NO: 9991 - DNA, 1065 bp, Photorhabdus luminescens
atggcaaaaaaagaattcggtgtatttctacccatagctaaaggtggatggattatttccaaaaatacaccaccactcgatgcttcttatcagcaaaaccgtgaagcagctattctggctgatcaaattggtttggatttcatcatgtcaatgagcaaatggcgtggctttggtggcgaaacggaacattggggctgttcgttggaatccgttacgatgatggcaggtattgccgaagtgactcatcatgctcggcttatcgcaaccatgcacgccgggctgcataatcctgccgtgacagccaaaatgattgcgacattggatcaaattagtcatgggcgcgccgggctgaatattgtctctggctcattcaaagacgaatttgaacagatgggggaatgggataacaatttagatcacgatcaacgttacgcaatgaccgaagagtggacccaattgatcaaacggctttggagtgagaagcaggttaatcatcagggagattactttaatttcaagaattgtgtttctgaacctaaacctgtttccgttccgcgcccttatttggtctgtgccggtcaatcagaatgtggactacgttttagtgtgcgtaacaccgatgtgtgtttcattggtggtaaagatgaggaagaaacgcgacaaatcagtctgatggctaaacgtcttgcagccgaatacggcacaaccaccaaaaccttttgtatgtgtacgattatttgcgctgaaacagatgaagaagctaaaacgctggctgagttctatcgtgatggcttggatatagacgcagttaaaagcatgatgcacagttttggcgtcgatgttggcgaaaaaagcaatgcgatggttgaaagatcccaaaacgcttttatgacccacaccgctatcggcaacccggaaacgtgccgccaacaattatcagatttgctgcgtgaatgcgaactggacggcgttatgttgatcttccctgattatgttcaggggttgaccactttcggcgagaaaatcttgccacaacttagagctgaatttatctatacccaatag

SEQ ID NO: 9992 - DNA, 1275 bp, Photorhabdus luminescens
atgcccactcaacatgaccagttcggacgtacttatcagtggctcctactgatacttttgggtttagtttattttctggtcaccgcaaccacatttacttcgctaggtgttgtattacctagcatgatcaaggaattacactggagttggacggatgccggtttggggttcactttactgggcttgtcatgtgggctgtccagttaccttccagcgatgtttattcgtcgtaccggcgtccgcgctaccttaattatcggtacgcttacctttatcaccagtttttatatcctctataacacccacagtatcgcggcctattttaccggtaccaccctactagggatcggctttagtcttatggcaacggttcccggcacttatgtcattagccgactttttaaaaagcagtcgttggcttttggtatctatttcactatcgggggattaggaggcgtggtcggtccgtggatctatttcctggcaaccgtattttgggaaaactggcgtatgcactgggcaatttccgggatatcactcaccctgattagtctattaaccattttatttatgcgcgaaggtaaaaaggaaaacgcccacgctgaaagaattagcaaaaatcaacaagaccagctccccaccagtatctatcgcaccaaggaaatatggaatgtccgacaggcactgcacacttggcaattttatgccattgccgccgcttatacctcttttttactgtgtgggataaccgttaatagcttcgctgtcgcccatattactgaaaacgggttcagtgagtctgttgccgcctcctcgctcagtatcttggcttttatcaatgcattctcacgatttgcaggaggcgctgttggtgaatggctcgatcccaaaaaattgcttatcggtagtctgtcgataattatctgcggccttatcgcactcagtgccaccacttcatggacatttttaatcctgttcacgttgtgtattggcatcggttatggcatgacttttctggcatccagtattttactgttcaattattttgggcgcacgccttatctggaactgttctcagtgatgaatctgatctctactaccgcctgtatcgccccttttctggtgggagcaattaaagattattcaggtagttttacaccggcatttctcattatcgccataccggtgctaactattctgattatcacattcataatgcaaccaccgttacaaatcgtgaagaaatgttctgataacagcacattacttaactga

SEQ ID NO: 9993 - DNA, 915 bp, Photorhabdus luminescens
atgagaaagggaaccttcgtgttacttgccacaaaaatccataatacgaaaaactacccccggctttttttcaccttaaagccctctttcccattttcctgtaccgcttatctggcaatgacttggcgttggatcggcacccgattaaagaaaagcggattacctgcaatgctattaatgctattattgctgtcggcaatcaatcaagctcaagccggtcattttgttaattttcaatcgattgataccagcctttatatgcaatttgaaaatcgggtcgatcccagaaaaaccatttcaccgattttagaggctttcggcgactacagtatcggcgatatgtacgtctatagtatttggcaaaattcgctgcaaagtgattaccaaggtgacaaaagcacctactattataaatttgtccctagagtgagcttgagtaaagtcactggtaatgacatctcttttgggccggtaaaagatattctgttcgctcaatgggttgccaaaactaaaggtatagattacgactatttccccggtatcagtatcgactggcaagctagttggattagctggttacgtacaattttttattttgagaataatgccaaaggaagctggaatgatcagcgaatccatatcgactacggaattcccttcaataaccgtttaggtgatttccgtgttgtcggtacttttgattataccttaggtttgcatgggcaacctgaaactatcgatttcaaaccagaattgcactatgatttaggaaaacgccttggcaatcaacccggtcatttatggactggcattgtcctgaacccaataaaaaataaatacaaaataagagataccccttattatcgaacggatcaatttagttatggggtctttattcgatatagttttttctga

SEQ ID NO: 9994 - DNA, 666 bp, Photorhabdus luminescens
atgtatactggaattgtgcaaggaaaagaaaaggtattatctcttgagaaaaaagagggatttagtacattgaccgtcagtaataataaccatttttttgatgatgtttctgtgggggctagtgttgcgattaatggtacgtgcttgactgtcacccaatttaaaaacgatatcgtctggtttgatatatcagattttacggctgatgtgaccacgttaaagtttttaaatgtgggggatgaagttaatattgaaagatcacatcaaatgaataaagagaatggtggtcatagtttatatggacatattgaaggcgcagcagaagttgttgattttattaaaacaggtgaaacttatcgattagtgattaatatccctggcgataatataaaatactttttccataaaggatttattgggctgcatggctgtagtttaacaataaatggtataaatgaagaagagaaaaccatagagttgaatttaattccagaaactttaagggcgactaatcttggtaatattaaagttaatgatttacttaattatgaaatagatcaaacaaccagaacgattgtagatacgatatccagatcgatgaatgctataccctatggatttcaagatgcatcgcgacggcaagggagtgaatccccgggagcatag

SEQ ID NO: 9995 - DNA, 963 bp, Photorhabdus luminescens
gtggcaaagaaagaaaaacggcctcaccatgacggattatttaaatattttttaacgcagcctgaaacggccagagagtttctatccctttatttgcccgaagaaatccagtcgttgtgtgacttagccacattgaaactggagcccggcagttttgtggatgagcatttacgtcaactgcacagtgatgtgttgtactcggtcgaaacggcccggggacagggctatatctattgcctgattgaacatcagtccacccctgacccgttaatggcctggcggctgatgtattatgccatgttagccatggcggctcacctgaaaaaaggccatactgaactcccgttggtggcacctctgctgttttatcatggtgagattcggccgtatccttactcaaaccggtggctggattgtttcacgctccccgaacaggcggctcgcttataccgtcaggcgtttccgttggtggacgtcagtgtgctcagcgatgaagagatcctgacgcataaaggggtagccctgatggagctggtgcaaaaacatattcgctgccgggatatgcaggaatggctcctccaattggtggaactcttgaatgcagggtataatacaaccgagcagctcaatgtggtgttactctatattttactgaatggacatacgctggatctctcacactttgtccatcaactgattgaacaatctccggagcatgaaacgatgctgatgactattgcagaacagcttgaacaaaaagggcttgagcgaggtatcaagcaaggtattgagctaggtcgagaagaaggccgagaagaaggccgagaagaaggccgagaagaaggccgagaagaaggtaaagtggaaacggctcgcgccttattacagcatggcgtgagtttggacattattgttaccagtaccggactgagccgggataaaattgaaacgttaaagcattaa

SEQ ID NO: 9996 - DNA, 204 bp, Photorhabdus luminescens
atgttgatgactattgcagaacagcttgaacaaaaagggcttgagcgaggtatcaagcaaggtcgagaagaaggcattgaactaggccgagaggaaggtaaagtggaaacggctcgtgccttattacggcatggcgtgagtttggacattattgtcaccagtaccggattgagccgggataaaattgaaatgttaaagcattaa

SEQ ID NO: 9997 - DNA, 96 bp, Photorhabdus luminescens
atgaaaaaaatggcgaaaataattgagacgttgtcaatgtgttcagaaaaacatcccgttttttatgtccataaaagccgattggtcagtgattga

SEQ ID NO: 9998 - DNA, 1098 bp, Photorhabdus luminescens
atgaagccagtttgtgtattaggcaatggtcagctcggccgcatgttacgtcaagctggtgagcctttaggtatcacggtttatcctgttggcctcgatgcagaacccgaagcggttccttatcagaatagcgtgattaccgctgaaattgagcgctggccggaaacggctcttactcaggaacttgcccgccataaggctttcgctaatcgagatatctttccccgtctggccgaccgtttaccgcaaaaacagttaatggatagccttggactggcaacggctccgtggcaattactctctgataccaaccaatggccgcaattattctctgagctcggtaatttcgttatcgttaagcgccgcatgggtggttatgatggccgagggcaatggcgtattcatcccggagatgaaacagaattacccgccgatatttatggtgaatgtattgctgaacaagccattcctttttctggcgaagtttcactggtaggtgcccgcaataaaaatggcgattgtgtgttctaccccttagcacacaatttgcatcaagatggcattctccgtgccagtattgtctctcctcaagaaaattaccatttacagcatcaccatttacagcatcaccatttacaacaacaggccgagagtatgttgtcagcgattatgcacgagttgaaatatatcggcgtgatggcaatggaatgttttattgtcggtgataatttattgattaatgaactcgcaccacgcgttcacaacagcggtcattggactcagaacggcgcatctatcagccagtttgaattacatctgcgtgctattctggatttgcccatgcctcgaccagtagtcaccgcgccgtcagttatgatcaatttgattggcacagatattaatgcccaatggctcagtttgcccttggtacatttacattggtatgagaaagaagttcgccccgcacgtaaagtgggtcaccttaatctttctcactttgataaaaatgaattaaaaaatacattgcagaaacttatccccatgttgccacccgaatatcaaagtggccttgaatgggcgcaggaaaaattaatttaa

SEQ ID NO: 9999 - DNA, 531 bp, Photorhabdus luminescens
atgactgcccaacctgatttagcaggaacagctcaacacaatgccaaaatcgccattgtcatgggttctaaaagcgattggacgactatgcagcacgcggctgatatcctcacttctcttaatgtaccttttcatgttgaaattgtttctgctcaccgtacacccgataaactattcagttttgccgagcaagctgagcaaaatggttttgatgtcattatcgccggtgccggtggtgccgctcatttacccggcatgctggctgctaaaacgctggtaccggttctcggcgtacccgtacaaagtgctgcactaaatgggatagacagtctttactctattgtacagatgccaaaagggattcctgtcggcacacttgccattgggaaagctggcgcggcaaacgcagctctactggctgcacagattttggctcgtcataataaagatttactgaaacgcctcagccattggcgtgaaacacaaactcaggatgtactcgataatcccgatccgcgggaggaagcatga

SEQ ID NO: 10000 - DNA, 723 bp, Photorhabdus luminescens
atgtgtacactttttatcgcagatttacatctcagcgaacatgaaccggcaatcactgccggttttctgcgtttcttgcgtgaggatgccattcaggcagatagcctctatattctcggcgatctgttcgattactggattggcgatgatgataacaaccctctccaccgtgaaatcgctagcgcattaaaaactgtacaacaacaaggtgttagctgttactttattcatggcaaccgtgattttctgctcggttcacgctttgctaaagagagtggcatcatattgctcccacaggaaaaagtactggaactgtacggtaagcgagtgcttattctacatggcgacaccttgtgtactgatgacgaaggttatcaacgatatcgtaagcgggttcataccccgtggatccaacgtctgtttctactattacctctgtctatccgtcaaaaaattgccgtaaaaatgcgagcaaacagccaatcggtcaaccgcagaaaatccgaagccattatggatgtaaaccagcaagctgttattgacacttttgagcggtatcaagctgactggatgattcatgggcacactcaccgcccttttgtacatgaagttcctctgcatgataaaaccgtctaccgcggtgtacttggcgcatggcatcatcagggatcgatgttcaaaataacggataaatcaattgatcttatctctttcccattctga

SEQ ID NO: 10001 - DNA, 495 bp, Photorhabdus luminescens
atggtgactttccataccaattttggcgatattgtaattaatactttcgctgataaagctcctgtaactgttgagaatttcttgaactactgccgcaatagtttctacgataatactattttccaccgtgttattaacggtttcatgattcagggtggtggattcgaacctggtatgaaacaaaagccgactgatgcagctatcaaaaacgaagccaataacggtctgaaaaacaaccgtggtactttggcaatggcccgtactaacgatccacactcagcaactgcgcagttcttcattaatgttgttgataatgatttcctgaacttccgctctgagcgccctgatggttggggttactgcgtctttgccgaagtgatcgaaggtatggatgttgttgataaaatcaaaggcgtttctaccggtcgcagcggtatgcaccaagatgtaccactcgaagatgttatcatcgaaaaagtcactgtcagcgaataa

SEQ ID NO: 10002 - DNA, 132 bp, Photorhabdus luminescens
gtggaaaatagtattatcgtagaaactattgcggcagtagttcaagaaattctcaacagttacaggagctttatcagcgaaagtattaattacaatatcgccaaaattggtatggaaagtcaccataattga

SEQ ID NO: 10003 - DNA, 1386 bp, Photorhabdus luminescens
atgctaaaaattttcaataccctcagccgtcagaaagaagaatttaagccaatccatccagggaaagtagggatgtacgtgtgtggtatcacgatttatgacctgtgtcatattggtcacggcagaacctttgtttcttttgatgtggttgctcgttatctgcgctatctgggatatgatttaacttatgtacgtaatgtgaccgatgttgatgacaaaatcatcaagcgggcggcagaaaacagtgaaagttgtgatgatctgactggccgtatgttggcggaaatgtacaaagattttgatgcgctgaatatcttacgccctgatctggaaccacgtgcgacccggcatatccaggagattattgcgctgaccgaatcgttgataaaacgtggtcacgcctatgttgcagataatggcgacgtcatgttttccgtcgagagtgatcaggattacggattgctttcccgtcaagatctcagccaactacaagcaggagcgcgagtggaagtggctgatgttaagcgcaacccgatggatttcgtgttgtggaaaatgtccaagcctggggaaccaagttgggaatcgccgtggggggcgggccgtcctggctggcatattgaatgttctgccatgaacagtaaacagctaggtaatcattttgatattcatggtggtggtgctgatctgatgtttccgcatcatgaaaatgaaattgcacaatctacttgtgcccatgatggcccgtatgtgaattactggatgcattcagggatggtgatggtggataaagagaagatgtccaaatcgctgaacaacttctttactatccgtgatgtattggcatattacgatgcagagacggtacgttatttcttgttgtcaggccattaccgcagtcaacttaactatacagaagataacctaaagcaggctcgtaccgcacttgaacgattttatactgcgctgcgaggtacagatgcttctgtaccgccggccggtggtgaaatatttgaggcgcgtttcattgacgcaatgaatgatgatttcaatacgccagaggcttattcggtactgtttgatatggtacgtgaaatcaatcgtttaaaatcagaagatatggatgccgcgaatggcttagcggctgaattacgcaagctggcgggtattttaggtttgttgcaacaacagccggaacaattcctgcaccgtggtattcaggctgatgatgaagagattgcgaaaattgaagcgctgattaagcagcgtaatgatgcccgtaaaaataaagattggccgctggcagattctgctcgtaatcagttaaatgagatgggcattgaactggaagatgggccgcaagggacaagctggcgtcgtaagtaa

SEQ ID NO: 10004 - DNA, 1854 bp, Photorhabdus luminescens
atgagtcccaagaatgattttaaagctttttctattagtaataatgctaacgtagtcagccaagaagggtatgaaacaagctcggctttaaagactggatttccaccagagaatattaccactcatttactcaataaggtattacgtcaatcttcagcaatatcgtctacaatagctaattttatcgcgacacaatatggcgatgatgttctggatgatggggatatagtcaaactcactactcagttaaataaagccttagaaaaaaagatcgcgacagaaattccaagtgcttcactaactcagaaaggaattgttcaactcacagataaaacaggcaacagtaattcacttgcggtcactcaaaaacttgtttctgatgtaaatgataatgctaacaacagattagcaaaaaaccaaaatggcgcagacattcctgataaaaatgcgtttgtgaaaaatctcggcttagcagaaaccgccaatttagctaaaaatgcggtaccgaatagtagaaaaattaatgggaaagcgttaaccggggatatcagcctgaacgctggagatgtgggggcatttaggcttggattaacaggaaacaacactgttagtaatcaagtcccctggaatgcaaataccgggttatatgatttgctgagacctggaatagattctcagcatatcgctcatttcaataatggcgttggaagctgcccagcttttcaattgaaagtgcagtacaaaaacagcgggattgcttatcgctccgcccgtgataattatggttttgaggaagattggactgatatttatacaacaaaaaataaaccaacggcagcggatgttggggcatttagactcggattagcaggcggatactctgttaataatccagtcccttggaatgcagacaccgggttatatgacttgctgagacctggaatagattctcagcatatcgctcatttcaataatggcgcaggaagctgcccagcttttcagttgaaagtacagtacagaaacggcgggattgcttatcgctctgctcgtgataattatggctttgaagaagattggactgatatttatacaacgaaaaacaaaccaacgccggcggatatcggggcatatgcaaaatccgaaggatctgaatttatccagccaaagtatattaatcaagcgaatataagtgatcttaccgcatggataaaatcattgccgcagggtggtcatgcattcagattttcagggaatgatagtggtattggatatgcgtggtcgggcggctatataacaagaatgcatgacatatgggcaggatttgtcgcgcattatgactatgccggtattagctttatccacggaaatgatggaggtggaaacacaaaagttagccgactttggacagataaaaacgcccgctccgacgctaacggcattctcagagtatccagcccagttgtagatattcatccagacggaacttacgagttaaccagcgaagctgaaggagtgacggttaagcgtatagatacagggaaatatcgtatcagaggctgcaatggttttgccaaagatggtgcgtggggaattcacggtggaactatcatcccggcagacagcaacgggttaaatctcatttgggtgcgtgaatcggtagacacaaccagcggcgatataaccatcgaatgttaccatcgtcaaaataaagacgctccagaatttgctcaaaataagcgtgtcaaaagcgtgactgcaacaggagaagtcgtttattaccatgatgctgaaccatgcgatattccagacggaagagtaattaatattcgtgtgcaactacctgagaagtcataa

SEQ ID NO: 10005 - DNA, 918 bp, Photorhabdus luminescens
atgttaaatgttttcttttcaattctacctatattcttgctaattactcttggcttcctatctaaaatatatataaaggacgtttctagtttctggaatttttcagataagtttgtttactatcttttttttccttgcttattaatattagatattagtgaggctaatttctctggttctgacaacttctatccaatcgtatcaaccataagttcaacaataataatcgctattattattttcatcggtagatttttatttaacactacaccagatctatttacatccattttccaaggaggagttagatataattcatatgtttttatagcactttcacaatcactattcggcagtgagggagttgcattatccggattttttgtggcctatatgataattattaccaatattatgagcgtactcgtaatgaatcattatggtcacggaagtaagaaaaatctgggtggtgctatccttgctttagctaaaaacccgctaattattggtgcaattattggagtattgctaaactactttaacattcatattaccggcccaatcagacaactttttatttacttatcgaacgcagctacaccattaagcttaatgtccgtaggagctggattgatcatcagcatgcatataaaaaagatactttcgatttcttatgcgactatacttaagttggttttaatgccactcatcaccatattgataataaaatatttaggtgtatcaggcgcttccgcaaacatcgctattctatattccgcagtgccttgtgccggcaatgcttatatattagctaaacaaatgggtggtgatcatgaggcaatggcatctattattacatggacaacgttattatccattattactgtaactttaattcttggcaatatgaagttatag

SEQ ID NO: 10006 - DNA, 1005 bp, Photorhabdus luminescens
atggattaccaaaatatatttaaattaaccatgcaagaaaaacaggatctctttttagcattaaataaaattgattacgatcctaccggtagtgatttatatattcatttagttaaatccgccatgatgtcttttttacctacaagagtaatatcagccctaaataaacaacgaacatctataaaccctagaccatatattatattaaagaatgttccaaccgattgtgaaatctttttctctccatcgccaaaccaatacaccccctcagcaaaatcagggaatattagtgaaaatcttttaacgggcatagcctcactcattggtgaaccctattcaatgctttttgaaggtaaggaactcatcaacaatctcattccaactcatgagtcgaaaaatgaatataccggtctaggatttgatgtcgaacttgactttcatattgaaaacgcagccctaaaacatttagaacaatataatatttcaccattgggtttattacttacaggtgtcaggcatgatcctggcggccctttaacacgcatctctgattcacgcttatctattgctcaattaaagaaagatgatatagaaacattatcttcaccattatacagcataaaattaccttatcgctggcgacaatccacattagttggaaaagaagaaacgcatcctgtccctctcatagcagaaaaccacatattacccaacatcagtgctgtattttatcccggtatgataacagcaagtacagctaaagctgaaattgctctagaaaaattctacgcttcagttaaaagaaatgcagtaggaatatgtattatcccaggggatttagtctatatagacaaccggctaactttgcattcaagagataaatttaccccaacatttgataatataggaacaccattacggtggttacaacgcgtatttatctcacctaacctttggaatcatcgatatttaaatcaaatagagcatagagttttttctatctaa

SEQ ID NO: 10007 - DNA, 660 bp, Photorhabdus luminescens
atgaatactcaacaagtcattgcccaccgtgttgctctcgaactacaagatggcgacgtgatcaatcttggcatcggcattcccacgcaagtcccgaactatctgcctgataatattcatattactctccagtcagaaaacggcatactgggccttggaccgattacagaagtacatcccaatctggtcaacgctggcggaaaaccttgcggtatcctgcccggcgctgccatatttgacagtgccctctcttttgctttgatccgaggtggtcacgtaaatacctgtgttctgggcggtctgcaagttgatcaacacgccaatctagccagttggatggtaccggggaaaatggtccttggtatgggaggagcaatggatcttgtcactggcgcgcgcaaggtcatcattgcaatggaacattgcaccaaagacggttcagcaaaaatcctcaagcagtgtactctgccacttaccgccatcaacaaagtcaacatgattgtcactgaattaggcgtcttctgctttgaacaaggccagttaattctgaaagaacatgcgccaaatgtcacattagagactctgcgggaaaaaaccgaagcagaatttagtatcgcgcatgatctcaaaatcatgcctattccgatacagaagaaataa

SEQ ID NO: 10008 - DNA, 660 bp, Photorhabdus luminescens
atgaaaaataaactcattagcacacagcaagctatggagcatttttatgacggcatgaccattatggctggcggttttataggcgtaggtacacctcctcacttggttaccgcattgctgaactccggtgtaaaaaatctgaccttgattgttaatgatactggccgtatcgacaccggcattggcccccttgtggttaataacagggtgaaaaaagttatcacctcacatattggcactaacccggaaaccggacgcaaaatgcttgctggagaaatagaagtagaactggttcctttgggtacgttgatcgaacgtattcgctgcggaggagccggtctgggcggatttctaaccccaaccggagtgggtactattgtcgaaaatgggaaacaaaaaatcaccctcaatggaacagactatttgttggaactcccgctacgcgccgatctcgcgttgattcaggctcatcttgccgattaccacggtaatctgacctatcagttaagcgcccgaaattttaacccagtgatcgccttggcagcggacatcacacttgccgaaccggacaggttggttgaagtcggtgagattacaccggactgcgttataacacccggcgcattgatcgactacatcgtttatccaggagaaaactaa

SEQ ID NO: 10009 - DNA, 405 bp, Photorhabdus luminescens
atgaagcaggaagtcaatcaacgacgccgtgcctcatccgacaactacggttgggatcggatcttaactaacagcctcaaaatgatggcgttgtgctgtgacagcgcgaaaattgcccgtagccacgccagagtattaattactggtgaaagtggtaccggtaaagggctaatcgctaaagccattcattataatagtccgcgggctaaaggaccgttcatcaaaattaactgtggggctttaccggagtccttacccgaaaacgagttgttcagccatgaaaaagagttcgaatgtcctggtggcagccacaccattaaaaccgacattcgtttgatcacagcaaccaaccgctttactgatatgcgcctatatccatatatcctatataaggaatcgatatga

SEQ ID NO: 10010 - DNA, 1080 bp, Photorhabdus luminescens
atgaacgaaaaatctgaaaactcttttatttggtatccggatcgagatcaaacatacactgaagagtatgataacaaaactattcctccaatatactcatttaataaagaaattggcaccaccttcacaatggatgctggagaaaatacattaacactgtcttttgataaaaatgatcgccctagcgactatgatattaagtggcctattcttagtccactacagactgccaaagataatccgggcaataaaactttatcaaaaacaataaaaatatcatcaggaaatctcataatatctggaaaaaaagaaaaacctgttaacttttatcttaatcgtgaaatttcaggcaaacatggacatagaattgaactacaaaactcaagtaccttcaaaatagaaaatgctggtattgtaagaattagcaaccacataaatacaaaattaaaagaatcaacagtggctatgtcaggaaaaagccagcttactgtagaggttgtggggactgtagaaaaaacacaagaaaataatgaagtgctaaaaactaatatttcactaaattgtgatttctttatcacagaatactctaacgctatgcttaaaagtcattttatcgatatatataatagcaatattatcttacaagataatgcacagatgtccataacttctcaaaaattaagaataaaaactgatttagatgaaaaaggtcaacctttattcgacacaaatttcactctaaaagccggagcaacttcattaaatctcaactctatagatggcatccactttccattaaatattcacagagaaaactaccctaaaggtgtattcaatttcatggctgaaggaaaagagaatacaggaaaagttgtcattgatgttgcaccaaaagatgctaatgcttatggcctcaatacattgctacgtaaaaatttcacagcgattaacggaaaggtagtagaaaccggagatcagatgaaatattttgattttaattatggaaaagatatccgcaacggtaatcaggtcggaacgataactatttctcttagaaaccctcatctaaaattatcttag

SEQ ID NO: 10011 - DNA, 1098 bp, Photorhabdus luminescens
atgagtatttttaattttatcagcaagatagaagacccccgttctgacatcaataaaaaacatgagttaatggatgtgatttttttagccttctccgctgtattatgcggcgcttctggctggaaatcgattcaggaatttggtgagttacagagcgagtggcttaaacaatacacgcattttactcacggtattcctcgtcgtcactgtattgctaatattatcaaaatgatagagcaagatgcactggttgaagccttttatgcctggatcaaccagcgtcgggtcagggcaggaaaaagtcttatcgccattgatggaaaaaccctgagaggaacctgtaaggggacattatttgaagccctgcatgtggtcagtgcttatgatgttgaatccggtgtagccctataccatcaggcagccgaaagcaaaggtcaggaaggcccggttgccagacaattgattgaattactggcgcttgatggcgcgattgtcactatggatgccctgcattgccagaaagaaacccttgcgttaattactcagcgcggtggtgattttattgtgggtctcaaaggcaatcaaaagaccctccatgaatgggtcaaatcgtattttgcttcgcattatgagagtgatgagcttgttgaatttacgcagaaaaatagcggtcatggacggacagaatttcggcatgtcatgcaaattcgtgccgtattaccggaggtccttcggcggcaatggccttcaatacaaagtgttattgaagtcgtcagtgaacgaagcgtaaaaggtcagcctccccatcgtaattcacgctggtatgtcagctcgctaccgttggaggcggaaatcgtggctaaggcaataagaaagcacgggtcggtggaaaacgagctgcattgggtattagatgtcacttttcgagaagatgctatctcactcaaagatcctgatggggctgcacaaatggcgctttttaaccgaattgcattaagtgtgattaaacagaataccagcataaaagacagtcaggcagctaaacgtcgaagagccatttggtcaggggaattccgtagtcaacttatctttgattaa

SEQ ID NO: 10012 - DNA, 450 bp, Photorhabdus luminescens
atgagtgaaatgaatgaaatgaaagtaaaaatagagaaattagaaagcatgcttgatgcatcagtgcgaacagttattactgcggtcaagaatgatctaagtagtagtttaaaagtaactgttggacctttacctcaaacaccagagttaattccctcagcgtctgagcaatccagatatacaataattcctccggtaggtcctactacatatcaggataaggtacttaaattcactactgtggtacaaagtcaagctctgcttaagaagatttgggtgttccaagattcaagagatccgctacttacaattaagtattgggttggtgaacaatttaactacgatgatgcaaatccggttagggtttctgctgagggtggtggaaataagtttatgataattaatgaagacagtgatgggatagcaggaattgctgttacaatgtactag

SEQ ID NO: 10013 - DNA, 1029 bp, Photorhabdus luminescens
atgagcgcagcttttaaatgggaccctaaaaattctcaggaattcactaaagattatggaactcaagtcattactttcacaccgactgatcaacaagcacaaccctatccgttcgataaattaggtggtgctaattttataatgaatgctgaaggtgaaacattaacgttacaaaatgactctaataaaatacctatatattggccagagtttaaacgtaacaatgatggaacaatgactgacagcggaaaaggaatgcagttcattatatcctcagggacattagaagtaagttatcaatcggaagatagaaataatacagttatttacttaggttgtgctgaaagtactagttttgactttaaagattcaggaatattaaacataataaatccaggaactgtattttttttcatagattatgttatttcaaacgaacttaagccaccaaaactgactatgtcaggaaacagtaaatttaaaataatacaaaaaacaaaaatacagcctaaagctcctgcctttatttttttagctagtgatatttctctgcatggatcatctgagcttacttttgaaagcaataaaatcttcttaggagatggaaatattaattactgtaatataaatatacaagataattcaaaagtaacactaattaatgatggtatagtaccaaaaaataacatagacaaaaccaaaacaaagttcaatctcagatctggaactcctatattaaacttatcatctcttacaggaatcaattatcctattaatcttgacaatatagaatatccaaaaggtttatttaatttcattactacagaaggaaaaaataaagggaaaattataattgacatttcaaatccagattctaaggagaccaatctaagtgataaaatattcagcaaagagctcatcgctatcaatggcaaaatagcagataaaaactcttttaatataagttataaaattgcaatacgtcagggtaagcaagttatcactacaacaatatcactcagagcataa

SEQ ID NO: 10014 - DNA, 438 bp, Photorhabdus luminescens
atgcaagaaaaaatagtagaattagaaaaactcattgattcacaagtttctacatatgtttatgtactcagtaattacataggtgacatgtgtgatataaacttatctggaggaaatttgcagactgattatatgatcaaggcagatggtgatttgactgatgtacttgtacacgttccagtgataggcccgcatagcgttattaagccactaaggctccatgttatgacacaattttgggattatgttggagttatttgggtgttccaagatgcaaggacttctgacggcataattaaatattatccaggtgataatcctaattataaagcttcaagagcggcggaaggtaataatagtggtggaggatataaacgtttgaaggttatatgtacaacgccaggagatctgaattccgttagaataagattgttctag

SEQ ID NO: 10015 - DNA, 834 bp, Photorhabdus luminescens
atgtttgattatgaaaaaactattcatccttatgaggggttaaaaatgagcgcagtctttgaatgggacccaaataattctcaggtatataccaaagattatggaactggatctattactctttcatctactcagtcagattcattcgataaattaggtggcgctaatttcacaatgaacgctgaaagtgaaacattaacactacaaaatgattccgataatatacctatttattggccagaatttaatcgccacaatgacggaacaatgactgatagcggcaaaggattaggcataaatgtatccgctggaacattattagtagactatcggctaaatgatcaaaaccatccagttgatagaagccatacagttgcttatttagggtgctctgaaagcactaattttattcttaaaaattcaggctccttaagcatcaaaaatccaggaactgtatttatgtttatagattatgtcgtttccaataaaccgccaaaactcatcatgtcaggaaacagcagattcgaaataaaacaaacaacaaaaatagaagatgatgttcccgcttttatatttctagccagtgaaatttctctaagtgaatcatctaagctcacttttgaaagtagtaatctctaccttggagatggaaactttaattactgtaatataagcatacaagataaatcgacagtgaccttgattaacaatggtataatgcaaaaaaatgacatagaaaaaaacaagacatggttcaagcttaaagcaggttctccttcactaaacttgaaatcttttgacggtatccacttccctctctatcttgcaacgtaa

SEQ ID NO: 10016 - DNA, 183 bp, Photorhabdus luminescens
atgtctagtgcttcccagtcttgtgatgtattaatttggaaaatcggagatactacttgcgctattacagcacaatgtcgtattgctcatggaccggctgtcgataacggtactcggtttttcccgtatcctaaggtatcacagctcgtgaactgcgatggttatttacagactagatgttag

SEQ ID NO: 10017 - DNA, 216 bp, Photorhabdus luminescens
atgtctagttcaatgactggttcagtaaaatggtttaacaacgataaaggttttggctttatttccccaaaagatggtagcaaagatgttttcgttcattattctgcaattcagagtaataatttcaaaacattggaagaaggtcaggaagtctcattctctattgagaatggcgctaaaggcccatctgcggtaaatgttatcgtattatcttaa

SEQ ID NO: 10018 - DNA, 393 bp, Photorhabdus luminescens
atgacacacgactatcaccaacttatagaagccctgttctctaaactcggggtacctgcatcgcctactgaggatggtatctacactctcgaagttgacgggcgttttcaagtattgattggctgttatcacgacaactggctacagttgttctgcgaattagggtccgaaatcagtcatgccaacaatctttttgggcaacattggccggctcatgttcaaggtgatttggatggacaagcaattttgtggtcgcaacgccctttgggcgaggtagacgtagccgagctacaagcttggttagaacgctttattgatgatattgagcagcgcctgacacctaacacaacccaacagcctaaaaatccgccgccttccttggtgcgggtttga

SEQ ID NO: 10019 - DNA, 984 bp, Photorhabdus luminescens
ttgtctcccatctcaagtattaatcaccaaagaatatttcctacccagcagctcgataccacagccgttaatcaaccacagggtgaactgtcgggtaaatccctgaaagtctcttcccccagaccggggttgttagagcgcctctcagcggcgattcaacgcaatctaccgggccactccatgctcgatcgccaactcactactgatggcaagaagaaccaagagagccgcttctcgttcagcatgataaaagacagaatcgttcactttgcggtgagcaccacgttagggagtgttcgaaattctgcgagtaagcacggcggcgaaatcaccttcaagttcgcccagaccaaggggacctttctggatcaaatcatgaaacatagtgacaccgccggcggggtttgtgaatccatatcagctcattggataagcgctcatgccaaaggggaaagtgtcttcgatcaactctatgtgggcggccaaaaaggacagtttcatatcgactctctggtttccattaagcagttacagatggatggtatagcccaagatgtcgatcaagacactatgaccgaatcttggcttagcgaaaatggcatccaaccacgcatgaaaacgataacctatcaaagcgccaacgggcccattaattacaaacgtccaatcgaagtcaacggtcagaccggcagtaatggcacatcagatctactaaacgctattctagacacaggcgataaaggttctagctataaaaagattagtttttcaggacagatggccgggcatgccgtagccgcttatgtagatgaccagaagggtgttactttctttgaccctaactttggcgagttccactttccaaacaaagaatcattctctaattggttctctcaagatttctggtccaaatccatgtacaacaaggaaatcggtcttgggcaacatttccaagtcctcaactacgagcctaaaacacaatga

SEQ ID NO: 10020 - DNA, 618 bp, Photorhabdus luminescens
atgttaccatttattaaaataacgacagggcatcttcaactgtctcctgaactccagatactgcgtaaagcggactatcagacctgcctcagtgccaaatctctgcttgaggctgcccggctccaggcacaagaaattgaacgtgacgcgcaggcagtgtatgagcaacaaaaagagttaggttggcaagcaggcattgatgctgcccgcgcagaacaagctaacctgattcatcaaacccagttgcaatgccaacaatattaccggcaggtcgagcaacagatgagcaatgtagtcttgcaggctgtacgtaaaatcctcaagaattatgaccaagtttccctcaccttacaggtagtgcgtgaggccctgtcattagtcagtaaccaaaaacaggttatcctgcgcgttaatcctgaacaggccgcaacagttcgcgaacaaatatcacgggtacacaaagatttccctgaaatcggctatttagagatcactgctgatgagcgtcttgatcaagggggctgtattttagaaacagaagtcgggatcattgatgccagtctggatagccaattagaagcactgatgtcagccatcaataaccaatggcaaagttga

SEQ ID NO: 10021 - DNA, 627 bp, Photorhabdus luminescens
atggtaacagcattaacgccctatcagtttcggttttgccctgccagctatattcattctgatcatctatccccagaatggcttaccgtcttatcttctctacctgagtggcgacactctcccaggcttaatggactactgctaacccaatttgatctaaatgtggattatgaattaccaactggattgggaaacatcgccctgttagagcaatcgtgcttagaacaacttcttacctggctaggtgctttacttcatgggcaagctatccgccattgtctgatggcgacagaacttcgccacttgcatgactcactaggaaaagagggacatcgcttctgcttaaagtatctcgacatcattatcggcaactggccgactggctggcagcgctcgttaccaccagaaatcaatgcaaactattttcgtaccagtgccttacagttctggctaacggcgatggagtctcctcctattgatttcgctaagcgcctgagcctgcggcttccctcttatgaaaacctcgcagcctggcctgtcagccaggcagaacgaccgttggcacaagcattgtgtctcaaattggctaagcaagtgaacacagaatgttaccatttattaaaataa

SEQ ID NO: 10022 - DNA, 738 bp, Photorhabdus luminescens
gtgaagaaacactatataatctgcgttatgctcgctgtcctgatgctaactggctgtaaaatcgaactctataccgatgtgagccaaaaagaaggcaacgaaatgttagccttgctcagggaagcgggcatttcctctgataagcagccagacaaagatggcaatatcaagctgttagtcgaagagtctgatgtggcacaagctgttgaagtgctcaaacgtaaaggatatccacgggagaacttctcttcgttacaagatgtcttccccaaggacggccttatctcctcaccaatagaggagcgggcacggctcaactttgccaaagcacaggagattgcccgaacactttccgagatcgatggcgtgctcgtcgcccgggtacacgttgttttacccgaggagcaagaccgactgggcaaaaagctatcgccagcctcttcctcggtgtttattaaacacgcagcggacgtgcaactcgacacttacatccctcaaatcaagcaactggttaataacagcattgaagggttgagttatgatcggatcagtgtcgtattagtgcccgccgcgggcgtgcgtcaggtaccgttggcaccacgctactccactctgttctctatccaagtgacggaagagtcacagggacggttgattgggctgttggtgctattattagccctgctatttatcagcaatctggcacaattcctgtggcaccgcagcaggatacaataa

SEQ ID NO: 10023 - DNA, 339 bp, Photorhabdus luminescens
atggatctaccacagataagcgagacactgatcaccagcctggatgaacttaatacacatcaggccagtgccgaaaatattgcgagttttgaacacgctatgtccaatcaagatcaggggattgaaaacaatctgatcaatgaattgggtcagcttagacagcaacttactcaggcgaaacaagatttggaaacacagttagcggtctctggtagtgatcctaacagcctgatgcaaatgcagtggtctctgatgcgaatcaccctgcaagaagagctgattgccaaaacggtaggacgactcaatcaaaacattgaaaccctaatgaaagcccagtga

SEQ ID NO: 10024 - DNA, 567 bp, Photorhabdus luminescens
atgaataggattgaagggctatcctataacaccgtgtcgcaaccaacggtacagccttcggtcagttccaagcaccagcacagctttgagcaagcactggaaaccacgcccgatcagcaaatgttgaaagagcgccagcaacgctggcttcagggagaaccgctggaaaacgttttaggcgacttagatccagcgacacaacgcaaagtgatatggcagtggtatcaggctttatcgtctgataaacagccctcccaacgtgctcagttacaggccaagctgattgccccggtacaagagcgcttatggtcgcagtttggtggcttggcaggcaacatcaaaccaccactggatatgccagaacttagaaagattgttcgtgaattcgcccccacaggtcgacaacaggagacggttcttcttgaggtactcggcgaaattaagcctattcctggcaatgagtacctgagtgaccttatccgacaagagttaaaaacgctgatcccccgtaacggtatggtggataacctgatacgaaactcacacaaacccgatttggaagaataa

SEQ ID NO: 10025 - DNA, 354 bp, Photorhabdus luminescens
atgacacgttcacttaaagggctactggcagatattgctctggttggaagcggccatcactgccatgacgaagccaatattattgccgactggctgatgtcaggcgaagaagagcaagaagctgcaaacctgattcggctctcttctctaacgaaccaaggcaaatatcaacaggctctggattttgggcgggaccttccctggccaagtttggaaccttggttagcattgtgcgagtggcgtttgggtctggcatcagccttggagcagagactgacgcgaatggctggcagtgacgatccacaattgctctccttcgtcgacggcatgcgggaacaactggctcatgaatag

SEQ ID NO: 10026 - DNA, 255 bp, Photorhabdus luminescens
atggcccaaatttttagttccgcaacaacagtgaatacattcgataaggttgctgaccagttgaaagagccagctaacgcagccaacaaagatgttgatgaggcaatcacggccctcaaaggcgggcctgataacccagctttgctagctgatttacaacacaagattaacaaatggtcggtcatctacaacatcaactctaccatcatccgggccatgaaagacctgatgcagggtatattacagaagatctaa

SEQ ID NO: 10027 - DNA, 219 bp, Photorhabdus luminescens
atgacatccctggaagcacgactgtttggtgctgatccctcttatgtcaacgaaatacaacatcgcctttctcaggcgctgaacgatatcaaacaacgcctgagatgtggcggttcggtacaagaataccaacaatggcaactggaggctgatgctatccaagctgcaatcacaatacttaacacaacagaaggagaccatcatggcccaaatttttag

SEQ ID NO: 10028 - DNA, 1269 bp, Photorhabdus luminescens
atgagttggaaaattcgcttttaccgcggactgaataaaagtattgaggtcaatttagctgaggggcgtttagccatcggctcagaccccctacaggcagatatcgttctggtggatgaagatgttgctcctgtgcacctgatcttagaagtcgaaccagactcaattcgcctgttggaatgggccggggaagctgcaccaagccagaatggcgaaccgctgtcaccgggtgcgacattgcaagcgctggcccgtcaggaagttggcccgttattgtgggctttttgtgaccagcaacatacattcccaagccaactagctgaacccgtggtcacaccacagcgccctgcccggcaaaatcgcagccgggtagcaggcggaatgttaatactttgtctggtactggcactcggtcttctggcgctacttggacatgaagggtggcaaagaaaccacatgtccaatggcatagccgagcaagaactacgccgttttctcagtagtgattcagcctatcgccaagtgagcgtacaaatgatgcccaatcacgggccgccgttgctcaaaggttatgtggctctcaaccaccaacggctggccctgcaacagtatctcgatacccactctctcagttatcggctggagctacgtactatggaagagttacgtcagggggtagatttcattttacaaaaattaggctatgcccagatccaaagtagcgatggtaaacaacccggttggatccgccttataggcgaagtcactgataccagccagcaatggaacaatatcgagtcactactcaaacgtgatgttcctggtttgcttggcatagaaaaccagacgcggttcaccggtaaccacctcaagcgactggatatgttattggctaaacatgatttacctgacacgctgacctacaaggataaaaatgatcgtatcgagttcataggtcaactggatgaacaccaaacgcataacttctaccgcttacagcaggtatttaagcaagaattcggcaaccagccggcactggtattactgaataataagcagctcacccgcaatgatgagctcaatttcgacgtccgggccgtttctctcgggcgtgtgccctatgtggtactcaaaaacaacttgcgttacccggttggagcaaccacagaaaacggtttaataatcgaggccatccgtcaagatgcgattgttattaccaagggtaagcaacaatttatcgtcaaacttaacaggagcccagcttcatga

SEQ ID NO: 10029 - DNA, 1869 bp, Photorhabdus luminescens
atggaaacaggcaatatggcaaccatgaaaccatttcaaaagctatgccgttcgctactgttgtcgttgagtatcagcggtgtgatgctcccctctgcttatagccaagatctggattggtttcctgcgccttatagctatctggcaaaaggagaaagcttgcgggatgtactggttaatttcggtgccaactatgaagcatcagtggttgtcagcgacaaggtgaccgatcaagttaacggccattttgagcaggacactcctcaggaattcctgcaacatttatcctctctctataatctggtctggtactacgacgggagcgtgctttatgtattcaaaaacagtgaaatacaatcgcgcctgcttaaacttgaacgaaccaacgcaacggagttacagcaagccctaaaacgttccggtatttgggagccacgctttggttggcgtcctgatccaagcaaccaactggtttacgtatcaggccctcctcgttatcttgaactggttgatcagactacatccgcactggaacagcagtcattgctgcgtagcgaaaaaacgggtgccttgacagtggaaattttcccgctcaaatacgcctcagtggtcgatcgcaagatccagtatcgtgataccagtattgaggcaccgggcatagccaccattctctcccgcctgctcagtgataccaatgtaactgctgttactggtgaagcatcatctccttctatgggagaaagctactcaagccgtgcagtcgtacaagcagaaccctccctaaatgccatcattgtacgggataacccggaaaggatgtccatgtacgcccatttaatcaacgcactggataaaccctccgcccggattgaagttgccctttccatcgtcgacatcgacgcaaacaacctttcagaactgggagttgactggcaagtcggcatcaacaccgggcctcgccatatcattgatatcacaacgtctgccagggaaaaaacagagatcaaagaaaaaggtgaaagcatcggttcagccgcattaggtagcctggttgatcgccgtggtctggattacctgctcgccaaaatcaccttactagagagtaaaggaagcgctcaggtgatttcccgcccaacgcttttaacgcaggagaatacgcaagccgtcattgacaacaatgaaacctactacgtgaaagttaatggcgaacgggttgccgagcttaaaagccttacctatggcactatgctacgcatgatccccagagtcatccaagtaggcgattcttctgaaatcagtttagacctgcatattgaggatggtaaccagaaacctaatagctcaggacaggatggcatcccgaccatcagccgaaccgtcgtcgataccgttgccagagttggacatgggcaaagtctgctgattggtggcatctaccgcgacgaaatgagtcaaataacacgcaaggtgccatttttaggcgatatcccctatctgggtgtcttgtttcgcaataccagtgagcaagttcggcgatcagtacggttattcattattgagccacgtctgattgatagtgggatagcccattatctggctcttggtaacggacaagatctacgccctggattactggcaacacaggatatctctaatcagagcttatcgttgggcaaagttctagggagtgcacaatgccaaccattatcctcagctcgtcaaatacaagaaacactacgacaagcaggtaaaagctcatttttagactcatgccgaatgggtaacacttacggatggcgagtcattgaacagcaatgttcactgaaagaaacctggtgtgttcgtgtacaaaataaggcgaatagatga

SEQ ID NO: 10030 - DNA, 423 bp, Photorhabdus luminescens
atgcaaactctactcaatcatttggccagtcgtttaggccagaagccttttgtttccgatagacaagggcattaccatttgcacattgataactacaacctgttttttcgccaacagggaactgaacttgtgttatccagcccgctaagctggcgccataacccaaaagatccgtcaggcgctgaattattgaaaacactattgcaacaagttacgcgctggggacgccatgctccccatgcattgaccttagatgaatcagagaatcttattttggaagcacgccttaaccttgatagtttggatgttcaaatactggaacagatgctaactctgcacgtcgatctactggaacaagtcatggctttattgtcggaaacccaatctgcccctcaatggaaacaggcaatatggcaaccatga

SEQ ID NO: 10031 - DNA, 834 bp, Photorhabdus luminescens
atgagccagcaagaccataatcagactcgaaccagcatgtttcttggccgcaagatctctgtcacgcagtcgggaattccacgccgggatcaattactcggaaaatcatcggctattcagtatcagaatagagacattattaatagccaacagtttattttattacagcgtttgctacccagacatctgctggaaagcttgatgaagtccgtctggtttcgtagacggttaaattgcgggcaagctttgcggcgtgatgacttacaacaactcatcagagcggcggcagaactggaatgtgactggaataaggtactgggtgaccgcataaacctagctgacagacatcttttacagcactgggtattacagccgctatttgactggtggctccgtttgttggagccagagatagacttctggttcactgaatttgatcagctacaaatccaagaacggcaactgcatgctaaagcgcatttttggcagcaagccgaaagcgtctcgtctcaatgccgggaacaacaacataaagaggttacatctttgcaaacagcgcttaatcaacgcaagcaactattagaaaaacggctgttgacaacggaaactcaggcgcgcgaagcatggcccaactggtttactgggctagatgccctccaaactggcggcgacctaaccgcttttatgccggttcccgaagcactgtcatcctgttgggcgtggttgactactttagagcatgacaccgaggcggctactcacttgcaaaaatggctctgtgcccgtttcctgtgcctgccacaggacaattttcactggcaatcgacgacctaa

SEQ ID NO: 10032 - DNA, 819 bp, Photorhabdus luminescens
atgaacggcatcacaacatcagggaagggaatggatatctcacgactccaacgtagcatgcctgcctttaacgttatagagcacccccaagaagggatatatatcctgctcgaaggtgaaatgacatggcaggacagtaccaatacctacgatatctcccacaacgagctgctttttgttcgtcgtggcagttatgcagcaaaaacgcgtagcgatacttgcaaactactctggttgcctctgagtacgactttcctccacgggtttctgcaacgctttggtactctgctcagtgaagtcgagcgacacaacatgtcaacacccgaattaattgcatttacctcatcccctctgttatctcaaagtataaatgggctggtcgatctattggctcatgattaccccacagcgttgggtcaactcagaacagaagagttgttattgttattagcatttggagaacaaggtactttgctcatgtcagtattacgacaattgagcaatcgccaagtggaacgtttacagagttttatggagaatcactaccttaaggagtggaaactcagtgaattcgctaaagaatttggtatgggattaaccaccttcaaggagctgttccgttcggtatacggaatatccccacgcgcttggatcagtgaacgccgcattctttatgcacatcagctactactcaatagcgagatgagtattgttgatatctcgatggaagcaggattttccagccaatcctactttactcaaagctatcggagacgctttaattgcacgcccagtcgagccagatatggcaaagagtaa

SEQ ID NO: 10033 - DNA, 1056 bp, Photorhabdus luminescens
atgagcggagaaaagactgaaaaacctactcccaagaaacttagagacgcccggaagaaaggccaagtaaccaaaagtaacgaagttgtctccacctcgttaatcttggggctaatcggcatgataatggtcatgtctgaatactatttggagcatctgagtaaactgatgctgatcccggctaatctgctagagaaaccctttccccaagccttcaaccatgtggttgaaaacttgatgcaagagctggtctacctctgcctgccaattctaagcgtttccgctttgctatcgctggtatcacactttgctcaatatggttttctacttagtggacactccatcaaacctgatattaaaaagatcaaccctgttgaaggtgctaagagaatcttctctatcaagagtctggtggaattcatcaaatcgatacttaaagtaggactgctctgcaccttggtttggattactctggcaggcaatctacaagcactactgcggctgccggagtgtggaacaagatgtattgttcctgtactcggcataatgttaacccagctcatgaccgtatgcggcatcgggcttatcgtgatttctattgccgattatgcttttgaacactaccaacatattaaacagcttagaatgagtaaagacgagatcaaacgggagtataaagagagtgaaggcagcccagagatcaaaagcaaacgacgccaatttcaccaagaattacaatcaagcaatatgcgcgctagcgtcaagaattcatcagttatcgtcgccaacccaactcacattgcggtaggtatccgttataagaaaggagagacaccgttaccccttattacactcaagttcaccaatgcgcaggccctacaagttcggcgtattgccgaagaggaaggtattccggtgttacaacgcattccgctggcccgagcactttatcaagatggcctgatagaccaatatattcctgctgatctcatccaagctaccgcagaagttttgcgctggttagaacagtggcaagatcgcccgccggagccgtaa

SEQ ID NO: 10034 - DNA, 789 bp, Photorhabdus luminescens
atgaccctacctgagctccagcagcaaatacttgcttataccctgttgttaccacgcatcatgagttgctttgtgatatttcctgtgctcagcaaacagatgctaggtggtgggttaatccgcaacggcgtggcctgctcgctggccctttatgcttatccaacagtagcaggcagccagttgcccacattaagtagcttggaattgacgctgttgctcggtaaagaagtcctgcttggtttgctcattggctttatcgcttctatcccattttgggcgatggaagccaccggttttattatagataaccaacggggagcaacaatggcttcagtgctcaaccctgccctgggaagccagacctccccaacaggtctgttattgactcaaacgctgatcacactctttttttccggcggcgcttttcttagcctgctcggagccctatttcagagttataacagttggccggtaacacagtttttccccaaaattaccaaccagtggctccactttttctatggtcagtttagctatctactacagctctgcgctttaatggcagcccctttgctaatcgccatgtttctggcagagttcgggctggcactgattagccgtttcgctccttctctcaacgttttcgtattggcaatgccgatcaaaagcgcaattgccagcctgttactggttatctatatccagttattgatgcatcatgcctatgataaggtgctgttaatgctctccccagtacgcatgttaatccctattctggaggcaccatga

SEQ ID NO: 10035 - DNA, 267 bp, Photorhabdus luminescens
atgagtaatgctgatattttacatttcactagccaatctctctggttagtgttaatcctttccctgccaccggtactcatggctgcggcagtgggaacattggtctcgttgatccaagcactcacccaaatacaagaacaaacattgggttttgttatcaaattaattgcagtcattatcaccctgttcgctaccgctacctggcttggcaacgaactctacagcttcgccaatatgacctttcttaaggtgccacagatcaaatga

SEQ ID NO: 10036 - DNA, 654 bp, Photorhabdus luminescens
atgatccaactaccggacgaattagatcttatcatcggtctggctttgctggctctgctgccctttattgccgtgatggcaacctcttttctcaaactggcggtggtattttccttactacgtaacgcgttgggcgtacagcagatcccacccaacatggctatgtacggtttggcaattatcctcactatctatgtgatggctccggtgggtttcgccactcaagattacctgcgtcaaaatgaagtttcattcagcaatgcgcagtcagtagataaatttgtggaagagggcctgacaccttaccgaaattttctcaaacaacatattaaacccagtgaacgcactttctttatcgatagtacccgacaaatttggccaagccagtatgccgatcggctagaaccagacagcctattgatactgttacctgcctttaccgtcagtgaattaacccgggcttttgaaattgggtttcttctttatctaccatttattgcaatcgatctcattatttccaacattctgctggcaatggggatgatgatggtttctccaatgactatctcacttcctttcaaattactgttatttgtcctgcttgatggctggacacgcctgacacatggccttgttatcagttatggagattga

SEQ ID NO: 10037 - DNA, 933 bp, Photorhabdus luminescens
atgaatagcctgaccttatccaaagtttcattggaagaattaacgctgcatcaggccctgagtcgccatcagcaacaatttagttgggataatagccatctcaccctagatgtgatctctcctccccaaacgttagacaaggtactgatcgcccattggcagggacaaactttttccttttactgccatgcagccgagctagcgctgtggctcgcacctgatctacaacaagcggacctcacatcactccctcaagatctgctgttagcactactggaatatcagagcaaaatgctacccactctgtcatggtcagcactgagtaccacgtcagaacgccgccctttgtcagcttgcttacgactccgccttgaacggccaggggccacattgccgctctggttaccagaaccatcccccttaattgccatattgccagaacgtcaacctagagaatgcctgcctattccattacgactttctctgcaatggggagcaataatcctgactttagatgtgtttcgtactctggaatcaggggatgtgctgctactgcccccacagcaacaaccagatgaccctttattagcgtatctggaaggacgcccttgggcctactttaaatcccatgaccataaattggagttaatcactatgcacacactctctcctgacagttctgacaacactctgccagtaacagatctaaacgatctggaggttcatgtcagtttcgaagtgggccgtcagaccttggacctacagacactcaccagcctgcaacccggctcattactcgatcttggtgttccttcagacggtgcagttcgtattcttgtcaatcaaaaatgcctgggttcagggcggttggtggatattgagggacgtctgggagtaagagtcgaacatctctccgtggagaaacaatcatga

SEQ ID NO: 10038 - DNA, 1131 bp, Photorhabdus luminescens
atgaacccactgacagctatcggcagaaaagatgtctcctccctcccaacgtcgtcacccgcagaggcagacgcagatttgcaacgccgtttcgagcaagctatcacctctcatgccgccaacacgcgccagtcaaccacacggcagacggaacaaccgttaaccaatacaacggcaaaccatgaaccagcggatcaacatgccacacatgactcagatgaggagcttccactattcgactctccccaaccggcaattgatgatctgcgcaagcaagccttaccattgacaggccatgacatgcctgcaccacatcaaaatcagaaaaaaaacttatcggcccccgctcaccgccttaatgagatcgctaacgagataaaggaatcgctgtcagcacccggagtcccaacacgtcagtcaaacctgaatgccttgtctgattctgacctaaagccggttgatatcacggtaacttctaatcctgacacagcaatgatgcagacaacacctggccgatccccatctcagccagacacacaacacagcgccattcctcaccaacagacagacccgacgttacctatacctgcccgcaatgccaacgaaatcaaccctgcggaaggaaaaacacgagatgaaatcgaaacatcccatttgttggtattaaaaccaaaagagtccgactctcaatcctctgactctggtggatcagacggaaaaacacctttcttcccacaaacccaattcctgccgggggagcgcatcctcgccacgatgcaagcaacttcaaccatatctccccttttggaagtgttgatcgacaaactgagtgtggagatcagtatcgaactaacccaacagccgcgtccggcgacattacatctgacacttcctaacttgggagcacttgagatccaactcaccagcgagcatggcaaacttcaaatagaaattttagcgaatcccgccgctcaacaactcctgaaacaagcacgttttgaactgattgaacgtttacagcttctttacccaacacaaactgtcgaactctcccttccgccccaaacggatagtgaacatggatcacgtcaacgtcgcagcgtatatgaagaatggaaaaaagatgcatga

SEQ ID NO: 10039 - DNA, 462 bp, Photorhabdus luminescens
atgattagccgtttacaacgcataaaagccttgcgagtcgaacgcgctgaaaaacatttttccttgcaacaaatgaagctgcaaacggcccgtcaacaccatcagcaggctttgcaaaccttgcaagattactgtcaatggcgaatagaagaagaacaacggctttttgcattgtgtcagggccaacctattgaccgcaaaggtcttgaacgctggcaacaacaagttgccctgttacgcgaaaatgaagcgcaattggaaaagcaagtggctgaaatgactgaaaaagtggagctggaactccgccaattaaaagagtgtcaacgtgttctgcaccacacacgccagcagcaagaaaaatttaatgaattgggtcgtcagcaacaagaggcgatccgggcccaaggtgaataccaggaagagctggaacaagaagagttccatcgccaggaaagagtgtaa

SEQ ID NO: 10040 - DNA, 1323 bp, Photorhabdus luminescens
atgaagctttcccttgaccatattcccggcaaaatgcgccacgccattaatgaatgccggctaattcagattcgtggccgggttactcaggtcacgggtacactccttaaagccgttattcctggtgtgcggataggcgaactttgtcacttacgcaatcctgacaacacactgtcgcttttggcggaggtgattggattccaacaacatcaagccttgttgactccacttggtgaaatgtttggtatctcttcaaatactgaagtaagcccaaccggagccatgcaccaagttggcgtgggtgattatctgttagggcaagtccttgatgggctaggtaatccattttccggcggccaattgccggaaccacaagcttggtatcccgtttatcgggatgcgccggctccgatgagtcgtaaacggattgaacacccgctttcactcggtgtacgcgctattgatggcttactcacttgtggcgaaggtcaacgtatggggatttttgccgcagcgggtggcggaaaaagtaccctgctatctacgctgattcgtagcgccgaagttgatgttaccgtgctggcgctcatcggtgaacgtggccgtgaagtacgggaatttatcgaatcagatctcggtgaagagggactaaaacgttccgtgctggtggtagcgacctcagatcgcccggcaatggagcgagctaaagcagggtttgtcgccacatcaatcgctgaatattttcgtgatcaaggcaaacgtgtactcctactgatggattcagtgacccgttttgcccgagcgcaacgagaaataggtttagctgccggcgagccgccaacccgacgaggttatcccccatcagtgtttgccgctttgccacggctaatggaacgtgctggtcaatccgacaaaggttcgattaccgccctctataccgtcttggtggaaggcgatgacatgacagagcctgtggcagacgagactcgttctatccttgatggtcacattattttgtcacgcaaactggcggcggctaaccactatccagctatcgatgtgttacgttccgccagcagggtgatgaatcaaattatcactcctgagcatcaggctcaggccggcctgttgcgcaaatggctagctaaatatgaagaagttgagcttttgttgcagattggagagtaccaaaaagggcaagatcccgttgctgacaatgccattgcacacattgaagcaatacgtaactggttacgccaaggcacccatgagccaagtgatctaccgcaaaccttagctcaattacagcagataacaaaataa

SEQ ID NO: 10041 - DNA, 873 bp, Photorhabdus luminescens
atggatattatccagaatcatcttcattcgataactttatcagaactgggtgccggggttaccgcacaacaggaacaggctaaggtaggtcagtttcagggagagaaagtcgtgctggtatcagcatcccagtcttttgctgatgcggccgaagagatgacttttgcattttcggaacgcaaggatatgccactttccaaacgtaaagttagcgatggacatgccagggtgcgagaaattgaggcactggtgggtgaatatttgcagaaggtgccagatttagagcgccaacaaaaagtcaaggcattgatctctcacttaaatagtgctcagttgactaatattgctcaactacaggcttatctggaaagtttctctggagaggtgagtgagcaattttatgcgctaagtcaggcccgtgatgcgctggcaggcaggccagaggcacatgccatattgacattggttgaacaagaattatcacgtttagcgcaagagcagggaattgctatcgagttgggagcccgcattacgcctgatgccacggcagcagctagaaatggggttggcaacttgcaagcattacgcaatatctatcgtgatgccgtgatggattatcaagggttgtcggctgcctggcgggatattcaatccaatttcaagagtagttccctgatggaagtaacaggattcatcatgaaagcgttgagtgctgatctggacagccaacagcggcaacttgatcctattaagttggaacgtgtgatgagtgacatgcataaactccgtttgcttaacagtttatcggttcaagttgaacagttatggaaaagcgtggtagagggggaaaatcatggcatacgggccttctga

SEQ ID NO: 10042 - DNA, 288 bp, Photorhabdus luminescens
atggcatacgggccttctgaccttatgggggatgtcgtttctctggttgagaaacgttgggccaatgtgcgagatgttgaaatactcggtcatgctttgggattgcaggatagccaaactcaaattcatttctaccgggagttgaagcgattaattcgcttgattccggtggaagtgttcagtgatgaagagcagcgccaaaacctgctgaatgcgtgtcaactggcgctggatgcagcaattgagagagaagaagacgaattgtggtcgggagagggagcatcatga

SEQ ID NO: 10043 - DNA, 372 bp, Photorhabdus luminescens
atgaactggatagagccgcagttactccagttttgtcaggatttgggtatggagatgtctgatgcttctagccccttgatccaaattgattttgagtattctggtacgttgcaaattgagcgctatggtggcgcattaacactttggctgggtcgtgaaattccctggcatcagggaaaagaggcaatggtgaaagcgatgctactcactttcagtggtcagggacccgaactgcccttgcgttgtggctggctgggagaagatcgtctgttattgtttgtgacactagatgaacgacatataaccttgcccttgctgcatcaggcatttcgttctttgctaagagtacagcgtgaggtgctcgcttcgtga

SEQ ID NO: 10044 - DNA, 366 bp, Photorhabdus luminescens
gtgagcaaaatcgctgccgcccatataggaattgagcaactaacggcgatcagtcgggaagagatagaggttagtttacccgatcgctacgcgttattgcccgatggtcaatccgttgagactcacgccgcacgtctttatccggccaacaaagctgatcaggctttgttggcttttgcctgcccgcaagatgggtttcacgctctgttgcgtccacatgattttcgtcaggcggttagtggtctgcgtacaattttgcaacaaggtaatgacatcagggtacagcatgctgtctccctgttggaaaacatgaatcaagatgaacagttgttgcagatggctctgcacctgttgcacaaggtatga

SEQ ID NO: 10045 - DNA, 330 bp, Photorhabdus luminescens
atgactctcagtgctaaacagcagagcgctctgttgctgctcggctggcttcaacttcaatacggtcatcctgaccgagcgcgtattttattagatgcattactggctttgcatcctgaacataaagaagggcgtcgtgccttggtagtttcattacttaaactgcaaaaggggagcatggcaaaagaacattgcactctcttacaagaacagggtgaacaaagcgccgccctctggctctgtgttagccgtgcttgtcaacaggaagggaatctggaagaagcacgcagtgcttatcagcgttatctcgctcaaggggctctattatga

SEQ ID NO: 10046 - DNA, 2118 bp, Photorhabdus luminescens
atgaaccgtgggtttgagttattgcggctgattggtgaacgtaaagacatcatgttggcaatattgttgctagccgtggtcttcatgatggttttgccgcttccgcctatcctgctggacattttgatcgccattaatatgaccatctctgttgtgctcatgatgatggcggtctatatcaattcccctttacagttttccgcgtttcctgcggtcttgctggtgaccacgctatttcgtttggcgctttccgttagtaccacccggatgatcctactgcaagcagatgccggtaaaatagtctacacctttggtaatttcgttgtcggtggcaacctgatagtcgggatagtgatctttctgatcatcactattgtacaatttatcgtcataaccaaaggttcggagcgcgtagctgaggttagtgctcgtttttcccttgatgccatgccgggtaagcagatgagtatcgacggagatatgcgtgctggtgttattgacgtcaatgaagcgagggagaggcgtagcattatcgaaaaagagagccagatgtttggttcaatggatggtgcgatgaaatttgttaagggtgatgcgattgcgagtcttctcatcatctttgtcaacattttgggcgggataaccataggcgtcacccaaaaaggaatgtcagcgtccgatgcattgcagctctatgccattttgactgttggtgatggtatggtctctcaggttcctgccctattgattgcgattacggcaggcatcattgttacccgagtttcgtcggaagacgcctctgatctaggtagtgagattggtgatcaggtcgttgctcaaccaaaggcactattaattggcggtgttttattggtggtatttggccttattcctggattccctacattaactttcttaatacttgcactggtggtggcgggtggtggctatttgctgttccagcgtcagcgccaagctaacgccagccaacaagcggatcttcctagcctgttagcccaaggagcaggcgcaccggcggccaaatctaaagccaagagcggcagtaaggccaaagctggaaaactgagtgagaaagaggaatttgctatgacggttcctttacttattgatgtggatgcgggattacaggctgagctggaagctatttcactgaatgatgaattaatacgggtacgacgcgccctctatttggatctgggcgtaccatttccgggtatccatttgcgctttaatgaagggatgaaggaaggagaatacctgatccagctacaagaggtgcccgttgcccgtggtcggctgcgctcagcgcatttactggtgcaggaaccagtcagtcagttggaattactggctatcccttatgaagaaggggaacctctattacctaaccagcctaccttgtgggtagcggaagcacatcaggaacgtttggtgaaatccgggctggcggctttatccatgtctcaggtgatcacctggcatttgtcacatgtgttgcgggagtatgccgaagattttattggcgtgcaggaaacccgttatcttctggagcagatggaagggagttatggggaattggtcaaggaggctatgcgtataattccattgcagcggatgactgagatattgcagcggttggtcggcgaggacatctctattcgtaatacacgtacgattctcgaagctatggtggtgtgggggcagaaggaaaaagatgtggtgcaattaacggaatatattcgcagtagtctcaagcgttacatctgttacaagtatgctaatggcaacaatatcttgcctgcttatctgttggatcaacaggtagaggagcagatccggggaggtattcgccaaacgagcgcgggtagctacttggcgctggacccagcggtgacgcaaagtttccttgaacagatgaagaaaaccgtgggtgatttaacacagatgcagaataaaccggtgttgatcgtatcaatggatattcgccgttatgttcgtaagttaattgaaggtgatcaccacggcttgccagtgctttcgtatcaagagttgacccaacagatcaacatccaaccgcttggtagagtgtgtctatga

SEQ ID NO: 10047 - DNA, 435 bp, Photorhabdus luminescens
atgaaccgtgatccgctcaccccttggtttgaggagcaaggttattcagtacagcctcactgtatggggaatagcccaatccctcttggctggcgtgtgtggtatgaaggctgtgaaattgcctggcgttatgatgcgccgcgagtttggatcgtgatgttacgccgtacccggcagcgtcgagggcttgcgaatccatttgcgcctctttatctgttggcaacagcaacgatggccatgcttgggccgggtagccggctttatggtcaagttaatactttggttgactctccccttaatgatgaacgtttggcccgcttttaccatcgctggacaggcgcaaatgaggtggtgcctggctggttcgagttagaagccagttgcgttatatcgctacatcaaatgagaaaacaacaaaaaaaagtccaacgttga

SEQ ID NO: 10048 - DNA, 279 bp, Photorhabdus luminescens
atgcaagaggaacctaacgccaaagtactgcaagctgctgaagcagccatcaaagacagtgatcacagactgcaactattgcaggagatgtggcagtctcttggcatcaaccccaatgtgggtacagaactgtttggtcatactgacgttactctggttcagaatgctgagcaagagttgctgacagaagttaatcgcttacgaagcaaccaacctccctctctggaagagggaaagcgtcttcgtcgcccacctcgtatgcgtggcattattgtataa

SEQ ID NO: 10049 - DNA, 915 bp, Photorhabdus luminescens
gtggaaattaggccatatcaaaatgacccacagcttttcttggcagatctagaaaaggtttcgctagctcaactacaaggttctggatcttcggagcttgatagattggttaatcttatttttgataaggggatcaagattacatctgattctagtgttgttactgaaaataaggagctcttgaaaaaactgattgcctatttcctgccagccgacgcggttgtcgagggtggtcacttagatagccaaataaaaaatggaattaataatcttgaatctttcttgaatagctcaacattaaaaacgtggacattaaaagattttttggctgcggttcattttaatttaacaccggatcgtcttgatgatgatgtaatcgatatttttgtttcggttatgtcaggtcatgataaaaaacgacttgagttgcgtgatgaactggcgacattgaccgcagagttaaaaatttacagtgttattcaatcggagattaatgcgaaattagcggctaatggggagcttaagattgatgataactctttcaatttgctggaccataagaagtatggttttagcgatcagcccacttttgagaaaagtgctgaatataagctgctaaggaagatatcttctggttctgaaatctccattaagacatttttggaaagttctaataaacagagtggagctatggcaggtctggagaattcttacgaatatgataaggaaaataatcgcctagccaacttttcgacttcagttaacgatcgtgtaagtccactaaacaatactgtccaggaaaaaacaacacgtttaaatgaggctagttcccgttataacgcggctattgaggcgttaaaccgttttattcaaaaatatgacagcattatacgtaatattctcggcgcaatttaa

SEQ ID NO: 10050 - DNA, 504 bp, Photorhabdus luminescens
atggagcatcaagaaacatcaaccacttctgaccaatatgcacaagagctggaatcttttcttcatgatggtggcactcttgccatgttgaaggatatttctagtgatacgttggagcaactttactcattagcgtttaaccagtatcagtcaggcaaatggcaggatgcacataagatattccaggctttgtgtatgttggatcactatgattcccgattcttccttggattgggggcatgccgtcaggcaatggggcaactggagcaggcagttcaaagctatagctacggagcgatgcttgatattaatgagccccgttttccatttcatgctgccgaatgtctcctgcaattaggagaacttgatggggctgagagtggcttctactcggctcaacaacttgcggcagcttcgccggaacaggccgctctggctgccagttccagtgcaatgttagaagctattacaataaaaaggactcaggaaaatggttcaagttag

SEQ ID NO: 10051 - DNA, 1179 bp, Photorhabdus luminescens
atggttcaagttagtgaatctaaaattcctcaaccggtggtcaatagttctccggttggtgaaatcctcgcaactacaccttcgaaaagcgcggagcacgttacgcccagccaggcgggtagctcgttgtcttctgatgccgctaagtcacgaggggtatcattgccagcgccattgacggtggtgaatactcaccctgatcaagaacaaatggccaggcttaaatcggttatgcaagaggctaagcaggcaacaggtctgataaaggaactgacagcaaagctgacagcaacttcgtggttgacctctctggtgttgcactcacttgaggaaatagagattaatctgggcgagctgaccagcaagcttgatcgtattcagacgagtctcaaaatccaggatatccagcgagcacgtcagcaaagcttgcagaaaatggaagagaaccagcagaagattaaagaagctgaaaattctgccaaagaggcgcagaaatctggattgttttctaagatctttggctggattagtgcaattacttcaattgtgatcggcgcgattatggttgctaccggtgttggtgcggtagccggtgctttgctgattgtcggaggagtgatgggggtagtctctcagggactacaacaagcagctcaagatggtttaatcagcaaggaaaccatgaaatggctagggccagtcataacagcgattgagattacgatggcggtggcggcggcggcagtcagtttcggtggttctgctgccggtttgattgcgaaaatgggcgctaaaatgggcagtaaagtggctgagatgacggctaagatggcagtaaaggcagcggaattttctgcaaaagccgcgggtacagcagcaaataccacgtctcggggcttgagagtggctatgcaggtgggcgattcgggagttgatgttactaatggcgctgctcaaactaccaatgcggccttccagagtaaagcggctaaccgacaagctgacgtgcaactttcacgtagcgaattgaccgcattccaagctgttatggacaggctcaaagaggagttgtcccacctggtagagtctttccaaaatgtgatggaaatgattttccagatgcttaatgcccggggagacatgataaataaccttgccagccgaccacaggaaatttag

SEQ ID NO: 10052 - DNA, 885 bp, Photorhabdus luminescens
atgaaaattaatgataacgccagtagtcaaggggttacttccagtaatggtgttgaagttggaactgacaactttgtgtcgacaccgacagcacatgaagctgctattcaacagccggaaaaaacgaggctcacggataaggttgaattgattgtaccgaaacagggcctcgatcccagtcgtttaggaaatgtcggacaagaattaaataacacgctggatatgatgtcgctactttttgagattgcaaagaggatgcgtgaactgggtattttgcagcgtgacactgagaataaagcgtccattgatgctcaaaaatcacaagtggatgagatgcgacatggtgccaaattgatgattgccatggcagtggtttcaggcttaatgacgcttggttcagggctgataggtagtttttcttccgttaaaaacagtcaggcggttaagcagcagaagacgttggaaagcaatattgctggtcgtaacaaattaatcgagtctaagttgcaacagttgggcaagagtagcgatgcggatcgggcagcaattggtaaagtatggaatgtagcacaagatgctgacaagagcactttgaaatctcttaccttggtttttgaaagtcgtaacagcaatcagcagttattaacctcagtgatgaaatctttagagggtatgtccaataattctgtgcaggtagaacagggactttctcaggctaaagccaaggaacatgaagtgggttcatctattgcccaacatgaaaaacagaagagtgaagaccaaatctcattgaataataatttcatgaaagatgttttgcaattattgcaacaactctatcagaatcatgttcaggcattgcgcgcggcgactggcgtggtgtaa

SEQ ID NO: 10053 - DNA, 372 bp, Photorhabdus luminescens
gtgttatataataagcttgggcgtaccgagaggtgcgctcttatcaatggataccgttatttgatctcgtttttaaaatccactaacaccaccaaaggtatagaaaaacgaaaatatcaaattaagatttcagtccttaacaggcagaatgtgttaaggaaaaaaagcattttcctatattccggtgtttggtttttgataatcactggggtgacctttttattaaaagaattgcccttgagtgacagaggcgtaaaaggcgatggtagtaaactgagtcccttttctgcgggggtaacccgtttgtttgactacttggtaattcaagttggtctgattgccctctctagtaggagtaacccatggatgtga

SEQ ID NO: 10054 - DNA, 438 bp, Photorhabdus luminescens
gtgatagccatcgtcaatcaagttttggctgaatttgctgctaaattcggcttgccgcacttagctttaaatcatgaaggtgtggctgctctctgttttgatgagcaccttcacctctctttgatcttaattcctgaacgtgaccagctcgttttacagatagatgtcgctgatatcactgcggtcggagaggggattttccgtcaattagccagctttaatcgtcattggtatcagtttgatcttcactttggttttgatgagtcaacgctgatggtgcagctttatcggcaaatgtcagcaagtcggctgaatcaggctgtttttgaagagagtctttcaagtatgttggatcatgctgagttttggcaggaattattgcaagctcaacttccgattggctctcaacagaacgaatctttgggaatgcgagtatga

SEQ ID NO: 10055 - DNA, 234 bp, Photorhabdus luminescens
atgaaaattgagaattcgttacccattcatttaacaaatgttccccatgaaaatggtagcctttgttgtggtcgtcgggttacgtcagggtatataccacaaaacgttcatgagccgctttctacgatgctgagtagaggtcttgccatggggcttgaacatgagacaacactacagcgcttgttggatgggcagcatactccgttgtcacaacgtaggatcagcctaacatga

SEQ ID NO: 10056 - DNA, 387 bp, Photorhabdus luminescens
atgaccaaaatagggttggtcttgttgtgtttgctgatgactggttgtgttagtgaggctattgagcatgaagcatcacgtctgattgagggggatgtgaccatgcgggcctctctacccagaacggcaaacgttgaggtgtcattgttgacggtggttgaaggaaaagtgttgacagtaggtgagatgcattatcgtttggatatgctacccgtcactttttctatgcggttgaatccgcagttttctcatggtgagttatttttaagagctcgtctacgttgggatgggaaacgggcagtgcaggcgaaaagccaacaacgcatcattgcaggaaaaagaattgtagtgcaattgtctcccttgccatgttatccagaatgctaa

SEQ ID NO: 10057 - DNA, 990 bp, Photorhabdus luminescens
atgtttcagtttgatattactattattatccctgtttttaatgatgagaataatataacctatttgttagattcaatttttgcacaagaaaatgttaattttgaagtcattattattaatgatggttcaacagataatagcttagaagtcattaaagaatatgaaagaaaagataatagaatacggatctttaatcaagaaaatcgtggtgtttcaatagctagaaattatggcataaaatatgcgagaggtgagtggattttatttgttgatagtgatgattggctaaaaccacaaatattaagaaaatggcttgatcacgctattgaacagagattagatgtgttaattggcaatggagttagttttacaaaagatccattctcacaaggaaatagaagaataacacgtagacaaccttatggtagagtattaacaggtaaagagtggataaaatattgcgttgaatgtagagaatggccacattttgtttggttacaacttattaaaaaagaattaattataaataaccaaatgagttttatggaaaatatctttcatgaagatatcttatggacaattaatttgtcacttatagcgaatcgaatcggcttttgtgaggagcaattgtattgttatcgacataatttgcaatcaataactcgctcaagagaaagtaaaaaattatatcatcgagctgatagttatattactgtggttaattcaattattaaaatctcaaaagaaattaaaggtgagaaatcgttaaaaagatctcttagtcgtcatgcaattcgagaggttggtagtttttttattttgtatagaaaaaagatacacgatccaagcttaaaaaaattgcttgctaaacgttttattaaccaaattgctttgagagatttattaccaggtgtgcataattaccatgaactatggtttattatacgttgtaatttagtcttaatattaaggaggttcatggatgagtga

SEQ ID NO: 10058 - DNA, 327 bp, Photorhabdus luminescens
atgaaatacatggataaacagcctgacatctggatgcagctatggttatggctgctgtcagtcaaagaacaaggtataggtgcggcgctggctgccgcaatggcttatctcaggggtcgatataacggtggtaaattttggacgacaattatggattctattatgtgtgccatgattgcttggtttatccgtgatgcgttgaatttttttggtatgagcacggatttggcttacatcagcagtgtcattattggttatctgggcactgactattttggtcagatcttaagaaaagttgttaataacaaaacaggtaataaacaatag

SEQ ID NO: 10059 - DNA, 402 bp, Photorhabdus luminescens
atgagcagaggtattcgaaataataacccaggtaatattcgttggggtgatgactggcaaggtctgatgcctgcatcacagcgtactgataaatctttctgtcagtttgttggtcctgaatatggtcttcgggcgatgattaaaattttgcataattacaatcggaaatatggccttaaaacagtgaaagagatcatttcacgatgggctcctactaatgaaaataatactgatgcctatattaaccacgtatgtaaaggtacgggagtgacttgcgatcaggttgttgatgtatttaataaagtatttatgacagagcttattaagtccattattaccatggaaaatggtagtcaaccttatagcaatgaggtcattgataaagcattttcacttttgtag

SEQ ID NO: 10060 - DNA, 450 bp, Photorhabdus luminescens
atgaagtttaactctcgtggttatactgttattgctctggcgcttgcctcgcttctggcttatcactattacggtaagtataccaaacagcttgatacgacagttaagctacagagtgagttgctggagcagcagaatgaaatcgttaatcagcaggagcgaataaggctcctgtctaaactggataatcagcatacaaaggaacttgctaatgccaaatctgaaattgatgttctgcgcaatgatgttgccgctggtcatcgtcggttgcgcatcgcagccacctgtcatcaaggccaagccggctcctccggcagcgtgggccatgcagacaccccacgacttaacccagcaactgaacaagattatttcgatctccgaagaatgattgttgagaacgaacagcaaacgaaatacttgcaagaatatatcaaaactcagtgtcaatag

SEQ ID NO: 10061 - DNA, 396 bp, Photorhabdus luminescens
atgaaaaaatctactatactaagaatcgccaggcccactgacaatttaactcaaattgctgaaatgtaccgccgaggtttaggatttattctcctggagcaattcgaaaatcatgaaaattttgatggcatcattctcgggcatccaaatcatctctggcatctcgaatttacgcatcatcgtggcacaacagtaggaagatcccccacacaggacaatttattggccttctatataccagaccattcagaatggttagatcagatatcattaatggaaaatgctggctttattgcagtcccctcttacaacccatattgggatattgaaggtaaaacatttgaagatattgatggttatcgggttgtattacaaaacacagtattccttgcttga

SEQ ID NO: 10062 - DNA, 1146 bp, Photorhabdus luminescens
atgaatattaaggaattaattatagttctggcattgtccggttctatgctattaggtggttgtactgttatgcctgggagtggtcttactgtttataataaagaaataatcaatgatgatgatagtaactatgatattaataatttggtaaacgtttatccggtaacaccaaaattaattgaaaatttacgggtgaattctgctattgcacgtcctaatcctgagttagataaagaattacaacagtatgaataccgtattggtgtgggggatgtcattatggttactgtttgggatcatcctgaattgacaataccggcaggacaatatcgtagtgctagtgatacgggtaattgggtgcattctgatgggacgattttttatccctatgttggtaaacttcatgtgaaaggaaaaacggtcactcaggtgcgtacgatgattactgataagttatcgaagtacatcgaatcacctcaagttgatgtcaatattgctgcttttcgttcacaaaaagcctatgtaacaggtgaagttgcccgatctgctcaacaacctatcactaacgttcctttaaccattattgatgcgattaaccatgctggcggcttaaccgaaaacgctgattggaggaggatcattttgactcataagggaaaagaaacgattatttctctccaagatttgatgcaaaatggtgatctgaagcaaaatcgtctgctctattctggcgatatcttatacattcctcgtaatgatgatttgaaagtgtttgttatgggggaagtcagaaaacaaaccactctacgtatggatcgcagtgggatgacgttgaccgaagcattgggtaatgctgaaggtatagatcaattatcaagtgatgctaatggcatctttgttatccgttcgctgcgtaatgtacctgataataaggggaaaatagccaatatttatcagctcaatgctaaggatgcgacggcgttagtcctgggaactgagttcaatttgcaaccttatgatattgtctatgttaccagtgcgccagttgttcgctggaatcgggttatcaatcagttggtgccaacgatatcaagcattaatagcctgactgaaacaactaagtggattcgtaagtggccgaattaa

SEQ ID NO: 10063 - DNA, 429 bp, Photorhabdus luminescens
atgttcaattctattctgattgtttgtgtgggtaatatctgccgatcgccaacgggagagcgtttattgcggcaactatttcctcagaaagagatttattctgcgggaatatcggctttaattggtaaacctgcaaatgaattctcaagtagggttgcggctagacatggattatccttagaagggcatatagcgcgtcaactaaccagtgaattatgccagcagtcaagtttgatcttggttatggaaaaaaaacatattgaggctgtaaataggataaatctaggggcaagggggaaaacaatgcttttaggtcactggttaaatgaaatggtcatccccgatccttataagtctgatatcgaggtttatgaatatgtgtatcagttattatttaagagtactaatagttggttagggaaattataa

SEQ ID NO: 10064 - DNA, 2148 bp, Photorhabdus luminescens
atgactacatcagataaatcaagtcacactcatacggatagtgatgaaattgatttaggccgtcttcttagtgccttattcgattatcgctgggtgattggtggaatcaccctattgttcaccgttattggcctttgttattccttgattgcgactccgatatacaaggcaaatgctttattgcaggttgaaaagagaagtagtgcattacctttaatcggcgacatgtcggatatgctttctggaaaaccgtcagatacatcggcagaattggagttgttaacttcccgaatgatattaggaaagacggtaaaggatctaaatttggatgttcaggttacagcggactattttcctgtgataggtaagggcattgcccgtcttcgtggtatgccaaagcctaatattgttattaaacattttacaatatcacctgaatatattaatgaagggataaaaatatatgttgacgatgcagaaaattatcggttgttttttgacgatcaggttttccacgggcaagtaaacaaagtatttgataccgatggcataaatttgcttatctcaaatatttcagcttctccagggcaaagtttcacgttggttaaacgggggcaattgggtgttattcgcgggctgcaacaggctttgcgggtaaaagaaaaaggtaataataccggtattatcttgcttgaaatagaaggtgatgatcgtgcaagaataaaattgatactggatagtattggtaaaaattacttgcaacaaaatgtgacaagaaagacggaagaggctgaaagtagtcttaatttcttaaaaaatcatttgcctaaagttaaaattgagctcaatcgttctgaagagttgcttaatcaatatcgtcaagcgaatgaatctatcgatttatcacttgaagcaaaatcggctttggagacattggtccaaattgagaaacagattaatgaattgacgttcaaagaagctgaattacagcaattgtataccaaacaacatcccgcttatgttgcgttgcttgataaacgtaaaactttggttgataccaaaaaggagctgaatcagtcaatcaaacggttacctaaaacacagcaggaaattttacgtttgaccagagatgttcaagttgaccaagaaatttatgtgcagttactcaataaacagcaagaattgaatatcgtgaaagcggggacagtgggtaatgtgcgtattattgatgaagctattgtagaaagttcagcggtaaaaccgaagaagtcactgattattgcatcgatgatggtattgggatttatattgtctgctgggttgatttgcatacgagtcatgtttcgtaaaggaatcgaaagtcccgaacaattggaagagataggtgtttccgtttacgccactattccactctctgagactcagatcaaacttgaccaacaacagaaaaagcgaattcatcgtcagaaattgcggttattagctattcaagatcctactgatttagctattgaagcattgcgtagccttagaacaaccttgcatttttcaatgatggaatctgcaaataaaattattcttctttcaggttctgctcctgaattaggaaagtcttttatttcagtaaatcttgccgctgtattggcattaagtaataaacgcgtgcttttaatcgatgcagatatgagaagaggccgtttacataaagtattggaaagtcctcaatctctggggctttctgaatatttggcaggtcaacatcaattaaaagggattattaccagaacgtatcttactgagcttgattttatcaaccgaggtgctattccgccaaacccgtcagaattacttatgcataatagactgaaagaattattatcttgggcagaagagcattatgattatgtcttggtagatactcctcctattttggctgtcactgatgctgcgattattgggagatatgcaggaacttcattgttaattgcacgttatcataaaacaagggttaaagaagttaatgtgactattcgccggtttagacaaaatggcattcatattaaaggtgtgttgctaaacgcggtagagaagaagtctggtctctattatgattctagcggatgttatcaatacagttataaggattga

SEQ ID NO: 10065 - DNA, 858 bp, Photorhabdus luminescens
atgagtgacctcatttgttataaacgaatacccatctggcagaaaaatacccttcctgaaatgttcactgaaaggcataacacaaaagaggggacttatgcttgtcttgagatctttgaaggtgaactggaatttgtgattttcgatggtgatcaggaagaaactgcatattttaatgtacaaaagcagcctcccattattcagccacagatttggcataaaattaaatgggtaagtgatgatattaaatgccagctctcttttttatgtgaaccacaatatctgttttataaacaaaataatttgtcattacctcactctgaaattatatatttggcaaatattatttctccttgtaagacattagatctgggggccggtcatggccggaatactttctatctggcagaaagaggttatgacgttacagccgtggatattagtcagcaatgtattaacacaattaatgttattaaagaaaaacagcaatttaaaaatatccgtacggctgtttatgatatcaactctcacaatatcaccgaaaaatatgatttaattatttcaactgtggtactgatgtttctacaacgggaaaaaatcaccgatattatttacaatatgcaaaaacagacgaataaaggtggtattaatctgattgtttgcccgattgaaacagattttgcaccatattcattattgccattcaaaagtttcctcatgccaggtgaattggagaattattattctgactgggaaatcattaaatataatgaaaaccctggtcatcttcataaaacagatgaaaatggtaatagaataaaattaaattttgctacgcttctcgccagaaagcgatga

SEQ ID NO: 10066 - DNA, 1593 bp, Photorhabdus luminescens
atggtggaacaacaatatttcattggtgttgatgttggctccgccagtgtccgtactgcggtttttgaccaatgcggcaaacggcatgcattctccgctcgccctatccagcaatttcatccaaaagctgattttgttgaacaatcttctgctgacatctgggcgcaagtatgtgcaacagtaaaagaagctgttgcactggcaaatattaatcctattgatgttaaatcaatcggcttcgatgccacctgttcactcgttgcggtagcagcagagggatgctctctttctgtggccgaaaatggcaatcctgaacacgatatcatcatgtggatggatcatcgtgccataaaagaagccatcacgataaatcaaaccaatgaccctgcactctgctatgtaggcggtgaaatcagccctgaaatggaactaccgaaaatcttatggttaaaaaactactttcctcaacgttatcaggatatatggcgtttctttgatttagctgattttctggtgtggaaagccactggcgctgatgtagccagtacctgcacgcttacttgcaaatggaactatctggctcatcaaaaacagttcagcgaaaaactactctatgatgtggggttagaagatttaacaaataaagttccatctaccatcattgaacttggcgaaaaagcaggttacctgactgctgaggtggctaaagattttgggctgcacacaggaatcatcgtcgccggtggtattattgatgctcatgccggcggattggcactgactggtgcctatccagagggcagcttggttattatcagcggtacctcaaactgccacatgattgtcagtcctcatcctgtcatggttccgggggtttggggcccctatttcggcgcaatgctacccggttactggctcaacgaaggtggacaaagcgccgccggcgcattagttgaatggtcaattcgtcaacacaatagctggccggagctggcagccgaagccgaggaatctggtcatcattactaccagctactgaatgaagcggttacacagttagaaaaacaagagatatacccgaccgcacagcttcatattttaagtgaccatcatggtaatcgttcaccaagagcaaaccctaatgccaagggaatggtaagcgggctgacgctggcaaatggtcgtgatgatctggcccgtcattacttggcaacactgcaatctatcgcctatggtacccgccatattattgatgcattagtagaagcaggacaccagataaacagactggttatgtgtggtggcgcaactaaaaaccctctatggttacgtgaatatgccaatgccactgggcgagagatccatctcactcaggaagaggatgctgtcaatcttggctctgctttgctaggtgccgttgcttgcggttcctttgcaaacttcgctcaagcagcaaaatcgatggtacgtgacggcaacattatcaaaccggaaaaagagacatttttatttcatcaagccaaatatcaggtctatctgcaaatgtaccgagatcaacagcaatataacgaaatcatgcaaaccggtaattag

SEQ ID NO: 10067 - DNA, 1368 bp, Photorhabdus luminescens
atggaattaatcacagaatggctgagtgctattaacggggtagtattgggagtgccgatgatggtcggtcttttgggggttgggttgttcatgcagctccgcctctcttttctgcctatacgtaaattgggaacgggttttaaattactatttgagcgtaatcatcagcggggagaagggcagatatcaccatttaacgcactgatgactgcgctttctgccaccataggaacgggtaatatcgctggcgtggctaccgcagttgtattgggtgggccaggtgcgctgttttggatgtggataactgcattagtgggcatggcaaccaaatattcagaggcggtactggcagtccgtttccgtgaggttgacaaaaacggtcactatgttggtggccccatgtattacataaaaaacggtttaggtaaaaagtgggcctggttggggacgttgtttgcggtgtttggcagtattgcttgtttcggtattggtaataccgtacaagcgaattcggttgctgatgtgctgcaaagtaactttggcgtttctaccatggtaacggccatcgtattggcaattctagttggtgcagtgcttatcggggggattaaacgtattgctgatgtcgccggtaaattagtgccatttatgacggttgcctatctcgctgctgggattattgttctgggaatgaatttcagtgaaattcccgctgcatttgttctgattgttaaatctgcatttacacctgttgcggcccaaggtggttttgcgggtgcagcagtgtgggcggcaattcgctttggtgtcgctcgtggcattttctctaatgaagcgggattgggaagcgcgccgattgctcatgcaacagctaaaactcaaaacccgattcgtcaggggttgatcgctatgctagggactttcatcgataccattattgtttgttccatcactggcttaactatcgtcattactggtggttggttgaacggtcagacaggtgcgacactgacagcgacttctttcgcgatggcgattcctggtggcaactatattgtcgcgggtgctctggtaatatttgcctttaccacaattcttggctggagtttctacggtgaaaaatgtactcaatatctatttgggcaaaaagctattacgcctttccgtgtagtatggattattgctttgatggtaggtgctactcagtcattggattttgtctggttattggcagatacattgaatgcgatgatggcaataccgaacctaattgcattagcattgttaagcccagttgtttatcggctgacgaaagagcatattaaagatgtgaatgcagatagtattgatattaaagccaaaatttaa

SEQ ID NO: 10068 - DNA, 1485 bp, Photorhabdus luminescens
atgaaacgattacacgatattgagaaagagatgttgcccgttgaatcctacaaaatgcttattggtgggcaatgggtagatagtgtatccaaagcaacgaccaaaagttataacccggcgacaggagaactcctggctgaatatgcatccggtaatgctgaagatgttgatcttgctgtcagcgctgcaaaaaaagccttccacgcctggagtcaaacctccgcaatcgaaagacaatcagctttgctgaaaattgctgacttactagaagcagaacaaaaacgttttgccatccttgaatcactggatactggcaaaccattaaatgaatccctgtatatggatttaccggccagcattgaccagttccgctattttgcgggtgtgatccgttcccataccgatgaagcttcagttctggataccaatacacttagcttggtgatccgtgaacccattggtgttgtcggacaggtaattccctggaatttcccactactgatggcggcatggaaactggctcctgctcttgcagcgggcaataccattgttattaacccggcaacactgacatcaatcactctgcttgaattgggcagaatattggataaagtcctgccagccggggtagttaacattgttacaggtcgtggttcagtcgttggtcaagccattctggatcatgaagatgtcgaaaaagtggcattcactggttccaccaaagtcggttataccgtagccgaagccgcagccaaaaaactgatccctgcaacactggagcttggtggtaaatcagccaatattatcttccctgatgccaatatgaaaaaagcagtaaaatatgcggccaaagctattttgctgaatcagggccaagcgtgtgaatcaggttcccggttgttcctgcataaagatattcatgatgaattcctcaaatcgctgaaaacagaattcgaatccatccaggttggtgatccattggaaaaagaaactcagatgggaagccaagtcagccaggaacaaatggaaaaaattctcgaatacgtggaaattgcgaaaaaagagggtgcaaccattttcacggggggtaaacgcattactgaaaaaggttatgacgagggtttctttattcaaccaactatcattaccgatgtcactaatgacatgcgagtcgcacgcgaagagatttttggccctgtattggccgtgattccattcagcgaagaagaagacgtgatcagaatggcaaatgattctgattatggcctggctggtgctgtctggacacaggatatcgaccgagcactacgcgtagctaaagctgtcagaactggccgtatgtggattaacacttaccatgaactgcctgctcacgccccatttggtggctacaaaaaatcaggcattggcagagaaacacacaaaatgatgttggatgcttacactcaggtcaaaaacatctatatcaaaaccagtgaagaataa

SEQ ID NO: 10069 - DNA, 1137 bp, Photorhabdus luminescens
atggcactcatccactgcactgcaaaatatattctgactgccatattgatattactgcctgtctttgcgcaagcaaaagtcattacagtcaaggacgttgctgggcggaaggttaaaattgacgcgccagtcagtcgggttatgctggctgacagccggatattgattgccctgaatattcttcaccctgataatccgcttaaaggtattgtcgcctgggataatgcactagaaattaaatctccagatttggcaactacttatgagaaagatttcccgcaattgcgggatattccggtattccctaacccttatcacagtgattttaacgtcgaaaaagcgctgacttataaacccgatctggttatttttgatattggtcttcaaaccaagctcaatgatagtggaaccatcatgttactggaaaaagcgggcatccaggttatctttatcgatttccatcaatatccgctaacaaatacgattccaagtatgattttacttgggaaggtattcaacgaagaagaaaatgcacaaaaatttattgagttttatcaagagaggatgaaaatcattaatcaacgcgttggtacgctaggtaaagaacagcgccctccggtgtttatcgaacgccatgcaggcatgttaggtgcggaacattgctgtaaaactttcggaaatggcaattttggtgaatttgttactgccgcaggaggtgataacctcggcgctcgctggttttcaggtatagatggtgaggtaaacgaaaaacaattaatcgtcagtaatcctgaattttatctgatgaccgccgcaaattgggataaagttcgctctggaagtttctctgtgccattaggttataccggcgatttaaaacagtcacaggaacgactaaaaaaattactgacacgccccaaattaagcgtattaagagcctttcgcgaaaagcaagtaatagcactgtaccaccaatattacgatacgccgtttaacatcattgctgttgagatcattgctaaattcctgcatccgaagttatttgaagatatcgatccacaagctgacaacctatatctgcataaaacttttaccgcccttgatggtaacggagtattctgggtcacagcaaaataa

SEQ ID NO: 10070 - DNA, 447 bp, Photorhabdus luminescens
gtgaccgaggtgagcgagtgcagccaacaaagaagcaacttgaaagatgacgggtatatacggtttattgcttctgttattattcccttgttgaatattcggtgggggatgaatatgaaaaaattgttagtaatttgtttgttaggatgtgtattagctggctgtgatagccaacctaaaatggatgcttctaatgaaatcgcgttgaaagcatccattgaaaaagtaagagataggctacctgatgataaaaaagtgaagtttgatgaatcaattcaatcggctatgtttaatagtatcgattttaatgatttggttaaatcaggttctaatggtgacatggaaaaatcgaaacaaaagttttataaattgctggatggtaaaacggctgaccaattgattactgaagttgaaaaaattgaatctaagagatcaaaaaatgaataa

SEQ ID NO: 10071 - DNA, 1071 bp, Photorhabdus luminescens
atgaaagtcacatcccatgaaaaaatggatgcattagcgattgctaatcattctattaatgaaataaatgctgatcagcagcggaaacatcgcgtgaaaaatgcagagacaacggtcagcgcatatatgagccaatgtttcatttctgtatctgttgctgattctgttttgtcggtaaaaagtcatttgattgatcagcttgaaggtgagcagatcccaacttacttatatgttattgatgctgaaggctatcttaatggcatattaccggtgaaagggttattaactgtagccgatgatttatttgtgtcagatattatgaggcaaagctatttttccgtatcaccggaacagtcgcgtcatgatgtttataatttgataaatcacagtggtatggatagtgtcccggttacccattttggtaaattggttggggtactacgatcgcaggatattgctgagttggttgaagatgaaaatacgttggatgctcatttgcagggggcaactttacctctggagcggccttatctgagtaccagcccaataacattatggcgtaagcgtgtcgggtggttattattactatttgttgcagaagcttataccggtgctgtgcttaaagcatttgaagatcaattggaagcggtaatttctctcgcatttttcattccgttattaataggaacggggggcaacagcgggacgcaaattacctcaactttggtcagagcaatggcattgggggaagtgagtttgcgtaatctatgggctgtgttgcgtaaagagatttccacttcatttttagttgcaataacgataggttttgccgcgcttatccgtgcctggatattaggtgtcggtattgaagtgacgattgctgttagtttggccatcattgcaatcaccctctggagtgccattgtttcttccattattccaatggtattgaaaaggctatctgttgatccggctgttgtatctgctccttttattgccacgtttattgatggtacagggctgattatctatttcgaaatagcgaaattagtgatgacagaactcgtttaa

SEQ ID NO: 10072 - DNA, 666 bp, Photorhabdus luminescens
atgaagaactgtacgatatcacctcagattatcaatacaatggaaataagtaatgaaccttggggaataaaagatagttcttcatgttttatttatggtaataaagcgttaagttctatcaaaaatttctcacaatcatttgattacagcgggctttatgatcatgaactcccttgggatggcgctgaatttgcaaaggaatatattcatcatgatcaaaaagtaatgaaaacagggaaaaatatatgctcacttgaaacacatatatttggtaaagagcaaattctatcatcttatttctgtgaaaagatgcctttttatcatgaagatggaagttgtataggcgttatatatcattgctggaggataaaggactattcattaacccgtctgtatcaatatcataataaacttccctcatccattttactccaaccaccgacagatctttttactgagcgtgaatgggatattattttccttttcttacagaaatacaccataaatcaaattggaataatcttgaatcttgattctagtgtaattgaaaaccatacggacaggatatatcataaaataaacataaactccactcttcaattagaagaatattgtcgagtcaatagtctttatcactatatccctgagaaatttttattaacttaa

SEQ ID NO: 10073 - DNA, 675 bp, Photorhabdus luminescens
atgagtcaaatcacccctcagctaacaaatatgtgggataaaagtcatgaatcatggtttgtaaaagataagaatcttcgttttatgtatgcaaataaagtatttatcaaattaagtaagttacctgaacactttgatgtcacgggatatactgctaaagaattacctacaccgtttaatcatcttgttcacctttttgaagaacatgaccgtaaggttttacaggcgatgcaacgaatatcatctattggggcttatcttcaaagcgatagccagcagcttaagccttatttttgtgaaaaatacccgttaatggatgaaaataatcaatgtattggagtaatttgccacattaaagaaataaatcatttttcagtacatcattatattaaaaatgacacaactatgtctgttaagcatagccccccgaataatatattgacagagaaagagtggatagtaatctttttattttgccgtggcatcagtaatcgatgtattgctaacgaaatgaaaatttcatgtcgtactttggaggggtatttccaaagtatatatgaaaaattatcgatcggatcaattattgaattgaagctattttgcgaaaataatcattatgatctctatattccaccaaaatattttaaatctatgaaccatttttttttggattaa

SEQ ID NO: 10074 - DNA, 210 bp, Photorhabdus luminescens
gtggtcatgctctcacctcagcgattatgtaaaataaatcataccccgactaatagaagcggttgggagtatgaattggattctcaatataccgacaataaagatcttaacaaccaaatctacgacctaactttgaaaatgagctatgaagctgatttgcatcatggacttattaagtatcatattccatcgtttaccctgactaagtga

SEQ ID NO: 10075 - DNA, 1002 bp, Photorhabdus luminescens
atgaccacaatgaaagacgtagcccatcaagctggagtatccgtagccactgtaagccgtgtcattaataataccgcttatgtcgaaccgggcactcgtgagcgtgtagagaaagctatgcgtgagttcaattatcatcgtaattctgccgcacttgcattagcgaaaaggtgcgggaatatgttgggtttactcaccggtaatttagctgatccgtttttttcgcttttagctcgcggggttgaaaaagttgcccgacaagaaaaagtaaaactgatggtttgtagtggcggatatcaagctgaacttgagaaatctgccttagattttttaattaatcagggatgcgaagcaatagtagcgcatgttagtaggatgagtgatgtagatgtattacgttatgccgctcatacaccaggattggtgattatcaatcgatatttccctgctatcgccaaccggtgcatttggttagataatgtcagcgcttctcagattgctaccaactatcttcttcaaaacggccatcgaaaaattgcttgtgtaacggcaaatctaccgattgataatagaaggctccgtctggagggatattatgcagcaatggctaatgcgggtgttacagtacctggcgattgggttatcagtgttccatttaatgaaaagggtggagaactggcagcagaaaagctcttagacagcgacatcggctttaccgcggcagtaacattcaatgatgttatggctgctggtatgatgcgctccctacatcaacggaaaatcaaattaccggaacaactgtcgattgttgggtttgatgatattgtcccggcccgatatctttatcctcccttaactaccgtacataatccaatagaacgaatggctcagcgggcggctaatctggcattgcaactcagtgccaaaaaagaaataactccacagatgaatatgttctcagccgaactcgttatcagagattccgtttttttaatcgagtaa

SEQ ID NO: 10076 - DNA, 1455 bp, Photorhabdus luminescens
atggatgacaagaaaaagcttaatttgggactcgctatactgccaatcgcagcaatgctcttattgttagttattggatatggtcaactgaatttacgcatcgaatccctattactgatatcagcagcaatagcagctaccttggcatattggcaaggttatcgttggaatgacattatcgatgctattgtgacaaagctggctaaagcgatgccggtgatcatgatactgatttgcgtaggcgggctaattgggacttggatgttcagcggaaccataccgtatatggtgtattgggggttaaaactgattagcccccaatacatactgattgcggctttttttatcacgagcgttatctcggtttgtaccggtacgtcatgggggtcagccggcacagtgggggttgctctgatgggcgtcgctgctggccttgatgtatctttggccgcggcagccggagcggttgtttcaggtgcgtatttcggcgataaaatttcaccgttatctgactcaacaaactttgctgccatcgttgccgatactgatctttacagtcatgttcaacatttgatgtataccactattcccggctttgttttagccgctattgtctattttattgtgggtcatacaagcttaacaggtaacgtggcaacaccggaaaaagttacagaaattgtgcaatctcttgaaagcctgtatcacttcaatttattgctgattttgccaccgatattggttttatggggagcaataacaaaacgtccggtgatacccgtcatgcttgctgcctgtgcattagctattgtacttggcataggtctccaagggctcacccttaaacagggccttaatgcgttgatagacggtttcaatctctcgatgttctctgaccagggacacaacattaccggagttgttagcgatgtctcccgtctgctcaatcgtggtggcatgttctcgatgatgagtactatcctgcttgcattttgtgcattcgcgttcgctggtgctttagcactcactggtgctttgaccatcatcattaaccggcttctacaagttgttcacacaaccgggcaacttatcgctgcaaccttggcaacaactattctggtaaccggcgcaacttgcaatggaaagctggctctcctcatcccggctgagctattcaaagatgcttatcgtcgcatggggctggataataaaaatctgtcacgaacaatagaagatggttgtaccgtcatagaaccgttgatcccttggactgccgctggcatttatatggcgacgacattgggtgtcagtacgcttgagctactgccttgggctatccagtgctattctgccatcttctttgctctcatttatggctttactggtttcggtatcgcaaaaatcacgccggagaactccctgaataaaaaggaaatccaacgtgaaattgcctga

SEQ ID NO: 10077 - DNA, 1179 bp, Photorhabdus luminescens
gtgaaattgcctgatttcaaccagataatcgatcgccacaatacaagctctgtgaagtgggactttttaggtcgtgatttgtacttaaataagactgacctgttgccaatgtgggtatctgatattgattttcaatgcccggaagcagtcttgcaaacactctactcccgaattgaacatggtatttttggttatagcgaacgcgacgatctctattatcaagcagcaatagactggttttcaaggcgtcataaactgaccttgcaccgcgattggtttacatcaatagaaggcgtcatacccggattggctttactgatacagatgctcagtaaaccgggggaaggtgtcgttgtgcaagggccttattatgcttcattcgccaaaattattactatgaacggcaggatggtgattgaaaacccgcttcttgaaagtctggaaggttataaaattgattatgatcatctggaacagatattggagcaacacagaccgcctctgttattgttatgtaacccacataatcctactggtagatgctggaatagtgacgaactactccagatattaatgctttgtaaaaggtacgggacgacggtaatttccgatgaaatttgggctgatttaattttaccgtgggggaaattcacctcaatactgcatctggggagtgaatggcatgacaatgtcattgccgccacctcaacaagtaaggcatttggactttcatcactccgtatctccaattttctcattcccaatcctgaacttcgacgtgcctttatcgatcggttgaatgcgcatggactagatgtattcaatgcactatcgatgactgcggctacagccgcatatcaatatggggacgtatggcttgatgaactacagcattatctggcggaaaaccgttgttggtttgagcaggctttaacgtctgttgttccctggtgtcgaatgaccaaagcggaaggtacttatctggcttggctggattgccgcgatttaaacttggatgatgatgctttgcaacgtgctttattacaaaaagccaaaatagccgtttcaatgggatcgagttttggtaatcatgggaaaggatttatcagaataaacttaggttgtccccgcgaatatcttgaaaaggcaataggtggtttagttcagataacatcataa

SEQ ID NO: 10078 - DNA, 213 bp, Photorhabdus luminescens
atgattgtaaaaaacgactggcacccagcggatattattgcgggacttaaaaaacggggaacgtcgttatctgctatttcaagagaggcggggcttgcatcatctaccttaagtaatgcgctgcaccgtccgtggcccaaaggcgaacgacttattgctgccgctttaaattgtgatccttgcgaaatatggccgagtagatattttaaatga

SEQ ID NO: 10079 - DNA, 567 bp, Photorhabdus luminescens
atgaataataagttaatcatttcacctcaagttattaacacattggcaatcagtaacgatccttggggaataaaagataaaaattcctgttttatttatggcaataaagcgctgaactccatcaaaggtttttctgattcatttgatttcgaagggctttatgatgatgagcttccttgggatggtgccgagtttgcaaaagaatatattcatcatgaccaaaaggtaatgaaagaagaaaaatcatatgtttcactcgaaacccatatttggggagaaataagaaccttatcctcctatttctgtgaaaaacaacctatttatcatgaaaatggtgattgtcttggaattatctatcacttgtggaaagctcaagattattcattaacacgtttatatcatggaaaactccccgcttccattatatttcaaccaccgactcatttatttacccaacgggaatgggatgtcatttttctctctttacataaatataccagtaaacaaattgatagaatattaaatatttcctaccgtactgttgaacactatacccgtaatcattga

SEQ ID NO: 10080 - DNA, 1026 bp, Photorhabdus luminescens; identical to SEQ ID NO: 6127

SEQ ID NO: 10081 - DNA, 900 bp, Photorhabdus luminescens
atgacgacaccaataaaactcaatcaactgcgcgcttttgttgaaatttaccgtcatggcagtatcagagcggctagtcggtttctgttactctcacaacctgctttgaccaaatcgattcgcgaactagaagattcacttggtgcaaaattatttatacgcagtaaccaaggtattcatttgacagggtgtggaaaaagttttttacaacgcgcctgtttgatacttgaggagcttcgaattgcacaggaagatattcaacaacgagttggcttgatcggtggtgtagtcaatattggcgtagctggcagtattgcacgtacgattatgccaaaggtgattacacagtttcaccgtgattatcctacagtaaaattaagagttgttgagggacagttattgactatgctacctcagctcagacaaggtgaactgaattttaccgtgaacacctattatcccggtagcttagatgcagaattgagcttcgaaaaattgatggaaaaagagtacaaagtgattgtacgaaaagggcatccaaaagtgaatgcaacctctttagacgaattaattgattgtgactggaccatgccaacaccgaaaggcacctactatcgcaggttatttgagatgtttacatcgctggataatccacctgtctttagtgtcacgtgtgaaacattaatggcttgcatgagtttagtctccgaaagtgactttgtgactattgtagctgtggatgtggttgatgagactctgtttaaccagcaatttgtggcgttaaaccttaaagaggagcttccctttgcaactttttgccttgttcaacgaagagatacaaagttaactcccgcaggagaacatttggctagactttttcggatgtattgtcgtgactaa

SEQ ID NO: 10082 - DNA, 1323 bp, Photorhabdus luminescens
atgggcactttattaagcgaatctattcagcaaattgctgaacaattacgaaactggcgtcgcgatttccaccattttgctgaatcaggctggttcgaattcagaacagcaacgattgtggtggatgagctgcaccgtctgggttatagcctgaaaatgggaaaagatgttatcaaggctgatgcacgaatgggcttaccttcaaaacaggcattacaagcgcaagaacagcgtgctattaaacagggcgctctgactgaatggctaccccatttttcaggcgggtttactggcattgtcgcgacactcgataccggaaaacctggaccaaccttggcttttcgggtggatatggatgcgcttgacctgaatgaggaacaaactcacgtgcaccgcccttatgctgaaggcttttcctcttgtaatacacatatgatgcatgcctgtggtcatgatggtcacacagcgattggattaggactcgcttgtatattgaaaaaatatgaaagccaactgactggaaaaatcaaactgatttttcagcctgcggaagaaggaactcgtggtgcaaaatcaatggttgaagcgggcgttgtcgatgatgttgatttctttatcgctattcatatcggcactggtgtacctcaaggcgaattggtctgtgggagtaataattttcttgctactaccaaaatcgatgttacttatcgtggtgtggcctcccattctggtgcaaaaccagaagcgggaaaaaatgcactgttagccgcagctcaagcaaccttagggctgtatgctatttctcaccatagcgaaggcagctcacgcattaatgtcggagtgctacaggcaggcattggccgtaacgttattcctgactatgcattaatgaaagtggaaactcgcggtgaaactaatgagatcaatgcatttgtctaccgtcaagctctcaatatcattgaaggcgcggcaaaaatgcagggggttgaatatggaatacagttaatgggagccgctcaaagtagccagcctagcccagtatgggtcgatttcatttatcaacaggctcaacaatatatcccagagctttcatctgttgtcaaaagccgtcagcaagctgccggatctgaggacgcgacctattttatggaacacgtcaaatcgaatggtggtcaagccacttaccttattttcggtacagcactcagcgcaggtcatcataatgaacggtttgactttgatgaaaacgtgatgactaccgcagtgaaaacattagccactatcgcccttaacctacctgatttcggagttcatcatgaataa

SEQ ID NO: 10083 - DNA, 1449 bp, Photorhabdus luminescens
atgaataactcgttgattgaattcatcaatgaatacattgagcaacgccaaagtgattttacttaccttagcgataagatttgggaacaccctgagaccaattttgaagaaaacttttctgctgaactgctcgcaaatgcgttagaaaatgaagggttcgttgttcagcgtggggtaggcaatattgagaccgcgtttatcgccagttatggcagtggacaccctgtgatttctttacttggtgagtatgatgcgctggctggtttaagccaaaaagcaggctgttgtgaacctaatcctatggttaaaaacggtaacggtcatgggtgtggacataatttactggggacagccgcactcgctgcggcatttacagtgaaagcctggttgcaaaaaaatcaacaaattggaactgtacggttttacggttgcccggcggaagaagggggttccggcaaaacatttatggtccggcaaggtctttttgatgatgttgatgcagcaattacatggcatcctgaatcattcagtagtgtatttaatgtccagtctctggcaaatatccaaacagcatttcattttaaaggagttgcttcacacgccgccaattcccctcacttgggtcgaagtgctttagatgcagttagtctgatgaatgtgggtgttcaatttcttcgtgaacatatcattcaggaagcacgaattcattatgcagtgactaataccggtggtgtgtcacctaacgttgtacaggctgatgccgaagttttataccttgttcgcgccccacaactggatcaggctcaagatatttatcaacgagtcattgatattgctaaaggtgctgccttaatgaccggcacgcaattgaatattcgctttgataaggcgtgttcaaactatattcctaaccgcacgatggaaagagtgatgtatcagtatattcaagcctttggtattcctgaatatactgatgaggaatgccaatttgccgaaaaaattcatcaaacactgacaaaagatgatttacgcaatgccaaactcaatgcagcgcgaacagcgggcgaagagggtaaacgctggagtgagcgacaaggggaaaaagcactgacagatgaagtcttaccctatatagaatcgcaagagttactgtatggatctaccgatgtcggtgatgtcagttgggtaacacccacagcgcaatgtttcagtccctgcttcgcctttggcacaccactgcatacttggcaattagtcgcacaagggcgttcatccattgctcacaaagggatgtgtcttgccgggaaaattatggccgccaccgcacttaaattattaatagaccctgctctgctagcagaggtccagtctgagttcaaacaccaacgggatgagcatccctatcagtgtcctattccgcccgatattaaaccatcacctttgaaataa

SEQ ID NO: 10084 - DNA, 1527 bp, Photorhabdus luminescens
atgagtgaaacaactatctctgtaaataagagcccaggacgtattcttggttggatcgaaagagttggaaataaaattccgaatccttttattttatttatctatttaatagctgttttaatgatagcgactgctattttgtcttggtttgacttggccgtaaaaaaccctacaaatggagagttcattagagttaaaaacttacttagcgccgaaggattacagtggatcctgcctaatatcgttaaaaatttcagtaacttcacaccacttggagcaatattagctttggtcattggtgcagggctggcagaaaaagtcggtctgttacaaaccctgatgtataaaatggcttctggtattaataaacgttacgccagctatatggtgctatttattgccttttttagccatatttcttcggatgccgcactcgttgtcatgcctccattaggcgcgctaatttttattgcggttggtcgccaccccgttgctggcctactggccgctattgctggtgttgcttcaggatttacggcgaacttattgattgtcactaccgatgtgctgttatctggtatcagtactgaagcggttaaaatgcttgatcccaacttacacgtcagtgtcatcgataactggtattttatggcaacatcagtgattgtactgacgattgcaggcgctatcttaacggataaatttgttgagccacgccttccagcatggaaaggaagtcacaatgagaagttagcaaagctcacgccacaacaaaatcgcgggctgctaatgagcggtctatctgcactaattttcatcggtattgttgcgttgctagttgttcccgaaaatgcactactgcgtgatccacagactggctcaatcattccatcgccattcataaaagggatcgtgccagtcattattttgtttttcttcgtggtttcgattacatatggcgtttccacaaaacagataaaaaagtctaatgatattccagacttactcgttgatcccatgaaaaacatggctggcttcattataatggtcttccctctggctcaatttgttgccttctttaactggagcaacatgggcaaatttatggcggtagggctaaccgatatgctagaagccttgggtatgacaggtgttcctgccttcattggattaatgtttttatctgcctttttgtgtatgttcatcgcaagtggttctgccatttggtcgattctggcacctatttttgttcccatgtttgtcctgcttggctttcaccctgcctttgcacagatcattttccgtatttctgattccgcagtattaccgttggcaccgatgtcaccttttctaccgctttttttggggtttcttcaacggtactataagggggctcagctaggtacttattacacgttggtattaccttatccgctggtgttttttgccgtttggatattgctgcttataggttggtattttgctggattgcccattgggccaggtatttaccctacattgctgtaa

SEQ ID NO: 10085 - DNA, 435 bp, Photorhabdus luminescens
atgagtcaaatcacccctcagttaaaaaatatgtgggacaaaagtcatgaatcatggtttgtaaaagataagaagcttcgttttatatatgccaataaagaatttgttaaattaagtaagttacctgaagactctgatatcatgggatattctgttaaagaattatcgacgccatttaattatcttgctcacttttttgaagaacatgatcgtaaagtcttacagtctatgcaacgagtatcatctattattgtggctcatcttaaaagcaatggtcaacagcttaatccttgtctctgtgaaaaatacccattgatggatgaaaagaatcaatgtattggaataatttgtcacattaaaagaataaatcatttttcagtacatcattatattaaaaatgatacaactatacccgtaatcattgaagatgcttga

SEQ ID NO: 10086 - DNA, 1026 bp, Photorhabdus luminescens; identical to SEQ ID NO: 6127

SEQ ID NO: 10087 - DNA, 693 bp, Photorhabdus luminescens
atgtcaaatataagaaaaaaaaccaatcatattacaccacaattaacgctgatgtgggataaaagcgatgaaccttggggagccagagatcgcgagtcaagatttatttatgctaaccctgctttttatcaactgctcaaccttcctgaatatttcgatattatagggctatctatgggggaattacccttgcctattgccgaatatgcagaagaattccatcgtcaggaccaaaaaaccattcaaactatgcaacgcgtcacttcactggaaacacatcagtttggggagcataacattaaacaaacttatatttgtgataaatttccactttatgatgagaataatgattgcattgggatcttctttcatatgtataaaactcaagatttttctgtttcgtactattatgaaaaaactcctccggcaacactggcattcaccccacctaatgacacactgacgcaatttgaatgggaggttctctttctaactctgtgttcattagatgaagagaaaattagtgaagaattaatgataagttccgaagatgtgattaatcatatccaatcaatttaccaaaaattcaatttgcctttacatgcagaattaaaagatttctgtaaagaaaataaacttgatctttatattccagcaagatttgtcactattggcagtagagagttaaattga

SEQ ID NO: 10088 - DNA, 681 bp, Photorhabdus luminescens
atggataataaactaattatttcacctcaagtcattaatacaatgaagcaaagtaatgagccttgggggatcaaagataaaaattcatgctttatttatggcaataaggcacttaaacatcttgaaaaccttccagactcatttgattacgaagggtggtatgattatgaacttccttggagtggcgctgagtttgcaaaagaattcgttcttcatgatcaaagtgtaatgaagagcgaaacaacagtatgttcgcttgaaacacatatgtatgggaacgataaattcttatcatctcatttttgtgaaaaatacccactatataataatgaaaacgaatgtgtcggagtcattttccacgggtgggaagtccaggatttttcattaacccgtctattttatggaaaactccctgcctccattatatttcagccaccgactgatttatttactccgcgtgaatgggatgttgtttttctctctttacataaatataccagtaaacaaattggcagaatattaaatatttcctaccgtactgttgaacactatacagcacaaatatacagaaaggttggtgttaggtctgctcagcaattggaggaatattgtcgttttaataattatgatctttatgtaccagaaagatttttacgtcctgaaagcagtattctggtttaa

SEQ ID NO: 10089 - DNA, 312 bp, Photorhabdus luminescens
ctgagttatcgttatatgccgtatttaccggaaaaagcgggcatgatttattacgcaataacctcctttactgtgcgttttaaggaagaaacggcagtaaatatcctttcttaccgcctaagaactatctatacccgttatccttcaagttgcctctttgttggctgcactcactcaccccggtcacatcgttacctatgctcccggggattcgttcccttgccgtcgcgatgcatcttgaaatccatagggtatattcgtatatctatgataaatgagaaaagaagatattttatcatcacgaaagcctaa

SEQ ID NO: 10090 - DNA, 1665 bp, Photorhabdus luminescens
atgaaaagcagtattgtattattaatagttttttgtagcgcagtctcaggtagtcaagccgccgacatcgcagatcaacaactcattcatcaacaggcccgccagcaagccctggagacgcaattagccccgccgcctgcggaggttcacctgtcggtaccggaaaccggggaatcatccgcctttgcggtggaaactccgtgttttcccattacccacgtcagactggcaggtaccgaaaatttcccgcactggttaccgttccggcttgtcgcccaacagggcgaaaaccattgtctgggcgataaaggcattagccggctgataacccaattgcaagatcagctcattaatcacggctatgtcaccagccgggttctggttcctcgtcaggatttgcgtacccaaaccttaaaactggtgatgataccgggaaaaatccggcatatccgctatacccctgacagcgggaactatatccagcggataaccccctttcccgcgcgtgaaggaaaattactggatttacgggatatcgagcagggactggaaaatctgcaacgtttccccaccgtgcaggcggatatgaatattgtcccggcagagcagccgggggagagcgatattgtgctggactggcgtcagtcccggcactggcgagtcgccacgtatctggatgataccggctccaaaagcaccggacgttatcagggcggactcaccttctttctggataatccgctggcgctcagcgacctgttttatctctccggtggacgcgatattcattcgtctgccgggaaaggcagccaaaatgacacgctctattactctttgcccttcggctactggatggcgagcgtgacggccagtcattacgattatacccagacaatagccgggctgaatcaggcgatccaatatcggggcaaaagccaaaacctggcggttcagcttagccgggtgctgcaccgtaatgccgaccagaaaaccctgcttaacggtgaaatttatcgtcgggcgtctcgcaattttattgataacactgaaatcgacgttcagcgccgggaaaccgcgggctggaagctggggctgtcccatcatcactttatcggcagcgcgacgctggatacccgggtgacttatcaacagggcatgcgctggtttggcgcacaaccggcaccggaagagtaccgcaatgaagggaccgccttacctaaaatcacccagttctcggcgacacttgccgggccgttaacgctgttttctcagccctttttttatcagacccaatatttgcgtcagataagcgccagcccattgacgccccaggatcgcttctcgattggcggtcgctggacggtacgcggctttgatggcgagctgaccttatccgctgatcggggttggtacagccgcaacgaactggactggcaaaccccgctgcgcgggcaatcgctgtatctggcaatggattatggcgaagtgggcggacggggcagcgatacgctgctcggaaaacacctggcggggagcgcgctgggctggcgaggcagcctgaaaggggtgagctacgacctgtttgtcggcgtcccgctgtccaaacccgccggcttccaaacctcccccgtcacggccggattcaacctgtattggcagtattaa
